United States Patent Application Publication US 2018/0126003 A1 - sequence listing, part 70

SEQ ID NO: 127461 - DNA, 471 bp, Artificial Sequence
  derived and/or modified sequence
atgatggtgctggacaaggaggacggcgtgcccatgctgagcgtgcaaccaaaaggaaagcagaaagggtgtgcagggtgcaatagaaaaatcaaagatagatacttgcttaaggcgctggacaaatactggcatgaagactgcttgaaatgtgcgtgctgcgactgtcgcttaggggaggtggggtcgaccctgtacacaaaagccaacctcatactctgccgaagagactatttgcgactgttcggcacaacagggaattgtgccgcctgttctaaattgatcccagcattcgagatggtgatgagggcacgcgataacgtgtatcacctggactgctttgcatgccagctgtgtaatcaaagattctgcgtgggcgataaatttttcctcaagaataatatgatactgtgccagatggactacgaggagggtcagctcaacgggacctttgaaagccaggtacaatag

SEQ ID NO: 127462 - DNA, 471 bp, Artificial Sequence
  derived and/or modified sequence
atgatggtcttggataaagaggacggggttccaatgttgtctgtgcaacccaaaggtaaacaaaaagggtgtgcgggttgtaacagaaaaatcaaagataggtatctactgaaagccttggacaaatattggcacgaagactgccttaagtgtgcgtgctgtgattgccgcctaggcgaggtcggaagtacactgtatactaaagcaaatctgatcctctgccgccgtgattacctccggctcttcggtaccacaggtaattgtgcagcatgtagcaaactcatacccgcatttgagatggttatgcgtgccagggacaacgtgtatcacctggattgcttcgcttgccagctgtgtaatcagaggttctgcgtcggcgacaagttttttcttaaaaacaacatgattctctgtcagatggattacgaagagggacagctaaacggcacctttgagtcccaggtccaatag

SEQ ID NO: 127463 - protein, 372 aa, Artificial Sequence
  derived and/or modified sequence
MLDGIKMEEHALRPGPATLGVLLGSDCPHPAVCEGCQRPISDRFLMRVNESSWHEECLQCAACQQALTTSCYFRDRKLYCKQDYQQLFAAKCSGCMEKIAPTEFVMRALECVYHLGCFCCCVCERQLRKGDEFVLKEGQLLCKGDYEKEKDLLSSVSPDESDSVKSEDEDGDMKPAKGQGSQSKGSGDDGKDPRRPKRPRTILTTQQRRAFKASFEVSSKPCRKVRETLAAETGLSVRVVQVWFQNQRAKMKKLARRHQQQQEQQNSQRLGQEVLSSRMEGMMASYTPLAPPQQQIVAMEQSPYGSSDPFQQGLTPPQMPGNDSIFHDIDSDTSLTSLSDCFLGSSDVGSLQARVGNPIDRLYSMQSSYFAS

SEQ ID NO: 127464 - protein, 395 aa, Artificial Sequence
  derived and/or modified sequence
MDIATGPESLERCFPRGQTDCAKMLDGIKMEEHALRPGPATLGVLLGSDCPHPAVCEGCQRPISDRFLMRVNESSWHEECLQCAACQQALTTSCYFRDRKLYCKQDYQQLFAAKCSGCMEKIAPTEFVMRALECVYHLGCFCCCVCERQLRKGDEFVLKEGQLLCKGDYEKEKDLLSSVSPDESDSVKSEDEDGDMKPAKGQGSQSKGSGDDGKDPRRPKRPRTILTTQQRRAFKASFEVSSKPCRKVRETLAAETGLSVRVVQVWFQNQRAKMKKLARRHQQQQEQQNSQRLGQEVLSSRMEGMMASYTPLAPPQQQIVAMEQSPYGSSDPFQQGLTPPQMPGNDSIFHDIDSDTSLTSLSDCFLGSSDVGSLQARVGNPIDRLYSMQSSYFAS

SEQ ID NO: 127465 - DNA, 5783 bp, Artificial Sequence
  derived and/or modified sequence
gcgtcccatggatatagcaacaggtcccgagtcgctggagaggtgcttccctcgcgggcagacggactgcgccaagatgttggacggcatcaagatggaggagcacgccctgcgccccgggcccgccactctgggggtgctgctgggctccgactgcccgcatcccgccgtctgcgagggctgccagcggcccatctccgaccgcttcctgatgcgagtcaacgagtcgtcctggcacgaggagtgtttgcagtgcgcggcgtgtcagcaagccctcaccaccagctgctacttccgggatcggaaactgtactgcaaacaagactaccaacagctcttcgcggccaagtgcagcggctgcatggagaagatcgcccccaccgagttcgtgatgcgggcgctggagtgcgtgtaccacctgggctgcttctgctgctgcgtgtgtgaacggcagctacgcaagggcgacgaattcgtgctcaaggagggccagctgctgtgcaagggtgactacgagaaggagaaggacctgctcagctccgtgagccccgacgagtccgactccgtgaagagcgaggatgaagatggggacatgaagccggccaaggggcagggcagtcagagcaagggcagcggggatgacgggaaggacccgcggaggcccaagcgaccccggaccatcctcaccacgcagcagcgaagagccttcaaggcctccttcgaggtctcgtcgaagccttgccgaaaggtccgagagacactggcagctgagacgggcctcagtgtgcgcgtggtccaggtctggtttcagaaccaaagagcaaagatgaagaagctggcgcggcggcaccagcagcagcaggagcagcagaactcccagcggctgggccaggaggtcctgtccagccgcatggagggcatgatggcttcctacacgccgctggccccaccacagcagcagatcgtggccatggaacagagcccctacggcagcagcgaccccttccagcagggcctcacgccgccccaaatgccagggaacgactccatcttccatgacatcgacagcgatacctccttaaccagcctcagcgactgcttcctcggctcctcagacgtgggctccctgcaggcccgcgtggggaaccccatcgaccggctctactccatgcagagttcctacttcgcctcctgagagccagccaggcgcacggacgcttgggcaggggcctgggggggactgccagcctctgcggccagcctggccacccccgccctgctctccgcacagactacagacagccatacggtgccctcccctcggccagctgggcctgaccactgtgcccgttgggtacagccagaccggtagatgggcacagcctgggcaggggctgtgtcctgcccacagagaccttgtcatccccagggacccagagctctcggacggccactcgcctcccagccccacctcggcctccatcgcctcctccccatctcttttttgggaagcttaaattctctctatttttttaaatgtcctctctgtgtccatggccctccatgcaagccccaggacaatggtgtcatgaggcggtgacctgagaagcgtgtgtacctgtgccccagcaagggcaggggtggcctctgggggcaggcccactgcctggaaccgcacacccctcagcctgagtctggagcagcagtggagaggggcctgaggggaggcactgtcaggaggcgggctcggagcctgagcctgggcaggcgcaaagggacagagaggcacgtgcagacacatgcacacttgcagacaaacccacgcaaacacacacacagctgtatggggacaccagaagggacagggatgctcagcgggtctgtcctgccttgtcagaaagagaaaaggaggccaggcaggggaccccccagttcttaagagcgattggaaagggaggaaggggagaggaagaggcgaacttgaagcatcggacccagttgtatcccagcctgggcccaaatgggggcagcctgggcagggagggcagccccaggccccaccaactctagaggcagatggagcccccagaaccaggtagcatcagaccagacaacagagcctccaggggtcagggacttcagaagcacctgctgggcaccccatctgcaatgtggtcctctccccagccacctctgcctcccctcacatacctccagtgacaaggagctcactaggtcagcgagcccacagcagctgtgctgtcctgcatcccagagccaggcttccccagctctccctcttaacactgtcccccagcaggcctccggctgtccctctaaaggtgtggggcaggtatcacttcaccttcccactgatgtcagccggccagaagtgagcaggcacatcacctctcctgctgtggcacccttcctctgttaatttggcccaaaagacaatgatttggccacatgaccttagagattcaccctgccctgctgtagctaaatccctgggccccacacgcaagtgacagctaagccacatctgttttctgtgtatatgcaggatgggggcacctactgttttgttttgttttgttttgttttgttttgttttgttttgttttgttttgtttgagacggagtttcgctcttgttgcccaggctggagtgcaatggcgcgatctcggctcaccacaacctccgcctcccaggttcaagtgattctgatgcctcagcctccctagtagctgagattacaggcatgcgccaccacacccagctaattttgtatttttagtagcaacggggtttctccatgttggtcaggctggtctccaacccccgacctcaggtgatccgcctgcctcggcctcccaaagtgctgggattacaggcgtgagccaccgcacccagtctgcacttactgtttagactgaatgagggaccgtgacctctttccttttccattccttcttactcgattcattccagcctgtggaatttctctgcaccctgattcagtgaccactgctctcctctctcccagcacatctgcccagtgaggagttggccctgggtctcacctgaggtgtgtggaccgggctggcctctccctgtttgacattggcccattaatgcatcctctttgggggacacattccaattgcatttcctgcccccttctcccagggcaattgcagaagattgtgtcaggcgccctgctggaagtcaggtgcactagatccatccccagccccagtctgctcaactctatccctgtcagagcaaggaggctgggctgctggggcctgactggtgagcccaccctgtcccctggtgatcactgtgtccccttgttcaggtgctcacaaccctacctttaactctgaggtcaagccctaggccaccaccctaaagtctgcctggtccaacctttgagcaagtaaggataatgaatgtcccttttccacctttggggccctctgcctggatctctggaatcctctaagttcaacctgttctgtggttttgctcccgtttgctgggaaattcagtccccccagaatgtcctgggccaacctccttgcctgacatgtggcctcgtgtcacccattgggccccagcagccagctagcccttctgcagctcttcttacaaacagagcctctccaaggacctcagttgatgttctggtccttctgccgcctcagcccaccagggtccgtgccaccatgggtctcttgagcagcagctgcactggcttctggagagacacccctctttctccttttgcacatgcaccatctgaatcgtgccagggacatcctgggcagattcaggggcagatgccctatcccccaggagacctggcccttctctctcagacccaataagttggaagggacgtcagaagcggtcatctcatctgccccttattttatagttggaaaccctgaggcaagagagggaaagaggcctgtccaaggtccgggttagtgacagagctgagctgagaacagggacgttgtgccccactgtcccctgtggtttgtgaatgacctccaggtcagggggtcacaacttgttcttagtaaacttgccagctgttggggtcacatattcccattctggggcctcacaaacccccgaatccagccgggaccccatgccaggagctggtctagggacagcatgcttgtgacccacagactgttaaagccagaagggacctcagagagtcccttatgctggaggcgccctgtcagccgtggctaggggccccttgctctatgctgtgccttgctgcccacaggctcccagacaccagtgcccactctgcccagccccggactgggtgtggctcgcagatgaacaagatgcagggcctgccttgaggggtgtctcctagaaggaaagccagactctccggcccagccagagagtccagacatggcagggacccgtttctcagatgaggagcctgaggctcagagaagggaggcgatgtgttcagggccacccagcagaagcctgtggggctgggcaaccttctcccactttatgggaggagctgcagccttggctgggagctgggcggggagtagccaggaccaccccttgcccgtgccgtgacatggaaccttcatcactaagggggctggagtgggaagagggagataactgtgtggtctccagagcaaaagagaatgagaggtgggcagggggagtcttggcaaaagaccaagttccacttccctgctggggaagtcaaggctcagaaagaggaaataattgccccaggtaacacagggcagaggagggacaaaaagctgggcatggccccagccagagcctcatctgcctactccgtgaagcctcccaggtactctgctatcctgggaaacgcacagggaggccacacagagacactgctcacaagagtcagaccaaggtgccagcacagcctggaaagagctcagaaagggggttggtgcacgtggctgggcatcttaggaggcttcctgagggtgggtaaaggtgggaaggccctggcgctgcatcagatgagcagggcctggcagggacaagcctcttctcctttgggaagccctgcagcctcctagcaagaggctgattccccactctgcccccatctgaatgtccttttcatgttgcacgcagggaacctcaggaaggaggattgcctgatgcctgcctggctccatccttgagctctgggcaccacctagggtgagggagagcctgcagctctggggctaagtctgccctggggggaaagggctccacgctcacacgcacgcgctcgcacacacacactcacacctggacgcacacggaggcttgcggacccatactcacaggcacatgtggcctggggactgggggagcaggaaagacccctccaacatttggcccttggaaggcaccattgccaatgagcctctttgctggttcccccgaccccacctgggggtcccatgggagcccagcccagccaggtgtggggatgggccaccggccattcctgttttccttgtacagacagattctcactacccacccgccatccccagacacattttatttaataacttgtcattgttaaattatttattagcgtttaccacaccaccacccccaccctgccctccactctcaccttccacctcttcccacaacagcagaaaatggaaacaacaacaaaaaaagatgagacatcagtatatttgtaaataaaccgacctgtacactcaaaaaaa

SEQ ID NO: 127466 - DNA, 1119 bp, Artificial Sequence
  derived and/or modified sequence
atgctggacgggatcaaaatggaggagcatgcgttgcgaccagggcctgctactttaggggtgttgctagggagcgactgcccgcaccccgcagtctgcgagggctgtcagaggcctatctctgatcgattcctcatgagagtcaatgagtcttcctggcatgaggagtgccttcagtgcgccgcctgtcagcaggcgctcaccaccagctgttactttagggatcggaaactgtattgtaagcaggactaccagcagttattcgccgccaagtgtagcggctgtatggagaagatcgcgcctacagagtttgtcatgagggctctggaatgtgtgtatcacctgggctgtttctgctgttgcgtatgcgagagacaacttcgcaagggcgacgagttcgtacttaaagagggacagctactctgtaaaggagattacgagaaggagaaggatctactaagttccgtgtctcccgatgaatctgactcggtcaaatcggaggacgaagacggcgatatgaagcctgctaagggccaaggctctcagtccaaaggctccggtgatgacggcaaggacccgagacgacctaagcgcccacgaacgattcttacaactcagcagcgaagagccttcaaggcttcttttgaagtcagttcgaagccttgcaggaaggtccgggagaccctggccgccgagactgggctgtctgtgcgggtcgtccaggtgtggtttcagaaccagcgggcgaaaatgaagaaattagctagacgtcatcagcagcagcaagaacagcagaattctcagcgtctcggccaagaggtcctgtcctcacgcatggaaggaatgatggcctcttacacccctctcgcacccccccagcagcagatagtagcaatggagcagagcccatacggctcctccgatcctttccagcagggactcacacccccccagatgccaggcaatgactctatctttcatgatattgattcagacaccagccttacgtccctgtctgactgctttttggggtcttctgacgtgggtagcctgcaggccagggtaggcaaccccattgaccgtctttacagtatgcagtcctcttacttcgccagctag

SEQ ID NO: 127467 - DNA, 1188 bp, Artificial Sequence
  derived and/or modified sequence
atggacatcgccaccggacctgagagtctggaaagatgtttcccacgtggacagaccgattgtgcgaaaatgctcgacggaattaaaatggaagagcatgctttgaggccaggacctgccaccttgggagttctgttaggcagtgactgtccacatccggcagtctgcgagggctgtcaaaggccaatctcagatcgcttcctgatgagggtcaacgagtcctcctggcacgaagagtgtttgcagtgtgctgcctgccagcaggctctgactactagctgctatttccgcgaccgcaaattatattgcaagcaggactaccagcagctgtttgcagccaagtgctccgggtgtatggaaaaaattgccccaaccgaatttgttatgagagcgctcgagtgtgtgtatcatctgggatgtttttgctgctgcgtttgtgagcgccaactccggaagggcgacgagtttgttctgaaagagggccagctgctctgcaaaggagactacgagaaggagaaggatctgttgtcctccgtcagccctgatgagtccgactctgttaagagcgaggatgaggatggggatatgaagccggcgaaggggcaggggtcccagtcgaagggttctggagacgacgggaaggatcctcgacgacctaaaagacctaggaccattttgacgacccagcagcgtcgagccttcaaagccagtttcgaggtttcctccaagccttgcagaaaggtgcgcgaaacactggcggccgagactggattgagcgtgcgagtggtgcaggtttggtttcaaaatcagagggctaagatgaaaaagctcgcaagaaggcaccaacagcagcaggagcaacagaacagtcagcgactcggacaggaagtattgtctagccgcatggaaggaatgatggcaagttacacccccctggcgcccccccaacaacaaattgtggcaatggaacagtcgccttacgggtcaagtgatccttttcaacagggtctgacccctccacagatgccaggcaatgacagtatatttcatgacatagattctgacacttcactaacttctctatcagactgtttcttaggttctagtgatgtgggaagtcttcaggccagagttgggaaccccatcgacagattgtactctatgcaatccagctactttgcatcctag

SEQ ID NO: 127468 - DNA, 1119 bp, Artificial Sequence
  derived and/or modified sequence
atgctggatggcatcaagatggaggagcacgccctgcggcccggccctgccaccctgggcgtgctgctgggcagtgactgcccccaccctgctgtgtgtgagggctgccagaggcccatcagtgaccgcttcctgatgagggtgaatgaaagctcctggcatgaggagtgcctgcagtgtgccgcctgccagcaggccctgaccaccagctgctacttccgggacaggaagctgtactgcaagcaggactaccagcagctgtttgctgccaagtgcagcggctgcatggagaagatcgcccccacagaatttgtgatgagggccctggagtgtgtgtaccacctgggctgcttctgctgctgcgtgtgtgagcggcagctgaggaaaggagatgaatttgtgctgaaggagggccagctgctgtgcaagggggactatgagaaggagaaggacctgctgagctctgtgtccccagatgaaagtgacagcgtgaagtcagaagatgaagatggagacatgaagccagccaagggccagggcagccagagcaagggcagcggagatgatggcaaggacccccggcggcccaagaggcccaggaccatcctgaccacccagcagaggcgggccttcaaggccagctttgaggtgagcagcaagccctgcaggaaggtgcgggagaccctggccgctgagaccggcctgtctgtgcgggtggtgcaggtgtggttccagaaccagagggccaagatgaagaagctggcccggcggcaccagcagcagcaggagcagcagaacagccagaggctgggccaggaggtgctgagcagcaggatggagggcatgatggccagctacacccccctggccccaccccagcagcagatcgtggccatggagcagagcccctacggcagcagtgaccccttccagcagggcctgaccccaccccagatgcctggaaatgacagcatcttccatgacatcgacagcgacaccagcctgaccagcctgagtgactgcttcctgggcagcagtgatgtgggcagcctgcaggcccgggtgggcaaccccatcgaccggctgtacagcatgcagagcagctactttgccagctag

SEQ ID NO: 127469 - DNA, 1188 bp, Artificial Sequence
  derived and/or modified sequence
atggacatcgccactggacctgagagcctggagcgctgcttcccccggggccagacagactgtgccaagatgctggatggcatcaagatggaggagcacgccctgcggcccggccctgccaccctgggcgtgctgctgggcagtgactgcccccaccctgctgtgtgtgagggctgccagaggcccatcagtgaccgcttcctgatgagggtgaatgaaagctcctggcatgaagaatgtctgcagtgtgccgcctgccagcaggccctgaccaccagctgctacttccgggacaggaagctgtactgcaagcaggactaccagcagctgtttgctgccaagtgcagcggctgcatggagaagatcgcccccacagaatttgtgatgagggccctggagtgtgtgtaccacctgggctgcttctgctgctgcgtgtgtgagcggcagctgaggaaaggagatgaatttgtgctgaaggagggccagctgctgtgcaagggggactatgagaaggagaaggacctgctgagctctgtgtccccagatgaaagtgacagcgtgaagtcagaagatgaagatggagacatgaagccagccaagggccagggcagccagagcaaaggaagtggagatgatggcaaggacccccggcggcccaagaggcccaggaccatcctgaccacccagcagaggcgggccttcaaggccagctttgaggtgagcagcaagccctgcaggaaggtgcgggagaccctggccgctgagaccggcctgtctgtgcgggtggtgcaggtgtggttccagaaccagagggccaagatgaagaagctggcccggcggcaccagcagcagcaggagcagcagaacagccagaggctgggccaggaggtgctgagcagcaggatggagggcatgatggccagctacacccccctggccccaccccagcagcagatcgtggccatggagcagagcccctacggcagcagtgaccccttccagcagggcctgaccccaccccagatgcctggaaatgacagcatcttccatgacatcgacagcgacaccagcctgaccagcctgagtgactgcttcctgggcagcagtgatgtgggcagcctgcaggcccgggtgggcaaccccatcgaccggctgtacagcatgcagagcagctactttgccagctag

SEQ ID NO: 127470 - DNA, 5776 bp, Artificial Sequence
  derived and/or modified sequence
gcgtcccatggatatagcaacaggtcccgagtcgctggagaggtgcttccctcgcgggcagacggactgcgccaagatgttggacggcatcaagatggaggagcacgccctgcgccccgggcccgccactctgggggtgctgctgggctccgactgcccgcatcccgccgtctgcgagggctgccagcggcccatctccgaccgcttcctgatgcgagtcaacgagtcgtcctggcacgaggagtgtttgcagtgcgcggcgtgtcagcaagccctcaccaccagctgctacttccgggatcggaaactgtactgcaaacaagactaccaacagctcttcgcggccaagtgcagcggctgcatggagaagatcgcccccaccgagttcgtgatgcgggcgctggagtgcgtgtaccacctgggctgcttctgctgctgcgtgtgtgaacggcagctacgcaagggcgacgaattcgtgctcaaggagggccagctgctgtgcaagggtgactacgagaaggagaaggacctgctcagctccgtgagccccgacgagtccgactccgtgaagagcgaggatgaagatggggacatgaagccggccaaggggcagggcagtcagagcaagggcagcggggatgacgggaaggacccgcggaggcccaagcgaccccggaccatcctcaccacgcagcagcgaagagccttcaaggcctccttcgaggtctcgtcgaagccttgccgaaaggtccgagagacactggcagctgagacgggcctcagtgtgcgcgtggtccaggtctggtttcagaaccaaagagcaaagatgaagaagctggcgcggcggcaccagcagcagcaggagcagcagaactcccagcggctgggccaggaggtcctgtccagccgcatggagggcatgatggcttcctacacgccgctggccccaccacagcagcagatcgtggccatggaacagagcccctacggcagcagcgaccccttccagcagggcctcacgccgccccaaatgccagggaacgactccatcttccatgacatcgacagcgatacctccttaaccagcctcagcgactgcttcctcggctcctcagacgtgggctccctgcaggcccgcgtggggaaccccatcgaccggctctactccatgcagagttcctacttcgcctcctgagagccagccaggcgcacggacgcttgggcaggggcctgggggggactgccagcctctgcggccagcctggccacccccgccctgctctccgcacagactacagacagccatacggtgccctcccctcggccagctgggcctgaccactgtgcccgttgggtacagccagaccggtagatgggcacagcctgggcaggggctgtgtcctgcccacagagaccttgtcatccccagggacccagagctctcggacggccactcgcctcccagccccacctcggcctccatcgcctcctccccatctcttttttgggaagcttaaattctctctatttttttaaatgtcctctctgtgtccatggccctccatgcaagccccaggacaatggtgtcatgaggcggtgacctgagaagcgtgtgtacctgtgccccagcaagggcaggggtggcctctgggggcaggcccactgcctggaaccgcacacccctcagcctgagtctggagcagcagtggagaggggcctgaggggaggcactgtcaggaggcgggctcggagcctgagcctgggcaggcgcaaagggacagagaggcacgtgcagacacatgcacacttgcagacaaacccacgcaaacacacacacagctgtatggggacaccagaagggacagggatgctcagcgggtctgtcctgccttgtcagaaagagaaaaggaggccaggcaggggaccccccagttcttaagagcgattggaaagggaggaaggggagaggaagaggcgaacttgaagcatcggacccagttgtatcccagcctgggcccaaatgggggcagcctgggcagggagggcagccccaggccccaccaactctagaggcagatggagcccccagaaccaggtagcatcagaccagacaacagagcctccaggggtcagggacttcagaagcacctgctgggcaccccatctgcaatgtggtcctctccccagccacctctgcctcccctcacatacctccagtgacaaggagctcactaggtcagcgagcccacagcagctgtgctgtcctgcatcccagagccaggcttccccagctctccctcttaacactgtcccccagcaggcctccggctgtccctctaaaggtgtggggcaggtatcacttcaccttcccactgatgtcagccggccagaagtgagcaggcacatcacctctcctgctgtggcacccttcctctgttaatttggcccaaaagacaatgatttggccacatgaccttagagattcaccctgccctgctgtagctaaatccctgggccccacacgcaagtgacagctaagccacatctgttttctgtgtatatgcaggatgggggcacctactgttttgttttgttttgttttgttttgttttgttttgttttgttttgttttgtttgagacggagtttcgctcttgttgcccaggctggagtgcaatggcgcgatctcggctcaccacaacctccgcctcccaggttcaagtgattctgatgcctcagcctccctagtagctgagattacaggcatgcgccaccacacccagctaattttgtatttttagtagcaacggggtttctccatgttggtcaggctggtctccaacccccgacctcaggtgatccgcctgcctcggcctcccaaagtgctgggattacaggcgtgagccaccgcacccagtctgcacttactgtttagactgaatgagggaccgtgacctctttccttttccattccttcttactcgattcattccagcctgtggaatttctctgcaccctgattcagtgaccactgctctcctctctcccagcacatctgcccagtgaggagttggccctgggtctcacctgaggtgtgtggaccgggctggcctctccctgtttgacattggcccattaatgcatcctctttgggggacacattccaattgcatttcctgcccccttctcccagggcaattgcagaagattgtgtcaggcgccctgctggaagtcaggtgcactagatccatccccagccccagtctgctcaactctatccctgtcagagcaaggaggctgggctgctggggcctgactggtgagcccaccctgtcccctggtgatcactgtgtccccttgttcaggtgctcacaaccctacctttaactctgaggtcaagccctaggccaccaccctaaagtctgcctggtccaacctttgagcaagtaaggataatgaatgtcccttttccacctttggggccctctgcctggatctctggaatcctctaagttcaacctgttctgtggttttgctcccgtttgctgggaaattcagtccccccagaatgtcctgggccaacctccttgcctgacatgtggcctcgtgtcacccattgggccccagcagccagctagcccttctgcagctcttcttacaaacagagcctctccaaggacctcagttgatgttctggtccttctgccgcctcagcccaccagggtccgtgccaccatgggtctcttgagcagcagctgcactggcttctggagagacacccctctttctccttttgcacatgcaccatctgaatcgtgccagggacatcctgggcagattcaggggcagatgccctatcccccaggagacctggcccttctctctcagacccaataagttggaagggacgtcagaagcggtcatctcatctgccccttattttatagttggaaaccctgaggcaagagagggaaagaggcctgtccaaggtccgggttagtgacagagctgagctgagaacagggacgttgtgccccactgtcccctgtggtttgtgaatgacctccaggtcagggggtcacaacttgttcttagtaaacttgccagctgttggggtcacatattcccattctggggcctcacaaacccccgaatccagccgggaccccatgccaggagctggtctagggacagcatgcttgtgacccacagactgttaaagccagaagggacctcagagagtcccttatgctggaggcgccctgtcagccgtggctaggggccccttgctctatgctgtgccttgctgcccacaggctcccagacaccagtgcccactctgcccagccccggactgggtgtggctcgcagatgaacaagatgcagggcctgccttgaggggtgtctcctagaaggaaagccagactctccggcccagccagagagtccagacatggcagggacccgtttctcagatgaggagcctgaggctcagagaagggaggcgatgtgttcagggccacccagcagaagcctgtggggctgggcaaccttctcccactttatgggaggagctgcagccttggctgggagctgggcggggagtagccaggaccaccccttgcccgtgccgtgacatggaaccttcatcactaagggggctggagtgggaagagggagataactgtgtggtctccagagcaaaagagaatgagaggtgggcagggggagtcttggcaaaagaccaagttccacttccctgctggggaagtcaaggctcagaaagaggaaataattgccccaggtaacacagggcagaggagggacaaaaagctgggcatggccccagccagagcctcatctgcctactccgtgaagcctcccaggtactctgctatcctgggaaacgcacagggaggccacacagagacactgctcacaagagtcagaccaaggtgccagcacagcctggaaagagctcagaaagggggttggtgcacgtggctgggcatcttaggaggcttcctgagggtgggtaaaggtgggaaggccctggcgctgcatcagatgagcagggcctggcagggacaagcctcttctcctttgggaagccctgcagcctcctagcaagaggctgattccccactctgcccccatctgaatgtccttttcatgttgcacgcagggaacctcaggaaggaggattgcctgatgcctgcctggctccatccttgagctctgggcaccacctagggtgagggagagcctgcagctctggggctaagtctgccctggggggaaagggctccacgctcacacgcacgcgctcgcacacacacactcacacctggacgcacacggaggcttgcggacccatactcacaggcacatgtggcctggggactgggggagcaggaaagacccctccaacatttggcccttggaaggcaccattgccaatgagcctctttgctggttcccccgaccccacctgggggtcccatgggagcccagcccagccaggtgtggggatgggccaccggccattcctgttttccttgtacagacagattctcactacccacccgccatccccagacacattttatttaataacttgtcattgttaaattatttattagcgtttaccacaccaccacccccaccctgccctccactctcaccttccacctcttcccacaacagcagaaaatggaaacaacaacaaaaaaagatgagacatcagtatatttgtaaataaaccgacctgtacactc

SEQ ID NO: 127471 - DNA, 1195 bp, Artificial Sequence
  derived and/or modified sequence
gcgtcccatggatatagcaacaggtcccgagtcgctggagaggtgcttccctcgcgggcagacggactgcgccaagatgttggacggcatcaagatggaggagcacgccctgcgccccgggcccgccactctgggggtgctgctgggctccgactgcccgcatcccgccgtctgcgagggctgccagcggcccatctccgaccgcttcctgatgcgagtcaacgagtcgtcctggcacgaggagtgtttgcagtgcgcggcgtgtcagcaagccctcaccaccagctgctacttccgggatcggaaactgtactgcaaacaagactaccaacagctcttcgcggccaagtgcagcggctgcatggagaagatcgcccccaccgagttcgtgatgcgggcgctggagtgcgtgtaccacctgggctgcttctgctgctgcgtgtgtgaacggcagctacgcaagggcgacgaattcgtgctcaaggagggccagctgctgtgcaagggtgactacgagaaggagaaggacctgctcagctccgtgagccccgacgagtccgactccgtgaagagcgaggatgaagatggggacatgaagccggccaaggggcagggcagtcagagcaagggcagcggggatgacgggaaggacccgcggaggcccaagcgaccccggaccatcctcaccacgcagcagcgaagagccttcaaggcctccttcgaggtctcgtcgaagccttgccgaaaggtccgagagacactggcagctgagacgggcctcagtgtgcgcgtggtccaggtctggtttcagaaccaaagagcaaagatgaagaagctggcgcggcggcaccagcagcagcaggagcagcagaactcccagcggctgggccaggaggtcctgtccagccgcatggagggcatgatggcttcctacacgccgctggccccaccacagcagcagatcgtggccatggaacagagcccctacggcagcagcgaccccttccagcagggcctcacgccgccccaaatgccagggaacgactccatcttccatgacatcgacagcgatacctccttaaccagcctcagcgactgcttcctcggctcctcagacgtgggctccctgcaggcccgcgtggggaaccccatcgaccggctctactccatgcagagttcctacttcgcctcctga

SEQ ID NO: 127472 - DNA, 1119 bp, Artificial Sequence
  derived and/or modified sequence
atgctggacggcatcaagatggaggagcacgccctgcggcccggccctgccaccctgggcgtgcttcttgggtccgattgcccccacccagccgtgtgcgaggggtgtcagagacccatatcggaccgtttcctgatgcgcgtgaatgagtcctcctggcatgaagagtgccttcagtgtgcggcatgccaacaagcactcactaccagttgctacttccgggatagaaagctatactgcaaacaagactaccagcagctgttcgctgccaaatgtagtggttgtatggaaaagatcgctccaacagagtttgtcatgcgggcattggaatgtgtgtaccatctgggctgtttttgctgctgtgtctgcgagcgccagctgagaaagggagacgagttcgtgctgaaggaaggccagttgctctgtaaaggcgactacgagaaagagaaagatttgctgtcttccgtttctccagatgaaagcgactctgtgaagtctgaggatgaggacggagatatgaagcctgctaaggggcagggatcgcagtctaagggcagtggcgacgacgggaaggacccgagaagaccaaagcgtccacgtacgatcttgaccactcaacaaagacgggcattcaaggccagctttgaagtctcttcgaagccttgtcggaaggtgagagagacgttggccgctgagaccggcctgtcagtccgcgttgttcaagtgtggtttcagaatcagcgggcgaagatgaagaagctggccagacggcaccagcagcagcaggaacagcagaattcgcagagattgggccaggaggttctcagcagccgcatggagggaatgatggcgagctatactccactggctcctcctcagcagcagattgtggctatggaacagtcaccttatgggtcttcagacccctttcagcagggtctcacccctccccagatgcctggaaacgatagcatattccatgacatcgacagcgatactagtttaaccagcctgtccgattgctttcttggaagcagtgacgttggctctctgcaggcccgcgtgggcaatcccattgaccgcctgtatagtatgcagtcctcctactttgccagctag

SEQ ID NO: 127473 - DNA, 1188 bp, Artificial Sequence
  derived and/or modified sequence
atggacatcgccaccggccccgagagcctggagcggtgcttcccccgtggacagaccgactgtgccaaaatgttggacggaataaaaatggaagaacatgccctcagacccgggccagcaaccctgggcgttcttctcggaagcgactgcccacacccggctgtgtgtgaaggttgccagagaccgatcagtgaccggttccttatgagggtgaacgaaagctcttggcatgaagagtgtctgcagtgtgccgcctgtcagcaggcactcactacgagctgttacttcagagaccgcaagctgtactgcaaacaagactaccagcagctgtttgccgctaaatgttctgggtgtatggagaagatagcccccacagaatttgtgatgcgtgccctagagtgcgtgtaccacctcggatgcttttgttgctgcgtgtgtgagaggcaactgcggaagggagacgaatttgtcttaaaagagggtcagctgctgtgcaagggggattacgagaaggaaaaggacttgctctccagcgtgagcccggacgagtctgatagcgtaaaaagcgaagatgaggatggagatatgaagcccgcaaaaggccagggttcccagtccaaggggagcggcgacgacggtaaagacccgcgtcgtcctaaaagaccccggacgatcttaacaacccaacagaggagagccttcaaggcatcattcgaggtgtcctctaagccttgtcggaaagtcagggaaaccctggcagccgaaacagggctgagcgtaagagtggtgcaggtttggttccagaatcagagggctaagatgaagaaactcgcccggaggcaccagcagcagcaggagcagcagaacagccagcgtctgggccaggaagtcctgtcttcccgcatggaaggaatgatggctagttacacaccccttgcgccaccccagcagcagatcgtcgcaatggagcagtctccgtatggatcctccgacccgttccaacagggattaactcctcctcagatgccaggaaatgactcaatttttcatgatatcgatagcgacacatccctaacgagtctgtccgactgctttctgggaagttccgatgtgggatccctgcaggcccgcgtgggcaaccctatcgatcgcctctacagtatgcagtcctcctacttcgcctcctag

SEQ ID NO: 127474 - DNA, 1119 bp, Artificial Sequence
  derived and/or modified sequence
atgctcgacggtatcaaaatggaggaacacgcactgcgccctgggcctgcgactctgggcgttctgctcggctctgactgccctcacccagccgtgtgcgagggctgtcagcgcccaatttcagaccgcttcctcatgcgggtcaacgagtcgagctggcatgaagaatgcctccagtgtgcagcttgccagcaggccctcaccaccagctgctactttcgagaccgcaagctgtactgtaagcaggactatcaacagctgtttgctgcaaagtgcagtggttgcatggagaagatcgcccctacggaattcgtgatgagggctctggagtgtgtttatcacctggggtgtttttgttgttgcgtatgcgagaggcaacttaggaagggcgacgaattcgtactcaaagaaggccaactcctgtgtaagggggattatgaaaaagagaaagatctactaagctcggtgtcccccgacgaatccgacagcgtcaagagtgaggacgaagacggggacatgaagccagctaaaggtcagggtagtcagagcaaaggcagtggcgatgacggcaaggacccgagacgcccaaaaagaccgagaacaatcttaaccacccaacagcggagagctttcaaggcgtctttcgaggtttctagtaaaccatgtcgtaaagtcagagaaactctggcggctgaaacaggtctgtccgttagggtcgtacaggtgtggttccagaaccagcgcgctaaaatgaaaaaacttgccaggaggcaccaacagcagcaggagcagcagaacagccagcgattaggccaggaggtgctgtccagtcgcatggaaggaatgatggcctcatacacacccctcgctccgcctcagcagcagattgtggccatggagcagtctccctacgggagtagtgatccattccagcagggcctgacaccaccccagatgcccggtaacgacagcatctttcacgacattgatagtgacaccagcctaacctctctgtcggattgtttcctgggtagttccgacgtaggcagcctgcaagccagagtcggcaatccaattgatcgactgtatagtatgcaatcaagctactttgcaagttag

SEQ ID NO: 127475 - DNA, 1188 bp, Artificial Sequence
  derived and/or modified sequence
atggacatcgccaccggccctgagtctctcgagcgttgcttccccaggggccagaccgactgcgccaagatgctcgacgggatcaaaatggaggagcatgctttacgcccagggccagccactctgggtgtgctgctagggtcagactgtccccacccagccgtttgtgaggggtgccagcgacccattagtgacagattcctgatgcgcgtcaatgaaagttcctggcatgaggaatgtctgcagtgtgccgcatgccagcaggctctaaccacttcctgctacttccgcgacagaaaactgtattgcaaacaagactaccagcagctctttgctgccaagtgttcaggctgcatggaaaaaatagcaccaacagagtttgtcatgcgagctctggaatgtgtataccacctgggctgtttttgttgttgtgtttgcgagcgccaactccgcaagggagacgagttcgtgctgaaggaaggccagcttctgtgcaaaggagattatgagaaggaaaaggaccttctctcttctgtgtctcctgatgaaagcgactcagtcaagagcgaagacgaggatggggacatgaagcccgctaaaggccagggctctcagtcaaaaggatcaggcgacgatgggaaggatcccaggcgaccaaaacgacctcgaacaatcctcactactcagcaacggagagcttttaaggcttcatttgaggtgtccagcaagccatgcaggaaggttcgggaaacattggctgccgagactgggctcagtgtccgcgtggtgcaagtgtggtttcagaaccagcgggcaaaaatgaagaagttggcaaggagacatcagcagcaacaggaacaacagaacagccagcgactgggacaagaagtcctatcctcccgcatggagggcatgatggcaagctatacgcctctggccccacctcaacagcaaattgtagccatggagcagagcccctatggcagtagcgacccctttcagcagggtctgacgccaccgcagatgcctggtaatgatagcattttccatgatatcgattccgacactagcctgacatctctgagtgattgctttttgggaagcagtgacgtgggctctttgcaggccagggtcggcaatcccattgatagactgtactcaatgcagtccagctatttcgcatcatag

SEQ ID NO: 127476 - DNA, 1119 bp, Artificial Sequence
  derived and/or modified sequence
atgctggacggcatcaagatggaggagcacgccctgagacccggccccgccaccctgggcgtgctgctgggcagcgactgcccccaccccgccgtgtgcgagggctgccagagacccatcagcgacagattcctgatgagagtgaacgagagcagctggcacgaggagtgcctgcagtgcgccgcctgccagcaggccctgaccaccagctgctacttcagagacagaaagctgtactgcaagcaggactaccagcagctgttcgccgccaagtgcagcggctgcatggagaagatcgcccccaccgagttcgtgatgagagccctggagtgcgtgtaccacctgggctgcttctgctgctgcgtgtgcgagagacagctgagaaagggcgacgagttcgtgctgaaggagggccagctgctgtgcaagggcgactacgagaaggagaaggacctgctgagcagcgtgagccccgacgagagcgacagcgtgaagagcgaggacgaggacggcgacatgaagcccgccaagggccagggcagccagagcaagggcagcggcgacgacggcaaggaccccagaagacccaagagacccagaaccatcctgaccacccagcagagaagagccttcaaggccagcttcgaggtgagcagcaagccctgcagaaaggtgagagagaccctggccgccgagaccggcctgagcgtgagagtggtgcaggtgtggttccagaaccagagagccaagatgaagaagctggccagaagacaccagcagcagcaggagcagcagaacagccagagactgggccaggaggtgctgagcagcagaatggagggcatgatggccagctacacccccctggcccccccccagcagcagatcgtggccatggagcagagcccctacggcagcagcgaccccttccagcagggcctgacccccccccagatgcccggcaacgacagcatcttccacgacatcgacagcgacaccagcctgaccagcctgagcgactgcttcctgggcagcagcgacgtgggcagcctgcaggccagagtgggcaaccccatcgacagactgtacagcatgcagagcagctacttcgccagctag

SEQ ID NO: 127477 - DNA, 1188 bp, Artificial Sequence
  derived and/or modified sequence
atggacatcgccaccggccccgagagcctggagagatgcttccccagaggccagaccgactgcgccaagatgctggacggcatcaagatggaggagcacgccctgagacccggccccgccaccctgggcgtgctgctgggcagcgactgcccccaccccgccgtgtgcgagggctgccagagacccatcagcgacagattcctgatgagagtgaacgagagcagctggcacgaggagtgcctgcagtgcgccgcctgccagcaggccctgaccaccagctgctacttcagagacagaaagctgtactgcaagcaggactaccagcagctgttcgccgccaagtgcagcggctgcatggagaagatcgcccccaccgagttcgtgatgagagccctggagtgcgtgtaccacctgggctgcttctgctgctgcgtgtgcgagagacagctgagaaagggcgacgagttcgtgctgaaggagggccagctgctgtgcaagggcgactacgagaaggagaaggacctgctgagcagcgtgagccccgacgagagcgacagcgtgaagagcgaggacgaggacggcgacatgaagcccgccaagggccagggcagccagagcaagggcagcggcgacgacggcaaggaccccagaagacccaagagacccagaaccatcctgaccacccagcagagaagagccttcaaggccagcttcgaggtgagcagcaagccctgcagaaaggtgagagagaccctggccgccgagaccggcctgagcgtgagagtggtgcaggtgtggttccagaaccagagagccaagatgaagaagctggccagaagacaccagcagcagcaggagcagcagaacagccagagactgggccaggaggtgctgagcagcagaatggagggcatgatggccagctacacccccctggcccccccccagcagcagatcgtggccatggagcagagcccctacggcagcagcgaccccttccagcagggcctgacccccccccagatgcccggcaacgacagcatcttccacgacatcgacagcgacaccagcctgaccagcctgagcgactgcttcctgggcagcagcgacgtgggcagcctgcaggccagagtgggcaaccccatcgacagactgtacagcatgcagagcagctacttcgccagctag

SEQ ID NO: 127478 - protein, 417 aa, Artificial Sequence
  derived and/or modified sequence
MRFAWTVLLLGPLQLCALVHCAPPAAGQQQPPREPPAAPGAWRQQIQWENNGQVFSLLSLGSQYQPQRRRDPGAAVPGAANASAQQPRTPILLIRDNRTAAARTRTAGSSGVTAGRPRPTARHWFQAGYSTSRAREAGASRAENQTAPGEVPALSNLRPPSRVDGMVGDDPYNPYKYSDDNPYYNYYDTYERPRPGGRYRPGYGTGYFQYGLPDLVADPYYIQASTYVQKMSMYNLRCAAEENCLASTAYRADVRDYDHRVLLRFPQRVKNQGTSDFLPSRPRYSWEWHSCHQHYHSMDEFSHYDLLDANTQRRVAEGHKASFCLEDTSCDYGYHRRFACTAHTQGLSPGCYDTYGADIDCQWIDITDVKPGNYILKVSVNPSYLVPESDYTNNVVRCDIRYTGHHAYASGCTISPY

SEQ ID NO: 127479 - protein, 40 aa, Artificial Sequence
  derived and/or modified sequence
MRFAWTVLLLGPLQLCALVHCAPPAAGQQQPPREPPAAPG

SEQ ID NO: 127480 - protein, 377 aa, Artificial Sequence
  derived and/or modified sequence
MRFAWTVLLLGPLQLCALVHCAPPAAGQQQPPREPPAAPGAASAQQPRTPILLIRDNRTAAARTRTAGSSGVTAGRPRPTARHWFQAGYSTSRAREAGASRAENQTAPGEVPALSNLRPPSRVDGMVGDDPYNPYKYSDDNPYYNYYDTYERPRPGGRYRPGYGTGYFQYGLPDLVADPYYIQASTYVQKMSMYNLRCAAEENCLASTAYRADVRDYDHRVLLRFPQRVKNQGTSDFLPSRPRYSWEWHSCHQHYHSMDEFSHYDLLDANTQRRVAEGHKASFCLEDTSCDYGYHRRFACTAHTQGLSPGCYDTYGADIDCQWIDITDVKPGNYILKVSVNPSYLVPESDYTNNVVRCDIRYTGHHAYASGCTISPY

SEQ ID NO: 127481 - DNA, 1254 bp, Artificial Sequence
  derived and/or modified sequence
atgcgattcgcctggacagtgctgttattgggaccgctgcagctgtgcgcgctggttcactgcgctccccctgcggcaggccagcagcagccgcctagagaacctccggctgcccctggggcttggaggcagcagatccagtgggagaataatggccaagtgttctctctgttgagtctagggtctcaataccagcctcagcggaggcgggatcccggtgcagcggtgcctggagccgcaaatgctagtgctcaacagcctaggacgccaatcctgttaattcgagacaaccgtacagcagccgctcgtactcgcactgcaggaagtagtggagttactgctgggaggccccgacctacagccagacactggtttcaagccggttacagcacctcccgcgcaagagaggctggtgcatcccgtgctgaaaaccagacagctccgggagaggtacccgctctgtccaacctcagacccccttcccgggtcgatggaatggttggcgacgacccctataatccctacaaatattctgacgacaacccatactacaactattacgacacctacgagagaccgaggccaggtgggcgataccgacccggttacggtaccggctactttcagtacggcctgccggatctggtggccgatccatactatatccaggcaagtacatacgtccagaaaatgagcatgtacaacctacgctgcgctgccgaggaaaactgcctggcgagcaccgcataccgagctgacgtgcgcgactacgaccatcgcgtgcttctacggtttccccaaagggttaagaaccaaggtacctccgatttcttaccatcacggccaagatatagctgggagtggcacagttgccatcagcattatcattcaatggacgagttttcgcactacgaccttcttgatgccaacactcagcgcagagtggctgagggccataaggcctccttttgtttggaagacacctcttgtgattatgggtaccatcgacggtttgcctgtaccgcccatacacagggcctcagtcccggttgttatgatacgtatggggcagatattgactgccagtggattgacatcacggacgttaagccaggcaactatattctgaaagtcagcgtgaatccttcatatctggtccccgagtcggattatactaacaacgtggttcggtgcgatatccgctacacgggccaccatgcatacgcctcgggctgcacaattagcccatactag

SEQ ID NO: 127482 - DNA, 1254 bp, Artificial Sequence
  derived and/or modified sequence
atgagattcgcctggaccgtgctgctgctgggccccctgcagctgtgcgccctggtgcactgcgccccccccgccgccggccagcagcagccccccagagagccccccgccgcccccggcgcctggagacagcagatccagtgggagaacaacggccaggtgttcagcctgctgagcctgggcagccagtaccagccccagagaagaagagaccccggcgccgccgtgcccggcgccgccaacgccagcgcccagcagcccagaacccccatcctgctgatcagagacaacagaaccgccgccgccagaaccagaaccgccggcagcagcggcgtgaccgccggcagacccagacccaccgccagacactggttccaggccggctacagcaccagcagagccagagaggccggcgccagcagagccgagaaccagaccgcccccggcgaggtgcccgccctgagcaacctgagaccccccagcagagtggacggcatggtgggcgacgacccctacaacccctacaagtacagcgacgacaacccctactacaactactacgacacctacgagagacccagacccggcggcagatacagacccggctacggcaccggctacttccagtacggcctgcccgacctggtggccgacccctactacatccaggccagcacctacgtgcagaagatgagcatgtacaacctgagatgcgccgccgaggagaactgcctggccagcaccgcctacagagccgacgtgagagactacgaccacagagtgctgctgagattcccccagagagtgaagaaccagggcaccagcgacttcctgcccagcagacccagatacagctgggagtggcacagctgccaccagcactaccacagcatggacgagttcagccactacgacctgctggacgccaacacccagagaagagtggccgagggccacaaggccagcttctgcctggaggacaccagctgcgactacggctaccacagaagattcgcctgcaccgcccacacccagggcctgagccccggctgctacgacacctacggcgccgacatcgactgccagtggatcgacatcaccgacgtgaagcccggcaactacatcctgaaggtgagcgtgaaccccagctacctggtgcccgagagcgactacaccaacaacgtggtgagatgcgacatcagatacaccggccaccacgcctacgccagcggctgcaccatcagcccctactag

SEQ ID NO: 127483 - DNA, 1254 bp, Artificial Sequence
  derived and/or modified sequence
atgaggttcgcctggaccgtactgctgttggggcctctgcagttatgtgctctggtgcattgcgctccaccagccgcaggacagcagcagcctccgagggagccacccgcagcccccggggcctggcgtcagcagatccaatgggaaaataatggccaggtgttctccctcctgtctctaggctctcagtaccagccccagaggcgtcgcgatcctggtgccgctgtccctggcgccgccaatgcttcagctcagcagccccgcacacctatcctgctcatacgtgacaaccgcactgccgcagccaggacacggacagctggaagttcaggtgtaaccgccggaagacctcgacccactgcccggcattggttccaggcgggatattcaacctcaagagcgcgagaggcgggcgccagtagggcagagaatcagacagcccccggggaagtccccgcgctcagcaatctgagaccccctagccgggtcgacggcatggtgggtgatgatccttacaacccctataaatatagtgacgacaacccgtattacaactactacgacacatatgagaggccgcgcccgggggggagatatagaccgggatatggcacagggtatttccagtacggcctaccggatctggtggccgacccttactacatccaggcttctacttatgtgcagaagatgtccatgtataacctgaggtgcgccgccgaagagaattgtctggcatccactgcgtaccgcgccgatgtgcgcgattatgatcatcgcgtgttgctccgcttccctcagagggtaaaaaatcagggaacctcagactttctcccatcccgacctcggtattcatgggaatggcacagttgccaccagcattaccatagtatggacgagttttcccactacgacctactggacgccaatacccaacggagggtagctgagggacataaagcctcattctgcttagaggatacttcatgcgactacggctatcataggcgatttgcttgcacagcccatacccaaggcctgtcacctggatgttatgacacctacggggctgatatagattgccagtggattgacattactgacgttaaacccggtaactatattctgaaagtgtcagtgaacccgagttacctagtgcctgaatccgactataccaataacgtcgttagatgtgacatccgatataccgggcaccatgcttatgcctccggctgtacaatttcgccatactag

SEQ ID NO: 127484 - DNA, 1254 bp, Artificial Sequence
  derived and/or modified sequence
atgagatttgcctggacagtgctgctgctgggccccctgcagctgtgtgccctggtgcactgtgcccctcctgctgctggccagcagcagcccccccgggagcccccagctgcccctggggcctggaggcagcagatccagtgggagaacaacggccaggtgttcagcctgctgagcctgggcagccagtaccagccccagaggagaagagaccccggggctgctgtgcctggagctgccaatgccagcgcccagcagcccaggacccccatcctgctgatccgggacaacagaacagctgctgcccggaccaggacagctggcagcagcggcgtgacagctggccggccccggcccacagcccggcactggttccaggccggctacagcaccagccgggcccgggaggccggggccagcagagctgagaaccagacagcccctggagaggtgcctgccctgagcaacctgcggccccccagccgggtggatggcatggtgggagatgacccctacaacccctacaagtacagtgatgacaacccctactacaactactatgacacctatgaaagacccaggcctgggggccgctacagacctggctatggaacaggctacttccagtatggcctgcctgacctggtggccgacccctactacatccaggccagcacctacgtgcagaagatgtccatgtacaacctgcgctgtgccgctgaggagaactgcctggccagcacagcctacagagcagatgtgcgggactatgaccaccgggtgctgctgcgcttcccccagagggtgaagaaccagggcaccagtgacttcctgcccagccggccccgctacagctgggagtggcacagctgccaccagcactaccacagcatggatgagttcagccactatgacctgctggatgccaacacccagaggagagtggccgagggccacaaggccagcttctgcctggaggacaccagctgtgactatggctaccacagaagatttgcctgcacagcccacacccagggcctgagccctggctgctatgacacctatggagctgacatcgactgccagtggattgacatcacagatgtgaagccaggcaactacatcctgaaggtgtctgtgaaccccagctacctggtgcctgagagtgactacaccaacaacgtggtgcgctgtgacatccgctacacaggccaccacgcctatgccagcggctgcaccatcagcccctactag

SEQ ID NO: 127485 - DNA, 1254 bp, Artificial Sequence
  derived and/or modified sequence
atgcggttcgcctggaccgtgctgctgctgggccccctgcagctgtgtgccctggtgcattgcgcgccccctgctgcaggtcagcaacaaccccctcgtgaaccacccgctgcacccggagcctggaggcaacagatccagtgggagaacaatggtcaagtgttcagtctgctgagcctcggatcccagtaccaaccccagaggagaagagaccccggggctgccgtgcctggcgctgccaatgcctcggctcaacagccaagaaccccaattcttctcattcgggacaataggacagctgctgctaggaccaggaccgccgggtcctcaggagtgaccgccggtagacctaggccaacggcgcgccactggtttcaagccgggtattccacatcccgcgccagagaggcaggtgcctctcgggccgagaaccagacagcacccggagaagttcctgccctgagtaatctgagaccaccctcccgcgtggatggtatggtgggagacgacccttacaatccttataaatactcagacgataatccctactacaactattatgacacatacgagaggccacggcccggaggaaggtaccgaccaggttacggcactggatacttccagtatggcctccccgacctcgtcgccgacccctattatatacaggcatccacttacgtgcagaaaatgtcaatgtataatctccggtgtgcagccgaagagaactgtctggcctccactgcatacagggcggacgtgcgggattatgaccaccgggtcctgctgaggtttccacagcgagtgaagaatcaaggcacttctgacttcctgccttctaggcctagatacagctgggaatggcactcctgtcatcagcattaccatagtatggacgagttcagccattacgacctgctggatgccaatactcaacggagagtggccgaaggtcacaaggcatctttttgtctcgaggacacatcgtgcgactatggatatcatcgtagattcgcgtgtacggcccacactcaggggttgagccccggctgttatgacacctatggtgcagacatcgattgccaatggatagatataacggatgtgaagccggggaactatatcctgaaagtgtcagttaatccgtcgtacctggttccagaaagcgactatacgaataacgttgtgcggtgtgacatccgatataccggtcatcatgcttacgccagcggctgtacaatatcaccatactag

SEQ ID NO: 127486 - DNA, 123 bp, Artificial Sequence
  derived and/or modified sequence
atgcggtttgcatggacagttcttttactgggtccgctccaattgtgcgcactggtacattgtgcgcctcccgccgctggccaacaacagccccctcgggagccacctgcggctcctggatag

SEQ ID NO: 127487 - DNA, 1134 bp, Artificial Sequence
  derived and/or modified sequence
atgcgcttcgcttggactgtcctgctgctgggaccactccagctgtgcgctctagtgcattgtgcacctcctgcagccggacagcagcaaccacctcgggagcctccggcagcccctggtgcagctagcgctcagcagccgcggacgcctatccttttgatccgcgataaccgcaccgccgctgctcgcacacgaaccgccgggtcctccggagtgacggctggccgccctcgcccaacagcgaggcattggttccaggccgggtacagtacgagtagggcccgagaagccggtgcatctcgcgctgagaatcagaccgccccaggggaggtgcccgcgctgagcaatctcagaccaccatcccgcgtcgatggcatggttggagacgatccttacaatccatacaagtattccgatgataacccatactacaactactacgacacatatgaaagaccacgaccaggggggcgatatcgcccaggctatggaaccggctatttccagtatggcttgcctgacctggtcgctgacccttattatatccaggctagcacttatgtgcaaaagatgtccatgtataatctccggtgtgcagccgaagagaactgcttggccagcactgcatacagagctgatgtgcgtgattacgatcacagagtcctcctccggtttccacaaagggttaaaaaccagggaacatctgacttcctgcctagcagacccagatatagctgggagtggcacagctgtcatcagcactatcatagcatggacgagttttcccattacgacttactggacgctaacacacagcggcgggtcgcagagggacacaaggccagtttctgcttagaagatacttcctgtgactacgggtaccatcgccgattcgcttgcaccgctcatacgcagggcctcagcccaggctgttatgacacatatggcgccgatatagactgtcagtggatcgatattacagatgttaaacctggaaattacattctgaaggtctccgtgaatccctcttacctggtgccggagtctgactacaccaataatgtagttcgatgcgacatcagatacaccggtcaccatgcttacgcatcgggttgcacaatctctccttactag

SEQ ID NO: 127488 - DNA, 123 bp, Artificial Sequence
  derived and/or modified sequence
atgagatttgcctggacagtgctgctgctgggccccctgcagctgtgtgccctggtgcactgtgcccctcctgctgctggccagcagcagcccccccgggagcccccagctgcccctggatag

SEQ ID NO: 127489 - DNA, 1134 bp, Artificial Sequence
  derived and/or modified sequence
atgagatttgcctggacagtgctgctgctgggccccctgcagctgtgtgccctggtgcactgtgcccctcctgctgctggccagcagcagcccccccgggagcccccagctgcccctggagctgccagcgcccagcagcccaggacccccatcctgctgatccgggacaacagaacagctgctgcccggaccaggacagctggcagcagcggcgtgacagctggccggccccggcccacagcccggcactggttccaggccggctacagcaccagccgggcccgggaggccggggccagcagagctgagaaccagacagcccctggagaggtgcctgccctgagcaacctgcggccccccagccgggtggatggcatggtgggagatgacccctacaacccctacaagtacagtgatgacaacccctactacaactactatgacacctatgaaagacccaggcctgggggccgctacagacctggctatggaacaggctacttccagtatggcctgcctgacctggtggccgacccctactacatccaggccagcacctacgtgcagaagatgtccatgtacaacctgcgctgtgccgctgaggagaactgcctggccagcacagcctacagagcagatgtgcgggactatgaccaccgggtgctgctgcgcttcccccagagggtgaagaaccagggcaccagtgacttcctgcccagccggccccgctacagctgggagtggcacagctgccaccagcactaccacagcatggatgagttcagccactatgacctgctggatgccaacacccagaggagagtggccgagggccacaaggccagcttctgcctggaggacaccagctgtgactatggctaccacagaagatttgcctgcacagcccacacccagggcctgagccctggctgctatgacacctatggagctgacatcgactgccagtggattgacatcacagatgtgaagccaggcaactacatcctgaaggtgtctgtgaaccccagctacctggtgcctgagagtgactacaccaacaacgtggtgcgctgtgacatccgctacacaggccaccacgcctatgccagcggctgcaccatcagcccctactag

SEQ ID NO: 127490 - DNA, 5102 bp, Artificial Sequence
  derived and/or modified sequence
aaaatctctcctccttccttcactccagacactgcccgctctccgggactgccgcgccgctccccgttgccttccaggactgagaaaggggaaagggaagggtgccacgtccgagcagccgccttgactggggaagggtctgaatcccacccttggcattgcttggtggagactgagatacccgtgctccgctcgcctccttggttgaagatttctccttccctcacgtgatttgagccccgtttttattttctgtgagccacgtcctcctcgagcggggtcaatctggcaaaaggagtgatgcgcttcgcctggaccgtgctcctgctcgggcctttgcagctctgcgcgctagtgcactgcgcccctcccgccgccggccaacagcagcccccgcgcgagccgccggcggctccgggcgcctggcgccagcagatccaatgggagaacaacgggcaggtgttcagcttgctgagcctgggctcacagtaccagcctcagcgccgccgggacccgggcgccgccgtccctggtgcagccaacgcctccgcccagcagccccgcactccgatcctgctgatccgcgacaaccgcaccgccgcggcgcgaacgcggacggccggctcatctggagtcaccgctggccgccccaggcccaccgcccgtcactggttccaagctggctactcgacatctagagcccgcgaagctggcgcctcgcgcgcggagaaccagacagcgccgggagaagttcctgcgctcagtaacctgcggccgcccagccgcgtggacggcatggtgggcgacgacccttacaacccctacaagtactctgacgacaacccttattacaactactacgatacttatgaaaggcccagacctgggggcaggtaccggcccggatacggcactggctacttccagtacggtctcccagacctggtggccgacccctactacatccaggcgtccacgtacgtgcagaagatgtccatgtacaacctgagatgcgcggcggaggaaaactgtctggccagtacagcatacagggcagatgtcagagattatgatcacagggtgctgctcagatttccccaaagagtgaaaaaccaagggacatcagatttcttacccagccgaccaagatattcctgggaatggcacagttgtcatcaacattaccacagtatggatgagtttagccactatgacctgcttgatgccaacacccagaggagagtggctgaaggccacaaagcaagtttctgtcttgaagacacatcctgtgactatggctaccacaggcgatttgcatgtactgcacacacacagggattgagtcctggctgttatgatacctatggtgcagacatagactgccagtggattgatattacagatgtaaaacctggaaactatatcctaaaggtcagtgtaaaccccagctacctggttcctgaatctgactataccaacaatgttgtgcgctgtgacattcgctacacaggacatcatgcgtatgcctcaggctgcacaatttcaccgtattagaaggcaaagcaaaactcccaatggataaatcagtgcctggtgttctgaagtgggaaaaaatagactaacttcagtaggatttatgtattttgaaaaagagaacagaaaacaacaaaagaatttttgtttggactgttttcaataacaaagcacataactggattttgaacgcttaagtcatcattacttgggaaatttttaatgtttattatttacatcactttgtgaattaacacagtgtttcaattctgtaattacatatttgactctttcaaagaaatccaaatttctcatgttccttttgaaattgtagtgcaaaatggtcagtattatctaaatgaatgagccaaaatgactttgaactgaaacttttctaaagtgctggaactttagtgaaacataataataatgggtttatatatgtcatagcatagatgaatttagaaacaatgctcctactgtttaaatacatatggacacatctggtgctgagaaagaaacaaacacattaccattggtgtcaagaaatattactatatagcagagaaatggcaatacatgtactcagatagttacatccctatataaaaagtatgtttacatttaaaaaattagtagataacttcctttctttcaagtgcacaatttcattttgacttgagtcaacttttgttttggaacaaattaagtaagggagctgcccaatcctgtctgatatttcttgaggctgccctctatcattttatctttcccatgggcagagatgttgtaagtgggattcttaatatcaccattcttgggactggtatacataaggcagccgtgaaactggaaagtcattttgatgactgatgtgatacatccagaggtaaaatgcatttaaacatattaaagtatttgccaaagatacaattttcttgctgacataaaaatcacacaaacaagtcccccccaaaccacaactgtctctcaaatagcttaaaaaaattgaaaaacattttaggatttttcaagttttctagattttaaaaagatgttcagctattagaggaatgttaaaaattttatattatctagaacacaggaacatcatcctgggttattcaggaatcagtcacacatgtgtgtgtgtctgagatatagtctaaattagcaaagcacatagtattacatacttgaggggttggtgaacaaaggaaaaatatactttctgcaaaaccaaggactgtgctgcgtaatgagacagctgtgatttcatttgaaactgtgaaaccatgtgccataatagaattttgagaattttgcttttacctaaattcaagaaaatgaaattacacttttaagttagtggtgcttaagcataatttttcctatattaaccagtattaaaatctcaagtaagattttccagtgccagaacatgttaggtggaattttaaaagtgcctcggcatcctgtattacatgtcatagaattgtaaagtcaacatcaattactagtaatcattctgcactcactgggtgcatagcatggttagaggggctagagatggacagtcatcaactggcggatatagcggtacatatgatccttagccaccagggcacaagcttaccagtagacaatacagacagagcttttgttgagctgtaactgagctatggaatagcttctttgatgtacctctttgccttaaattgctttttagttctaagattgtagaatgatcctttcaaattgtaatcttttctaacagagatattttaatatacttgctttcttaaaaaacaaaaaaactactgtcagtattaatactgagccagactggcatctacagatttcagatctatcattttattgattcttaagcttgtattaaaaactaggcaatatcatcatggatacataggagaagacacatttacaatcattcattgggccttttatctgtctatccatccatcatcatttgaaggcctaatatatgccaagtactcacatggtatgcattgagacataaaaaagactgtctataacctcaataagtattaaaaatcccattattacccataaggttcatcttatttcatttttagggaataaaattacatgtctatgaaatttcaattttaagcactattgtttttcatgaccataatttatttttaaaaataaattaaaggttaattatatgcatgtatgtatttctaataattaaaaatgtgttcaatccctgaaatgtctgccttttaaatataacacctactatttggttaattttgacgatttttttttttcaattaggaagctaaaaatactactttattccttatatgaacattcatccccctcctggcacctctaaacacacccaaataactcacaagtactgatttaacactctgtattactgaacttctttgaactattttgaactttgaatctcttctctgaataactgccgaaactcaaagataataattagttgatgaaggttatcaattaataaaataacacagaccagtcttaccaaactctaaatacattttaaaaaataggaactggcaatgataaaaagaatgttgagtactgacaggagattggcttttacactaaaaaagacagaaaatggactaaataggaacataatttcagagtttatgagtcagtttacaatatgccatattagcgatctcatgatgattcagaccacagtctgggttaaagatgtcttgacctctgaggctagcataacatatatgagaatacaacttgcctatttccagaaaatctgtatatttttatagaataactttatttacaatttctatcatccaattactcactaggcattatttgtagtactttttttctctttgaaatctcataggatagtcacacttataaacattcccaatattcggattctagaagaaatgcaattcattaaaattttcctggcactgagagttaatctttagcagattgcatgaaaatactgaattcctggtaaggagatattttgttttaaaaataatgtgttttgatacgaatcagtgtattaactgataactaaaaagtactcttttttctatatatacatatttttttgaactcatattcacaatcaacatattcaatcagtgagttaagtctcattcctagctaccaaaattcctgggccacttttaaacactaaacatttcatttatcctctaagctaaaatggtgctgagttatttaaatctgaatgtaaaatgcattaaatcttagcttgtggtatataaacatttaattaatataaaactgcttgctataaactaagtaacatgtcatttggtgttaggtttttagtgaagttttagcttctcccaaatttttcaggaatgttatttgtaagacgtgtaacttttttgaagaactcttattttaaatgctcagacattggctttatgttcctctttgcattctcatattcttttattatacatctatactatgattgcaagattatataaaaatgccttgaataaatgatttcaagtgtc

SEQ ID NO: 127491 - DNA, 565 bp, Artificial Sequence
  derived and/or modified sequence
agattaagccagtgtgtctcaggatacactgcccgctctccgggactgccgcgccgctccccgttgccttccaggactgagaaaggggaaagggaagggtgccacgtccgagcagccgccttgactggggaagggtctgaatcccacccttggcattgcttggtggagactgagatacccgtgctccgctcgcctccttggttgaagatttctccttccctcacgtgatttgagccccgtttttattttctgtgagccacgtcctcctcgagcggggtcaatctggcaaaaggagtgatgcgcttcgcctggaccgtgctcctgctcgggcctttgcagctctgcgcgctagtgcactgcgcccctcccgccgccggccaacagcagcccccgcgcgagccgccggcggctccgggcgcctggcgccagcagatccaatgggagaacaacgggcaggtgttcagcttgctgagcctgggctcacagtaccagcctcagcgccgccgggacccgggcgccgccgtccctggtgcagccaacgcctccgcccagcagccccgcactc

SEQ ID NO: 127492 - DNA, 1724 bp, Artificial Sequence
  derived and/or modified sequence
agacactgcccgctctccgggactgccgcgccgctccccgttgccttccaggactgagaaaggggaaagggaagggtgccacgtccgagcagccgccttgactggggaagggtctgaatcccacccttggcattgcttggtggagactgagatacccgtgctccgctcgcctccttggttgaagatttctccttccctcacgtgatttgagccccgtttttattttctgtgagccacgtcctcctcgagcggggtcaatctggcaaaaggagtgatgcgcttcgcctggaccgtgctcctgctcgggcctttgcagctctgcgcgctagtgcactgcgcccctcccgccgccggccaacagcagcccccgcgcgagccgccggcggctccgggcgccgcctccgcccagcagccccgcactccgatcctgctgatccgcgacaaccgcaccgccgcggcgcgaacgcggacggccggctcatctggagtcaccgctggccgccccaggcccaccgcccgtcactggttccaagctggctactcgacatctagagcccgcgaagctggcgcctcgcgcgcggagaaccagacagcgccgggagaagttcctgcgctcagtaacctgcggccgcccagccgcgtggacggcatggtgggcgacgacccttacaacccctacaagtactctgacgacaacccttattacaactactacgatacttatgaaaggcccagacctgggggcaggtaccggcccggatacggcactggctacttccagtacggtctcccagacctggtggccgacccctactacatccaggcgtccacgtacgtgcagaagatgtccatgtacaacctgagatgcgcggcggaggaaaactgtctggccagtacagcatacagggcagatgtcagagattatgatcacagggtgctgctcagatttccccaaagagtgaaaaaccaagggacatcagatttcttacccagccgaccaagatattcctgggaatggcacagttgtcatcaacattaccacagtatggatgagtttagccactatgacctgcttgatgccaacacccagaggagagtggctgaaggccacaaagcaagtttctgtcttgaagacacatcctgtgactatggctaccacaggcgatttgcatgtactgcacacacacagggattgagtcctggctgttatgatacctatggtgcagacatagactgccagtggattgatattacagatgtaaaacctggaaactatatcctaaaggtcagtgtaaaccccagctacctggttcctgaatctgactataccaacaatgttgtgcgctgtgacattcgctacacaggacatcatgcgtatgcctcaggctgcacaatttcaccgtattagaaggcaaagcaaaactcccaatggataaatcagtgcctggtgttctgaagtgggaaaaaatagactaacttcagtaggatttatgtattttgaaaaagagaacagaaaacaacaaaagaatttttgtttggactgttttcaataacaaagcacataactggattttgaacgcttaagtcatcattacttgggaaatttttaatgtttattatttacatcactttgtgaattaacacagtgtttcaattctgtaattacatatttgactctttcaaagaaatccaaatttctcatgttccttttgaaattgtagtgc

SEQ ID NO: 127493 - DNA, 123 bp, Artificial Sequence
  derived and/or modified sequence
atgcggttcgcctggaccgtgctgctgctgggccccctgcagctgtgtgcgttagtccattgcgcccccccagccgcgggtcaacagcagccccccagagaacccccagccgcccccgggtag

SEQ ID NO: 127494 - DNA, 1134 bp, Artificial Sequence
  derived and/or modified sequence
atgcggttcgcctggaccgtgctgctgctgggccccctgcagctgtgcgcattagtccactgcgctccccctgcagcagggcagcaacagcctcccagggagcctcccgccgcccccggagcagctagtgcccaacagcctcggacccctatcctgttgattcgcgacaacaggacggccgcggccagaactcgcacagccggatcctccggtgtcaccgccgggcggccccgccccactgcgcggcattggtttcaggctggatatagtacatctcgtgccagggaagccggcgccagcagggctgaaaaccagacagcaccgggggaagtaccagccctatctaatctgcgacccccatcacgcgtggatggcatggtgggggatgacccctataacccatacaagtactctgacgataacccctactacaattattacgacacttatgagcggcccaggccagggggcaggtatcgcccaggatacggaacagggtattttcaatacggactgccagaccttgtggcagacccttactatatccaagccagcacatacgtccagaaaatgagcatgtataaccttcgctgcgccgctgaagagaattgccttgccagcacggcctatcgcgcagatgttagagattacgaccatcgggtcctgctcagattcccccaaagagtgaagaaccaaggcacttcagatttccttccctctaggcccaggtatagctgggagtggcactcatgtcatcagcactatcacagcatggatgagttctcccattacgacctgcttgatgccaacacacagaggcgcgttgccgaaggtcacaaagcttcgttttgcttggaggacacctcctgtgactatgggtaccatcggagatttgcatgcactgctcacacacagggcctttcccccggatgttatgatacctacggcgccgacatagactgccagtggattgatatcactgatgtaaagccagggaactacatcctgaaagtttccgtgaatcctagctatctggtgcccgaaagcgactacacaaataatgtggtgcgctgcgacatcaggtataccggacaccacgcttacgcctcaggctgtacaatatctccttactag

SEQ ID NO: 127495 - DNA, 123 bp, Artificial Sequence
  derived and/or modified sequence
atgcgcttcgcgtggactgtgctgttactgggtccgcttcagttgtgcgccctcgtccattgtgcccctcctgctgctggacagcaacagccaccccgagagcccccagctgctccagggtag

SEQ ID NO: 127496 - DNA, 1134 bp, Artificial Sequence
  derived and/or modified sequence
atgagattcgcttggactgtgttgctgttgggacccctccagctgtgcgctctggttcactgcgcacctcctgcagccggacagcagcaacccccaagggagcccccagccgcacctggagcagcttccgcccagcagcctcgcaccccgatccttctaatacgagataacaggaccgcggctgcgagaacccggacagctggttcatctggggtcacagcaggcagaccacgaccaaccgcacggcattggtttcaggccggatattcaaccagtagagcaagagaagcaggtgcctctagggctgaaaatcagacagccccaggcgaggtgcctgccctgagcaatctacgccctcccagcagagttgatggcatggtcggagatgacccttacaacccctataaatactctgatgataacccctactacaattattacgatacctacgaacgtccgcgaccagggggacgttaccgcccaggttacggcactggttacttccaatacggccttcccgatctggttgctgacccatattacattcaggcgtccacctacgtccaaaagatgtcgatgtacaacttgagatgtgctgccgaggagaattgtctagctagtacggcctaccgggctgatgtccgggactatgatcacagggtgctgttacgcttcccacagagggtcaagaaccaaggcacaagcgacttcctaccatcgagacctagatactcttgggaatggcactcttgtcatcagcactatcactccatggatgagttctctcactatgacctcttggacgccaacacgcagcggagggtagctgaaggccataaggcctcgttctgcctggaggatacctcatgtgattatgggtatcaccgcagatttgcttgtacagcccatacccagggactctcgcctggatgctacgatacatatggcgctgacatcgactgtcagtggatcgacattacagacgtgaagccaggtaactatattctcaaggtgagtgtgaacccgagttatctcgtgccagaatcagattacactaataatgttgttcgctgtgacataaggtacactgggcatcatgcatacgccagcggctgcactatttcaccctattag

SEQ ID NO: 127497 - DNA, 123 bp, Artificial Sequence
  derived and/or modified sequence
atgagattcgcctggaccgtgctgctgctgggccccctgcagctgtgcgccctggtgcactgcgccccccccgccgccggccagcagcagccccccagagagccccccgccgcccccggctag

SEQ ID NO: 127498 - DNA, 1134 bp, Artificial Sequence
  derived and/or modified sequence
atgagattcgcctggaccgtgctgctgctgggccccctgcagctgtgcgccctggtgcactgcgccccccccgccgccggccagcagcagccccccagagagccccccgccgcccccggcgccgccagcgcccagcagcccagaacccccatcctgctgatcagagacaacagaaccgccgccgccagaaccagaaccgccggcagcagcggcgtgaccgccggcagacccagacccaccgccagacactggttccaggccggctacagcaccagcagagccagagaggccggcgccagcagagccgagaaccagaccgcccccggcgaggtgcccgccctgagcaacctgagaccccccagcagagtggacggcatggtgggcgacgacccctacaacccctacaagtacagcgacgacaacccctactacaactactacgacacctacgagagacccagacccggcggcagatacagacccggctacggcaccggctacttccagtacggcctgcccgacctggtggccgacccctactacatccaggccagcacctacgtgcagaagatgagcatgtacaacctgagatgcgccgccgaggagaactgcctggccagcaccgcctacagagccgacgtgagagactacgaccacagagtgctgctgagattcccccagagagtgaagaaccagggcaccagcgacttcctgcccagcagacccagatacagctgggagtggcacagctgccaccagcactaccacagcatggacgagttcagccactacgacctgctggacgccaacacccagagaagagtggccgagggccacaaggccagcttctgcctggaggacaccagctgcgactacggctaccacagaagattcgcctgcaccgcccacacccagggcctgagccccggctgctacgacacctacggcgccgacatcgactgccagtggatcgacatcaccgacgtgaagcccggcaactacatcctgaaggtgagcgtgaaccccagctacctggtgcccgagagcgactacaccaacaacgtggtgagatgcgacatcagatacaccggccaccacgcctacgccagcggctgcaccatcagcccctactag

SEQ ID NO: 127499 - protein, 774 aa, Artificial Sequence
  derived and/or modified sequence
MERPLCSHLCSCLAMLALLSPLSLAQYDSWPHYPEYFQQPAPEYHQPQAPANVAKIQLRLAGQKRKHSEGRVEVYYDGQWGTVCDDDFSIHAAHVVCRELGYVEAKSWTASSSYGKGEGPIWLDNLHCTGNEATLAACTSNGWGVTDCKHTEDVGVVCSDKRIPGFKFDNSLINQIENLNIQVEDIRIRAILSTYRKRTPVMEGYVEVKEGKTWKQICDKHWTAKNSRVVCGMFGFPGERTYNTKVYKMFASRRKQRYWPFSMDCTGTEAHISSCKLGPQVSLDPMKNVTCENGLPAVVSCVPGQVFSPDGPSRFRKAYKPEQPLVRLRGGAYIGEGRVEVLKNGEWGTVCDDKWDLVSASVVCRELGFGSAKEAVTGSRLGQGIGPIHLNEIQCTGNEKSIIDCKFNAESQGCNHEEDAGVRCNTPAMGLQKKLRLNGGRNPYEGRVEVLVERNGSLVWGMVCGQNWGIVEAMVVCRQLGLGFASNAFQETWYWHGDVNSNKVVMSGVKCSGTELSLAHCRHDGEDVACPQGGVQYGAGVACSETAPDLVLNAEMVQQTTYLEDRPMFMLQCAMEENCLSASAAQTDPTTGYRRLLRFSSQIHNNGQSDFRPKNGRHAWIWHDCHRHYHSMEVFTHYDLLNLNGTKVAEGHKASFCLEDTECEGDIQKNYECANFGDQGITMGCWDMYRHDIDCQWVDITDVPPGDYLFQVVINPNFEVAESDYSNNIMKCRSRYDGHRIWMYNCHIGGSFSEETEKKFEHFSGLLNNQLSPQ

SEQ ID NO: 127500 - protein, 151 aa, Artificial Sequence
  derived and/or modified sequence
MERPLCSHLCSCLAMLALLSPLSLAQYDSWPHYPEYFQQPAPEYHQPQAPANVAKIQLRLAGQKRKHSEGRVEVYYDGQWGTVCDDDFSIHAAHVVCRELGYVEAKSWTASSSYGKGEGPIWLDNLHCTGNEATLAACTSNGWGVTDCKHT

SEQ ID NO: 127501 - protein, 96 aa, Artificial Sequence
  derived and/or modified sequence
MERPLCSHLCSCLAMLALLSPLSLAQYDSWPHYPEYFQQPAPEYHQPQAPANVAKIQLRLAGQKRKHSEGRVEVYYDGQWGTVCDDDFSIHAAHVV

SEQ ID NO: 127502 - protein, 139 aa, Artificial Sequence
  derived and/or modified sequence
MERPLCSHLCSCLAMLALLSPLSLAQYDSWPHYPEYFQQPAPEYHQPQAPANVAKIQLRLAGQKRKHSEGRVEVYYDGQWGTVCDDDFSIHAAHVVCRELGYVEAKSWTASSSYGKGEGPIWLDNLHCTGNEATLAACT

SEQ ID NO: 127503 - DNA, 2325 bp, Artificial Sequence
  derived and/or modified sequence
atggaacggccactctgttcacacctttgctcatgccttgcaatgctggctcttctttcgcctctctctctggcccagtatgattcttggccacattatcccgaatactttcagcagcccgcaccagagtatcaccagccacaagcgcccgccaatgtagcaaagatccagcttcgcctggctggccagaagcgaaagcatagtgagggacgtgtggaggtttattatgacggccagtggggaaccgtttgtgatgacgatttctctatccacgccgcccatgtcgtgtgcagagaactaggttatgttgaggccaaatcttggaccgcaagttcctcctatgggaaaggcgaaggcccaatctggctggataatttacattgcaccgggaacgaagcgacacttgccgcctgcacttccaacggctggggcgtgacggactgcaagcatactgaagatgttggagtagtttgcagcgacaagaggatcccaggcttcaagtttgataactctctgatcaaccagatagagaacttgaacatccaggtggaagatatccgaatccgcgcaatcctgtctacctatcgcaagaggacccctgttatggagggatacgtcgaggtaaaggagggaaagacatggaagcaaatttgtgataaacattggactgccaaaaattcccgagtggtgtgtgggatgttcggctttccaggcgaaaggacatacaatactaaggtctataagatgtttgcctccagacgtaagcagaggtactggcctttctctatggactgcacaggcacggaagcacatattagcagttgtaagctcggcccacaggtcagtcttgacccgatgaaaaatgtcacatgcgagaatggcctccctgccgtggtctcctgcgttcctggacaggtcttttctcccgatggacccagcagattcagaaaggcttacaagcccgaacagcctctcgtgcgtcttcgcgggggagcttatattggcgaaggaagagtggaagtgctgaagaacggggagtgggggacggtgtgcgacgataagtgggatctggtgtcagcctctgtggtttgtagggagctgggatttggtagcgccaaggaagccgttaccggtagccgcctgggccagggcatagggcctatccacctgaacgagatccagtgtaccgggaacgagaagtccattattgattgtaagtttaatgctgaaagccaaggatgcaatcacgaagaagacgctggagtgcgctgcaacacccccgcgatgggattgcagaagaagcttagactgaatggaggacggaacccatacgagggcagagtggaggtgctggtcgaacgcaacggatctctcgtttggggaatggtgtgtggtcagaattggggcatcgtggaggcaatggtggtgtgccggcaactgggattgggtttcgcatccaacgcctttcaggagacttggtattggcatggcgacgtgaactctaataaggtggtgatgtctggagtgaaatgttccggtactgaattatctcttgcccattgccgacacgatggtgaggacgttgcgtgtccccaaggcggggtgcagtacggcgcgggagtagcatgttcggaaacggcccctgatctggtcttgaatgcagagatggtgcaacagactacttacctcgaggatcggccaatgtttatgctccagtgcgctatggaagagaattgtctcagtgcatctgccgcgcagactgacccaactacagggtacaggaggctcctgagattctccagccagattcataacaatgggcagtctgatttccgaccaaagaatgggcggcatgcatggatctggcatgactgtcaccggcactatcacagcatggaggtgtttacgcactatgacctgctgaaccttaacgggactaaggttgctgaagggcataaagcatctttttgtctggaagacacagagtgcgaaggcgatatccagaaaaactacgagtgcgcaaattttggcgaccagggcatcactatgggatgttgggatatgtatagacacgatatcgactgccagtgggtggatattacggacgttcccccgggagactacctgttccaggtggtgatcaaccccaattttgaagtcgctgagtccgactattcaaataacataatgaagtgccgaagcagatatgatggccataggatctggatgtataattgccatatcggaggcagcttctcagaagagactgaaaaaaagttcgagcacttttctggcctccttaacaaccagctgtcaccccagtag

SEQ ID NO: 127504 - DNA, 456 bp, Artificial Sequence
  derived and/or modified sequence
atggagcgaccactctgctcccatctatgttcatgtctcgctatgttggccctgctgagcccgctcagtctagctcagtatgacagctggccacactatcctgagtacttccaacagcctgcccccgaatatcatcaaccccaggctcccgccaatgttgctaagattcagctcaggcttgcgggccagaagaggaagcactccgaagggagagtggaagtgtactacgacggccagtgggggaccgtttgtgatgacgatttttcaatccatgcagcacacgtggtctgccgcgagctcggttacgtggaggctaagagctggaccgcaagctcatcctacggtaagggggaggggcctatttggctggataatctgcactgtaccggaaatgaggcaactctagcagcttgtactagcaatggatggggagtgactgactgtaaacacacctag

SEQ ID NO: 127505 - DNA, 291 bp, Artificial Sequence
  derived and/or modified sequence
atggaaagacctctgtgcagtcatctgtgcagctgtctggcaatgctggcactgctctcacccctctcactggcccagtacgactcatggcctcactaccccgagtacttccagcagcctgcgccggaatatcatcaaccgcaggcgccggccaatgttgccaagatccagcttcggcttgcgggccagaagcgtaagcacagcgaaggaagggttgaggtttactatgatggccagtgggggaccgtgtgcgacgacgatttctccatccacgctgctcatgtggtgtag

SEQ ID NO: 127506 - DNA, 420 bp, Artificial Sequence
  derived and/or modified sequence
atggaacggcctctgtgtagccacttgtgcagctgtctcgccatgctcgcgttgcttagcccactgtcgctagcccaatatgactcatggccccattatcccgagtatttccagcagcccgcaccggaataccaccagccccaggcaccagcgaacgtcgctaaaatccagctgagactggctggccagaaaaggaagcatagtgaaggtagggttgaggtttactacgatggtcagtgggggacagtatgcgacgatgacttttccatacacgccgcgcatgtggtgtgtagagagctgggttacgtggaggcaaagagttggactgcatcttcatcttatggaaaaggagagggtcccatctggttagataacctccactgtaccgggaacgaagccacactggcagcttgcacatag

SEQ ID NO: 127507 - DNA, 2325 bp, Artificial Sequence
  derived and/or modified sequence
atggagcggcccctgtgcagccacctgtgcagctgcctggccatgctggccctgctgagccccctgagcctggcccagtatgacagctggccccactacccagagtacttccagcagcctgcccctgagtaccaccagccccaggccccagccaacgtggccaagatccagctgcggctggccggccagaagaggaagcacagcgagggccgggtggaggtgtactatgatggccagtggggcaccgtgtgtgatgatgacttcagcatccacgccgcccacgtggtgtgccgggagctgggctacgtggaggccaagtcctggacagccagcagcagctatggcaagggggagggccccatctggctggacaacctgcactgcacaggaaatgaggccaccctggccgcctgcaccagcaatggctggggcgtgacagactgcaagcacacagaagatgtgggcgtggtgtgcagcgacaagagaattcctggcttcaagtttgacaacagcctcatcaaccagatcgagaacctgaacatccaggtggaggacatccgcatccgggccatcctgagcacctacaggaagaggacccctgtgatggagggctacgtggaggtgaaggagggcaagacctggaagcagatctgtgacaagcactggacagccaagaacagccgggtggtgtgtggcatgtttggcttccctggagagaggacctacaacaccaaggtgtacaagatgtttgccagcaggaggaagcagcgctactggcccttctccatggactgcaccggcacagaggcccacatcagcagctgcaagctgggcccccaggtgtccctggaccccatgaagaatgtgacctgtgaaaatggcctgcctgctgtggtgtcctgtgtgcccggccaggtgttctccccagatggccccagccgcttcaggaaggcctacaagccagagcagcccctggtgcggctgcggggcggggcctacatcggggagggccgggtggaggtgctgaagaatggagagtggggcaccgtgtgtgatgacaagtgggacctggtgtctgcctctgtggtgtgccgggagctgggctttggaagtgccaaggaggccgtgacaggcagccggctgggccagggcatcggccccatccacctgaatgagatccagtgcacaggaaatgagaagagcatcatcgactgcaagttcaatgctgagagccagggctgcaaccacgaggaggatgctggggtgcgctgcaacaccccagccatgggcctgcagaagaagctgcggctgaatggaggaagaaacccctatgagggccgggtggaggtgctggtggagagaaatggcagcctggtgtggggcatggtgtgtggccagaactggggcatcgtggaggccatggtggtgtgccggcagctgggcctgggctttgccagcaatgccttccaggagacctggtactggcatggagatgtgaacagcaacaaggtggtgatgtctggagtgaagtgcagcggcacagagctgagcctggcccactgcagacatgatggagaagatgtggcctgcccccagggcggcgtgcagtatggagctggggtggcctgcagcgagacagccccagacctggtgctgaatgctgagatggtgcagcagaccacctacctggaggaccggcccatgttcatgctgcagtgtgccatggaggagaactgcctgagcgccagcgctgcccagacagaccccaccaccggctaccgccgcctgctgcgcttcagcagccagatccacaacaacggccagagcgacttccggcccaagaatggaagacatgcctggatctggcatgactgccaccgccactaccacagcatggaggtgttcacccactatgacctgctgaacctgaatggcaccaaggtggccgagggccacaaggccagcttctgcctggaggacacagaatgtgagggggacatccagaagaactatgaatgtgccaactttggagaccagggcatcaccatgggctgctgggacatgtacagacatgacatcgactgccagtgggtggacatcacagatgtgcccccaggggactacctgttccaggtggtgatcaaccccaactttgaggtggccgagagtgactacagcaacaacatcatgaagtgccgcagccgctatgatggccaccgcatctggatgtacaactgccacatcggcggcagcttcagcgaggagacagagaagaagtttgagcacttcagcggcctgctgaacaaccagctgagcccccagtag

SEQ ID NO: 127508 - DNA, 456 bp, Artificial Sequence
  derived and/or modified sequence
atggagcggcccctgtgcagccacctgtgcagctgcctggccatgctggccctgctgagccccctgagcctggcccagtatgacagctggccccactacccagagtacttccagcagcctgcccctgagtaccaccagccccaggccccagccaacgtggccaagatccagctgcggctggccggccagaagaggaagcacagcgagggccgggtggaggtgtactatgatggccagtggggcaccgtgtgtgatgatgacttcagcatccacgccgcccacgtggtgtgccgggagctgggctacgtggaggccaagtcctggacagccagcagcagctatggcaagggggagggccccatctggctggacaacctgcactgcacaggaaatgaggccaccctggccgcctgcaccagcaatggctggggcgtgacagactgcaagcacacctag

SEQ ID NO: 127509 - DNA, 291 bp, Artificial Sequence
  derived and/or modified sequence
atggagcggcccctgtgcagccacctgtgcagctgcctggccatgctggccctgctgagccccctgagcctggcccagtatgacagctggccccactacccagagtacttccagcagcctgcccctgagtaccaccagccccaggccccagccaacgtggccaagatccagctgcggctggccggccagaagaggaagcacagcgagggccgggtggaggtgtactatgatggccagtggggcaccgtgtgtgatgatgacttcagcatccacgccgcccacgtggtgtag

SEQ ID NO: 127510 - DNA, 420 bp, Artificial Sequence
  derived and/or modified sequence
atggagcggcccctgtgcagccacctgtgcagctgcctggccatgctggccctgctgagccccctgagcctggcccagtatgacagctggccccactacccagagtacttccagcagcctgcccctgagtaccaccagccccaggccccagccaacgtggccaagatccagctgcggctggccggccagaagaggaagcacagcgagggccgggtggaggtgtactatgatggccagtggggcaccgtgtgtgatgatgacttcagcatccacgccgcccacgtggtgtgccgggagctgggctacgtggaggccaagtcctggacagccagcagcagctatggcaagggggagggccccatctggctggacaacctgcactgcacaggaaatgaggccaccctggccgcctgcacctag

SEQ ID NO: 127511 - DNA, 3549 bp, Artificial Sequence
  derived and/or modified sequence
acaacaaaagaggccggaggccgggcctgctgcggcggccgccttcggggaagggggtgggtccggggaggggtttgccatcctcctctagttaaaagtaagggggaaaagagtaaacgcgcgactccagcgcgcggctacctacgcttggtgcttgctttctccagccatcggagaccagagccgccccctctgctcgagaaaggggctcagcggcggcggaagcggagggggaccaccgtggagagcgcggtcccagcccggccactgcggatccctgaaaccaaaaagctcctgctgcttctgtaccccgcctgtccctcccagctgcgcagggccccttcgtgggatcatcagcccgaagacagggatggagaggcctctgtgctcccacctctgcagctgcctggctatgctggccctcctgtcccccctgagcctggcacagtatgacagctggccccattaccccgagtacttccagcaaccggctcctgagtatcaccagccccaggcccccgccaacgtggccaagattcagctgcgcctggctgggcagaagaggaagcacagcgagggccgggtggaggtgtactatgatggccagtggggcaccgtgtgcgatgacgacttctccatccacgctgcccacgtcgtctgccgggagctgggctacgtggaggccaagtcctggactgccagctcctcctacggcaagggagaagggcccatctggttagacaatctccactgtactggcaacgaggcgacccttgcagcatgcacctccaatggctggggcgtcactgactgcaagcacacggaggatgtcggtgtggtgtgcagcgacaaaaggattcctgggttcaaatttgacaattcgttgatcaaccagatagagaacctgaatatccaggtggaggacattcggattcgagccatcctctcaacctaccgcaagcgcaccccagtgatggagggctacgtggaggtgaaggagggcaagacctggaagcagatctgtgacaagcactggacggccaagaattcccgcgtggtctgcggcatgtttggcttccctggggagaggacatacaataccaaagtgtacaaaatgtttgcctcacggaggaagcagcgctactggccattctccatggactgcaccggcacagaggcccacatctccagctgcaagctgggcccccaggtgtcactggaccccatgaagaatgtcacctgcgagaatgggctaccggccgtggtgagttgtgtgcctgggcaggtcttcagccctgacggaccctcaagattccggaaagcgtacaagccagagcaacccctggtgcgactgagaggcggtgcctacatcggggagggccgcgtggaggtgctcaaaaatggagaatgggggaccgtctgcgacgacaagtgggacctggtgtcggccagtgtggtctgcagagagctgggctttgggagtgccaaagaggcagtcactggctcccgactggggcaagggatcggacccatccacctcaacgagatccagtgcacaggcaatgagaagtccattatagactgcaagttcaatgccgagtctcagggctgcaaccacgaggaggatgctggtgtgagatgcaacacccctgccatgggcttgcagaagaagctgcgcctgaacggcggccgcaatccctacgagggccgagtggaggtgctggtggagagaaacgggtcccttgtgtgggggatggtgtgtggccaaaactggggcatcgtggaggccatggtggtctgccgccagctgggcctgggattcgccagcaacgccttccaggagacctggtattggcacggagatgtcaacagcaacaaagtggtcatgagtggagtgaagtgctcgggaacggagctgtccctggcgcactgccgccacgacggggaggacgtggcctgcccccagggcggagtgcagtacggggccggagttgcctgctcagaaaccgcccctgacctggtcctcaatgcggagatggtgcagcagaccacctacctggaggaccggcccatgttcatgctgcagtgtgccatggaggagaactgcctctcggcctcagccgcgcagaccgaccccaccacgggctaccgccggctcctgcgcttctcctcccagatccacaacaatggccagtccgacttccggcccaagaacggccgccacgcgtggatctggcacgactgtcacaggcactaccacagcatggaggtgttcacccactatgacctgctgaacctcaatggcaccaaggtggcagagggccacaaggccagcttctgcttggaggacacagaatgtgaaggagacatccagaagaattacgagtgtgccaacttcggcgatcagggcatcaccatgggctgctgggacatgtaccgccatgacatcgactgccagtgggttgacatcactgacgtgccccctggagactacctgttccaggttgttattaaccccaacttcgaggttgcagaatccgattactccaacaacatcatgaaatgcaggagccgctatgacggccaccgcatctggatgtacaactgccacataggtggttccttcagcgaagagacggaaaaaaagtttgagcacttcagcgggctcttaaacaaccagctgtccccgcagtaaagaagcctgcgtggtcaactcctgtcttcaggccacaccacatcttccatgggacttccccccaacaactgagtctgaacgaatgccacgtgccctcacccagcccggcccccaccctgtccagacccctacagctgtgtctaagctcaggaggaaagggaccctcccatcattcatggggggctgctacctgacccttggggcctgagaaggccttgcgggggtggggtttgtccacagagctgctggagcagcaccaagagccagtcttgaccgggatgaggcccacagacaggttgtcatcagcttgtcccattcaagccaccgagctcaccacagacacagtggagccgcgctcttctccagtgacacgtggacaaatgcgggctcatcagcccccccagagagggtcaggccgaaccccatttctcctcctcttaggtcattttcagcaaacttgaatatctagacctctcttccaatgaaaccctccagtctattatagtcacatagataatggtgccacgtgttttctgatttggtgagctcagacttggtgcttccctatccacagcccccaccccttgtttttcaagatactattattatattttcacagacttttgaagcacaaatttattggcatttaatattggacatctgggcccttggaagtacaaatctaaggaaaaaccaacccactgtgtaagtgactcatcttcctgttgttccaattctgtgggtttttgattcaacggtgctataaccagggtcctgggtgacagggcgctcactgagcaccatgtgtcatcacagacacttacacatacttgaaacttggaataaaagaaaga

SEQ ID NO: 127512 - DNA, 588 bp, Artificial Sequence
  derived and/or modified sequence
tatttgtgttgaggggaccagctgttagtctttctgctgctctttctaagaaagctcctgctgcttctgtaccccgcctgtccctcccagctgcgcagggccccttcgtgggatcatcagcccgaagacagggatggagaggcctctgtgctcccacctctgcagctgcctggctatgctggccctcctgtcccccctgagcctggcacagtatgacagctggccccattaccccgagtacttccagcaaccggctcctgagtatcaccagccccaggcccccgccaacgtggccaagattcagctgcgcctggctgggcagaagaggaagcacagcgagggccgggtggaggtgtactatgatggccagtggggcaccgtgtgcgatgacgacttctccatccacgctgcccacgtcgtctgccgggagctgggctacgtggaggccaagtcctggactgccagctcctcctacggcaagggagaagggcccatctggttagacaatctccactgtactggcaacgaggcgacccttgcagcatgcacctccaatggctggggcgtcactgactgcaagcacacgga

SEQ ID NO: 127513 - DNA, 763 bp, Artificial Sequence
  derived and/or modified sequence
cggaggccgggcctgctgcggcggccgccttcggggaagggggtgggtccggggaggggtttgccatcctcctctagttaaaagtaagggggaaaagagtaaacgcgcgactccagcgcgcggctacctacgcttggtgcttgctttctccagccatcggagaccagagccgccccctctgctcgagaaaggggctcagcggcggcggaagcggagggggaccaccgtggagagcgcggtcccagcccggccactgcggatccctgaaaccaagttctgaactcccggtctccccagtccctggaggctgcctgcagctttgcttagcttctcagcctgttgatcactgccgtggaattggcgagtatcttccgggggaaagcagagacaaaaaaagctcctgctgcttctgtaccccgcctgtccctcccagctgcgcagggccccttcgtgggatcatcagcccgaagacagggatggagaggcctctgtgctcccacctctgcagctgcctggctatgctggccctcctgtcccccctgagcctggcacagtatgacagctggccccattaccccgagtacttccagcaaccggctcctgagtatcaccagccccaggcccccgccaacgtggccaagattcagctgcgcctggctgggcagaagaggaagcacagcgagggccgggtggaggtgtactatgatggccagtggggcaccgtgtgcgatgacgacttctccatccacgctgcccacgtcgt

SEQ ID NO: 127514 - DNA, 746 bp, Artificial Sequence
  derived and/or modified sequence
cagccatcggagaccagagccgccccctctgctcgagaaaggggctcagcggcggcggaagcggagggggaccaccgtggagagcgcggtcccagcccggccactgcggatccctgaaaccaaatggagtctcgctctgtcacccaggctggagtacagtggcacgatcttggctgactgcaagctttgcctcccgggttcaagcgattctcctgcctcaagcctcctgagtaactgggactacagaaagctcctgctgcttctgtaccccgcctgtccctcccagctgcgcagggccccttcgtgggatcatcagcccgaagacagggatggagaggcctctgtgctcccacctctgcagctgcctggctatgctggccctcctgtcccccctgagcctggcacagtatgacagctggccccattaccccgagtacttccagcaaccggctcctgagtatcaccagccccaggcccccgccaacgtggccaagattcagctgcgcctggctgggcagaagaggaagcacagcgagggccgggtggaggtgtactatgatggccagtggggcaccgtgtgcgatgacgacttctccatccacgctgcccacgtcgtctgccgggagctgggctacgtggaggccaagtcctggactgccagctcctcctacggcaagggagaagggcccatctggttagacaatctccactgtactggcaacgaggcgacccttgcagcatgcacc

SEQ ID NO: 127515 - DNA, 2325 bp, Artificial Sequence
  derived and/or modified sequence
atggagcggcccctgtgcagccacctgtgcagctgcctggccatgttggcccttctgtcacctctttccctggctcagtacgatagctggcctcattatcccgaatacttccagcagccggctccagagtaccaccaacctcaagccccagccaatgttgccaagattcaattacggctagccgggcagaagagaaagcattccgagggacgagtggaagtgtactacgatggccaatggggaactgtgtgtgacgacgatttcagcatacatgcagcgcatgtcgtatgccgtgagttggggtatgtggaggctaagtcttggacagcatcctcttcttacgggaagggtgagggtcccatttggttggataatctgcactgtactggaaatgaggcaacactcgctgcttgcacttctaacggatggggggtaacagattgtaaacacacagaggacgttggcgtggtctgctccgataaaagaatacctggtttcaagttcgacaacagccttatcaaccaaattgagaatctgaacattcaggtggaagacatacgtattagagccatattgtcaacatatcgtaagaggactccagttatggaaggttacgtggaggtcaaagagggtaaaacatggaagcagatttgcgataagcactggacagcaaaaaattctcgagtcgtgtgtggtatgtttggcttccctggggaaagaacctataacaccaaggtgtacaagatgtttgcgagtcggcggaagcagcgttattggcctttttctatggattgcacgggaaccgaagcccatatttctagttgcaagctggggccccaggtcagcttggaccccatgaaaaatgtgacttgtgaaaacggcctcccagcagtggtctcttgcgtaccggggcaggtattctcaccagacgggccttcgagattccggaaggcatataagccagagcagcccctggtcaggcttcgcgggggggcatatatcggcgagggtagggtggaagtgttaaaaaatggggaatggggcaccgtatgtgatgataaatgggacctggtttccgcaagcgtggtgtgccgagagctcggcttcggatctgcaaaggaggcagtgacaggaagtagacttggacagggcataggcccgattcatctgaatgagattcagtgtacaggaaatgaaaaaagcataatcgactgcaagttcaatgccgagagccagggctgcaatcacgaggaggacgcaggggtgaggtgcaacacccctgctatgggtctgcagaaaaagctccgtctgaatggaggtagaaatccttatgagggaagggtggaggtacttgtggaaaggaacggctcgcttgtgtggggaatggtttgtggtcaaaactgggggattgtggaggcaatggtagtatgtcgtcagctgggcctgggctttgcctcgaacgcttttcaggaaacatggtactggcatggagacgtgaactcaaacaaggtggtgatgagtggggtcaaatgctcaggaactgagctatctctggctcactgtaggcatgacggagaggatgtagcttgcccccaaggcggagtgcagtacggggcgggggtggcctgctcggagacagccccggatctcgtactgaacgccgagatggttcagcaaacaacttacctcgaagaccgccccatgtttatgttgcagtgcgccatggaggaaaactgcctctctgccagcgcggcccagacagatcccactactggatatcgtagattgctcaggttcagctctcagatccacaataacgggcagagcgacttccgccctaagaacggtagacacgcatggatatggcatgattgccaccgtcattaccacagtatggaagtatttacacattatgacctgctgaatttgaatggaaccaaggtagcagaaggacataaggcttctttttgtctggaagatacggagtgtgaaggggacattcagaaaaactacgaatgtgctaattttggcgatcaagggatcaccatgggatgttgggacatgtatcgccatgacatcgactgtcagtgggtcgacataactgacgttcccccaggcgattacctttttcaagtggtcataaacccgaatttcgaggtggccgagtccgactacagtaacaacatcatgaaatgccgatctcgatatgacggacaccggatctggatgtacaactgccatatcggggggagtttcagcgaagagaccgagaaaaagttcgagcacttttctggactgcttaacaaccagctctctcctcagtag

SEQ ID NO: 127516 - DNA, 456 bp, Artificial Sequence
  derived and/or modified sequence
atggagcggcccctgtgcagccacctgtgcagctgcctggccatgctggcccttctgagccccctatctcttgctcagtacgactcgtggccacactaccccgagtattttcagcagcccgcccctgagtatcaccagcctcaggctcccgcaaacgttgcgaagatccagttacgactggctggtcagaaaagaaaacatagcgaagggagagtggaggtctactatgacggtcaatggggtacagtgtgcgatgacgacttcagtatacacgctgcccacgtggtgtgccgcgagcttgggtacgtggaggcaaagagctggaccgcgagtagctcctacggtaaaggggagggcccaatctggctggacaacctgcattgcacaggcaacgaagccaccttggccgcatgcacatccaatggctggggtgttactgactgcaaacatacatag

SEQ ID NO: 127517 - DNA, 291 bp, Artificial Sequence
  derived and/or modified sequence
atggagcggcccctgtgcagccacctgtgcagctgcctggccatgctggctctgttatctcctctgagtcttgctcagtatgacagctggccacattatcccgaatatttccagcaacccgcaccagaatatcatcagcctcaagcaccagctaatgtggccaagatacagctccggcttgcaggccagaagaggaagcatagtgagggacgggtggaggtgtactatgatggccagtgggggacagtgtgtgacgatgatttttcgatacacgcagctcacgtcgtgtag

SEQ ID NO: 127518 - DNA, 420 bp, Artificial Sequence
  derived and/or modified sequence
atggagcggcccctgtgcagccacctgtgcagctgcctggccatgctggccctcttgtccccactcagtttagctcagtacgacagctggccccattacccagaatactttcagcaacctgctcccgaataccaccagccacaggcaccagcaaatgtagcaaagatccaacttcgactggctggtcagaaacgtaagcacagcgaaggacgagtggaagtctactacgatggccagtggggcaccgtgtgcgatgatgatttttctattcatgcagcacacgttgtctgcagagaactggggtacgtggaagccaagagttggacagctagctcaagttatggcaagggcgaggggccgatctggctggacaacctgcactgcactggaaatgaggcgactctcgccgcttgcacgtag

SEQ ID NO: 127519 - DNA, 2325 bp, Artificial Sequence
  derived and/or modified sequence
atggaaagaccgctttgcagtcatctgtgtagctgtctggccatgctggctctcctctcacctctgtcactcgctcaatacgattcctggccccattatcccgaatattttcagcagccagcaccagagtatcatcagcctcaggctcctgccaacgtggccaagattcagttgcgcctggcaggacagaagagaaaacattctgaaggacgggtggaggtgtactatgacgggcaatggggcaccgtgtgcgacgacgatttctccattcacgcggctcacgtggtgtgtagagaactgggttatgtggaggccaagagctggacggctagcagcagttacggcaagggagaaggccctatttggcttgataatttacactgtactggtaatgaggcaaccttggctgcgtgcaccagtaacggctggggcgtgaccgactgcaagcatacagaggacgtaggggtggtatgctccgataagaggattcctggcttcaagtttgataattccttaatcaaccagatcgagaacctcaatatccaggttgaagacattagaatcagggcaattttgtcgacctacaggaagagaactcctgtgatggagggatatgttgaggtgaaggagggcaaaacttggaaacagatttgcgacaagcactggacagcaaagaattctcgcgtcgtctgtggcatgtttggttttcccggagagaggacctataacacaaaagtgtacaaaatgttcgcatcccggagaaaacaaaggtactggccatttagcatggattgcaccggtactgaggcacacatttccagttgcaagctgggtccccaagtttcattggaccctatgaaaaatgtcacgtgcgaaaacggcttacccgctgtcgtgagctgcgtccccggtcaggtgttttcacctgatgggccatctagattcagaaaggcatataagcccgagcagcccctggtgagattacggggtggagcctatattggcgagggtagagtcgaggttcttaagaacggcgaatggggcacagtctgtgatgataagtgggatctggtgagcgccagcgtggtgtgccgggagctggggtttggttctgctaaggaagcagtgacaggcagtcgactgggccagggcatcggccctatccacctcaatgagatccaatgtaccggtaatgagaaatccatcattgattgtaagtttaatgccgagagtcagggatgcaatcacgaggaagatgcaggcgttcgttgtaatactccagcaatgggtctccaaaagaaattaaggctgaacgggggtaggaacccatacgagggccgtgtggaggtgctggttgagcggaatgggtctctggtgtggggtatggtgtgtggccagaactggggcatagttgaggcaatggtcgtgtgtcggcagcttggcctgggtttcgctagcaatgcttttcaggagacctggtattggcatggagacgttaattctaataaggtcgttatgtccggtgtgaagtgttctggcactgagctgtctctagcgcactgcagacatgacggggaagacgtagcttgtccccaaggtggcgtgcagtatggggcaggcgtggcctgctccgagaccgctcctgacctcgttctgaacgcggagatggtgcagcagacaacctacctggaggatagaccaatgtttatgctacagtgcgcaatggaagaaaattgcctgtcagcttccgccgctcagacagatccaacaaccggctatcggaggttgcttagattcagcagccaaatccacaacaacggccagtctgactttaggccgaaaaatggaaggcatgcgtggatctggcatgactgccatcgccactaccactcaatggaggtcttcacgcattacgatctgctaaacttaaatggaactaaggtcgctgagggtcacaaagcttccttttgtctcgaagatacagaatgcgaaggggacatccagaaaaattacgaatgtgcgaactttggagatcaggggatcaccatgggatgctgggatatgtaccgccatgatatcgactgccagtgggttgatattaccgacgtgccacccggagactacctgtttcaggttgtgataaatccaaactttgaggtcgcagaaagcgattactctaataacattatgaagtgtcggagtagatacgatggccacagaatatggatgtacaactgtcacatcggtgggtcattctctgaagagaccgaaaagaaatttgagcacttctccggccttctcaacaatcaattgtcgccgcagtag

SEQ ID NO: 127520 - DNA, 456 bp, Artificial Sequence
  derived and/or modified sequence
atggagcggccattgtgctctcacctgtgcagctgcctggctatgttagctttgttgagcccactgtccctggcccagtacgattcttggccacactacccagaatactttcaacaacccgctcctgagtatcaccagccgcaggctccagctaatgtcgctaaaatccagcttcgactggcaggacaaaaaagaaaacatagcgaagggagggtggaggtgtactatgatgggcagtggggaacggtttgtgacgatgacttcagtatacacgccgcacatgtcgtctgccgggaactcggttatgtggaagcgaagtcctggacagcaagctcctcctacgggaagggcgagggtccaatttggttagacaatctgcactgtactggaaacgaggcgaccttagcggcttgcacctccaatggatggggtgtgactgactgcaagcacacgtag

SEQ ID NO: 127521 - DNA, 291 bp, Artificial Sequence
  derived and/or modified sequence
atggagaggcccctatgtagccacctgtgtagctgcctcgcaatgctggccctgctctctcccctgagcttagctcagtatgattcttggcctcattatcctgagtactttcagcagccagcacctgagtatcatcagccccaggccccagcaaatgtggctaagattcagcttcgccttgccggtcaaaagcggaaacactccgaaggtagggtggaggtttattatgacggccagtggggcacggtgtgcgatgatgatttttccattcacgccgcacatgtcgtctag

SEQ ID NO: 127522 - DNA, 420 bp, Artificial Sequence
  derived and/or modified sequence
atggaaaggcccctgtgttcccatctctgctcttgccttgctatgttagctctgctgagcccactcagtctggctcagtacgacagctggccccactaccccgaatactttcaacaacccgctcctgagtaccaccagcctcaggccccagccaacgtggctaagatccagctgaggttagcagggcaaaagcgaaagcactcagagggaagggttgaagtgtattacgatggccaatggggcaccgtatgtgatgacgattttagcatacacgcagctcatgtggtttgccgagaactggggtacgttgaggccaaaagctggaccgcttcgagtagctacggcaagggtgagggccctatttggcttgataacctgcattgtacaggcaatgaagctacactagcagcatgcacatag

SEQ ID NO: 127523 - DNA, 2325 bp, Artificial Sequence
  derived and/or modified sequence
atggagagacccctgtgcagccacctgtgcagctgcctggccatgctggccctgctgagccccctgagcctggcccagtacgacagctggccccactaccccgagtacttccagcagcccgcccccgagtaccaccagccccaggcccccgccaacgtggccaagatccagctgagactggccggccagaagagaaagcacagcgagggcagagtggaggtgtactacgacggccagtggggcaccgtgtgcgacgacgacttcagcatccacgccgcccacgtggtgtgcagagagctgggctacgtggaggccaagagctggaccgccagcagcagctacggcaagggcgagggccccatctggctggacaacctgcactgcaccggcaacgaggccaccctggccgcctgcaccagcaacggctggggcgtgaccgactgcaagcacaccgaggacgtgggcgtggtgtgcagcgacaagagaatccccggcttcaagttcgacaacagcctgatcaaccagatcgagaacctgaacatccaggtggaggacatcagaatcagagccatcctgagcacctacagaaagagaacccccgtgatggagggctacgtggaggtgaaggagggcaagacctggaagcagatctgcgacaagcactggaccgccaagaacagcagagtggtgtgcggcatgttcggcttccccggcgagagaacctacaacaccaaggtgtacaagatgttcgccagcagaagaaagcagagatactggcccttcagcatggactgcaccggcaccgaggcccacatcagcagctgcaagctgggcccccaggtgagcctggaccccatgaagaacgtgacctgcgagaacggcctgcccgccgtggtgagctgcgtgcccggccaggtgttcagccccgacggccccagcagattcagaaaggcctacaagcccgagcagcccctggtgagactgagaggcggcgcctacatcggcgagggcagagtggaggtgctgaagaacggcgagtggggcaccgtgtgcgacgacaagtgggacctggtgagcgccagcgtggtgtgcagagagctgggcttcggcagcgccaaggaggccgtgaccggcagcagactgggccagggcatcggccccatccacctgaacgagatccagtgcaccggcaacgagaagagcatcatcgactgcaagttcaacgccgagagccagggctgcaaccacgaggaggacgccggcgtgagatgcaacacccccgccatgggcctgcagaagaagctgagactgaacggcggcagaaacccctacgagggcagagtggaggtgctggtggagagaaacggcagcctggtgtggggcatggtgtgcggccagaactggggcatcgtggaggccatggtggtgtgcagacagctgggcctgggcttcgccagcaacgccttccaggagacctggtactggcacggcgacgtgaacagcaacaaggtggtgatgagcggcgtgaagtgcagcggcaccgagctgagcctggcccactgcagacacgacggcgaggacgtggcctgcccccagggcggcgtgcagtacggcgccggcgtggcctgcagcgagaccgcccccgacctggtgctgaacgccgagatggtgcagcagaccacctacctggaggacagacccatgttcatgctgcagtgcgccatggaggagaactgcctgagcgccagcgccgcccagaccgaccccaccaccggctacagaagactgctgagattcagcagccagatccacaacaacggccagagcgacttcagacccaagaacggcagacacgcctggatctggcacgactgccacagacactaccacagcatggaggtgttcacccactacgacctgctgaacctgaacggcaccaaggtggccgagggccacaaggccagcttctgcctggaggacaccgagtgcgagggcgacatccagaagaactacgagtgcgccaacttcggcgaccagggcatcaccatgggctgctgggacatgtacagacacgacatcgactgccagtgggtggacatcaccgacgtgccccccggcgactacctgttccaggtggtgatcaaccccaacttcgaggtggccgagagcgactacagcaacaacatcatgaagtgcagaagcagatacgacggccacagaatctggatgtacaactgccacatcggcggcagcttcagcgaggagaccgagaagaagttcgagcacttcagcggcctgctgaacaaccagctgagcccccagtag

SEQ ID NO: 127524 - DNA, 456 bp, Artificial Sequence
  derived and/or modified sequence
atggagagacccctgtgcagccacctgtgcagctgcctggccatgctggccctgctgagccccctgagcctggcccagtacgacagctggccccactaccccgagtacttccagcagcccgcccccgagtaccaccagccccaggcccccgccaacgtggccaagatccagctgagactggccggccagaagagaaagcacagcgagggcagagtggaggtgtactacgacggccagtggggcaccgtgtgcgacgacgacttcagcatccacgccgcccacgtggtgtgcagagagctgggctacgtggaggccaagagctggaccgccagcagcagctacggcaagggcgagggccccatctggctggacaacctgcactgcaccggcaacgaggccaccctggccgcctgcaccagcaacggctggggcgtgaccgactgcaagcacacctag

SEQ ID NO: 127525 - DNA, 291 bp, Artificial Sequence
  derived and/or modified sequence
atggagagacccctgtgcagccacctgtgcagctgcctggccatgctggccctgctgagccccctgagcctggcccagtacgacagctggccccactaccccgagtacttccagcagcccgcccccgagtaccaccagccccaggcccccgccaacgtggccaagatccagctgagactggccggccagaagagaaagcacagcgagggcagagtggaggtgtactacgacggccagtggggcaccgtgtgcgacgacgacttcagcatccacgccgcccacgtggtgtag

SEQ ID NO: 127526 - DNA, 420 bp, Artificial Sequence
  derived and/or modified sequence
atggagagacccctgtgcagccacctgtgcagctgcctggccatgctggccctgctgagccccctgagcctggcccagtacgacagctggccccactaccccgagtacttccagcagcccgcccccgagtaccaccagccccaggcccccgccaacgtggccaagatccagctgagactggccggccagaagagaaagcacagcgagggcagagtggaggtgtactacgacggccagtggggcaccgtgtgcgacgacgacttcagcatccacgccgcccacgtggtgtgcagagagctgggctacgtggaggccaagagctggaccgccagcagcagctacggcaagggcgagggccccatctggctggacaacctgcactgcaccggcaacgaggccaccctggccgcctgcacctag

SEQ ID NO: 127527 - protein, 683 aa, Artificial Sequence
  derived and/or modified sequence
MAAAVAAPLAAGGEEAAATTSVPGSPGLPGRRSAERALEEAVATGTLNLSNRRLKHFPRGAARSYDLSDITQADLSRNRFPEVPEAACQLVSLEGLSLYHNCLRCLNPALGNLTALTYLNLSRNQLSLLPPYICQLPLRVLIVSNNKLGALPPDIGTLGSLRQLDVSSNELQSLPSELCGLSSLRDLNVRRNQLSTLPEELGDLPLVRLDFSCNRVSRIPVSFCRLRHLQVILLDSNPLQSPPAQVCLKGKLHIFKYLSTEAGQRGSALGDLAPSRPPSFSPCPAEDLFPGHRYDGGLDSGFHSVDSGSKRWSGNESTDEFSELSFRISELAREPRGPRERKEDGSADGDPVQIDFIDSHVPGEDEERGTVEEQRPPELSPGAGDRERAPSSRREEPAGEERRRPDTLQLWQERERRQQQQSGAWGAPRKDSLLKPGLRAVVGGAAAVSTQAMHNGSPKSSASQAGAAAGQGAPAPAPASQEPLPIAGPATAPAPRPLGSIQRPNSFLFRSSSQSGSGPSSPDSVLRPRRYPQVPDEKDLMTQLRQVLESRLQRPLPEDLAEALASGVILCQLANQLRPRSVPFIHVPSPAVPKLSALKARKNVESFLEACRKMGVPEADLCSPSDLLQGTARGLRTALEAVKRVGGKALPPLWPPSGLGGFVVFYVVLMLLLYVTYTRLLGS

SEQ ID NO: 127528 - protein, 142 aa, Artificial Sequence [sequence omitted]

SEQ ID NO: 127529 - DNA, 429 bp, Artificial Sequence
  derived and/or modified sequence
atgacccagctgagacaggtgctggagagcagactgcagagacccctgcccgaggacctggccagactgtggcccgtggtgatcctgtgccagctggccaaccagctgagacccagaagcgtgcccttcatccacgtgcccagccccgccgtgcccaagctgagcgccctgaaggccagaaagaacgtggagagcttcctggaggcctgcagaaagatgggcgtgcccgaggccgacctgtgcagccccagcgacctgctgcagggcaccgccagaggcctgagaaccgccctggaggccgtgaagagagtgggcggcaaggccctgccccccctgtggccccccagcggcctgggcggcttcgtggtgttctacgtggtgctgatgctgctgctgtacgtgacctacaccagactgctgggcagctag

SEQ ID NO: 127530 - DNA, 2052 bp, Artificial Sequence
  derived and/or modified sequence
atggccgctgccgttgccgctcctctggctgctggcggggaggaagctgccgccaccacttcggtccccgggtcccctggcctaccgggcagacggagtgctgaaagggccctggaagaagccgtggcgaccggtactttaaacctttcgaataggcgcctaaaacactttccacgcggcgccgcccggtcatacgacctttcagacatcacccaggcggatctctccaggaatcgcttcccggaggtgcccgaggctgcctgccagctcgtatccctggagggactatccctgtaccacaattgccttcgttgcctcaaccctgcactgggaaatcttacagctctgacttacttgaacttgtctcgcaaccagctgtccctgttgcccccctatatctgtcagctgccactgcgggtgctgatcgtcagcaataacaaattgggagcactgccccccgacatagggaccctcggaagcctgaggcagttagacgtctcatcaaacgagcttcagtccctgccctctgaactgtgtggcctgtcaagccttcgcgacctcaacgtaagaagaaaccagctttcaaccctgccagaggaactgggggatcttcctctggtgcggctcgatttctcttgcaaccgcgtctcccgtattcctgtatctttctgcagacttaggcatctgcaagtcatactgctcgactcgaaccctcttcaaagtccgccagcccaggtgtgtctgaagggaaaactgcacatttttaagtacctcagtacagaagctggccagcggggctctgctctcggagaccttgctccatctcggcctccatctttcagtccttgccctgccgaagacctgttccccgggcaccgctacgacggaggattggatagcgggttccactctgtggacagcggcagcaagcgctggagcggcaacgagagtaccgacgaattctcagaacttagtttcaggatatcggaactggctagggagcctagaggcccaagggagcggaaagaagacggctctgccgatggggaccctgtgcaaatcgatttcatcgactcccatgtcccgggggaagacgaggaaaggggcacagtcgaggagcagagaccaccagagctgagtccgggggcaggcgaccgggaaagagctccttcgtctcgccgggaagagcctgccggggaagaaagacggcggcccgatactctgcagctgtggcaggagagggagaggcgacagcaacagcagagcggtgcatggggggcacctagaaaagactctttactgaaacctgggcttagagccgtggtgggcggggcagctgccgtaagtacacaagccatgcataatgggtctcctaagagttctgcatcacaggctggggccgccgctggccagggggctcccgctccagccccagcttcccaagagcctctgcctattgctggccccgccacagcacccgcaccacggcccctcggaagcatccagcgacccaattcctttctgtttaggtcatcttcccaaagcgggtctggaccatccagccccgactcagtgctgaggcctcgtaggtacccccaggtacccgacgagaaggacctgatgacccagctgagacaagtccttgagagccgcctgcagcggccactgccagaggatttagctgaggcgctggcatcgggagtgattttatgtcagttagccaaccagcttcggcctaggagtgttccctttatccacgtgccttcccctgcggttcccaagctctctgcgctgaaagctcgcaaaaacgtggagagtttccttgaagcatgtcgcaagatgggcgtgccagaagccgatctgtgctctcccagcgacctactacagggcaccgctcgcggtctgcgaaccgccctggaagcagtgaagcgcgtgggcggaaaggccttgcctcctttatggccaccgagcggactcggaggattcgtggtattttatgttgtgctcatgctcctcctctatgtcacttacactcgcctactcggcagctag

SEQ ID NO: 127531 - DNA, 429 bp, Artificial Sequence
  derived and/or modified sequence
atgacgcagctgcggcaagtccttgaatcccgcctccagagaccactgcccgaagacttggcacgtctttggcccgtggtaattctctgtcagctcgctaaccagctaaggcctcgctccgtgccattcatccatgtgccgagccccgccgtgccaaagctctccgcgttaaaggccagaaagaacgttgagagctttctggaggcgtgtcgcaagatgggcgttcctgaggctgacctgtgtagcccctcagatttgctgcaggggacggctcgtgggttacgaaccgccctggaggcagtcaagcgtgtgggcgggaaagccctcccccctctttggcctcccagtgggctggggggcttcgtcgtgttctatgtcgttctcatgctgttgctctatgtgacatacaccagacttcttgggagttag

SEQ ID NO: 127532 - DNA, 2052 bp, Artificial Sequence
  derived and/or modified sequence
atggctgctgctgtggccgcccccctggccgccggcggggaggaggccgccgccaccacctctgtgcccggcagccctggcctgcctggaagaagatctgctgagcgggccctggaggaggccgtggccaccggcaccctgaacctgagcaacagaaggctgaagcacttccccagaggagctgcccggagctatgacctgagtgacatcacccaggccgacctgagcaggaaccgcttccctgaggtgcctgaggccgcctgccagctggtgtccctggagggcctgagcctgtaccacaactgcctgcgctgcctgaacccagccctgggcaacctgacagccctgacctacctgaacctgagcaggaaccagctgagcctgctgcccccctacatctgccagctgcccctgcgggtgctgattgtgagcaacaacaagctgggcgccctgcccccagacatcggcaccctgggcagcctgcggcagctggatgtgagcagcaatgagctgcagagcctgcccagcgagctgtgtggcctgagcagcctgcgggacctgaatgtgagaagaaaccagctgagcaccctgcctgaggagctgggggacctgcccctggtgcggctggacttcagctgcaacagagtgagccgcatccctgtgtccttctgccgcctgcggcacctgcaggtgatcctgctggacagcaaccccctgcagagccccccagcccaggtgtgcctgaagggcaagctgcacatcttcaagtacctgagcacagaggccggccagaggggcagcgccctgggggacctggcccccagcaggcctccttccttcagcccctgcccagctgaggacctcttccctggccacagatatgatggcggcctggacagcggcttccacagcgtggacagcggcagcaagcgctggagcggaaatgaaagcacagatgagttcagcgagctgtccttccgcatcagcgagctggcccgggagccccggggcccccgggagaggaaagaagatggcagcgcagatggagaccctgtgcagattgacttcatcgacagccacgtgcctggagaagatgaggagcggggcaccgtggaggagcagaggcctcctgagctgagccctggagctggggaccgggagcgggcccccagcagcagaagagaggagcctgctggggaggagaggagaagaccagacaccctgcagctgtggcaggagcgggagcggcggcagcagcagcagagcggggcctggggcgcccccaggaaggacagcctgctgaagccaggcctgcgggctgtggtgggcggcgctgctgctgtgtccacccaggccatgcacaacggcagccccaagagcagcgccagccaggccggggctgctgctggccagggcgccccagccccagccccagccagccaggagcccctgcccatcgccggccctgccacagccccagccccccggcccctgggcagcatccagaggcccaacagcttcctgttccgcagcagcagccagagcggcagcggccccagcagcccagacagcgtgctgcggccccggcgctacccccaggtgcctgatgagaaggacctgatgacccagctgcggcaggtgctggagagccggctgcagaggcccctgcctgaggacctggccgaggccctggccagcggggtcatcctgtgccagctggccaaccagctgcggcccaggtctgtgcccttcatccacgtgcccagccctgctgtgcccaagctgagcgccctgaaggccaggaagaatgtggagagcttcctggaggcctgcaggaagatgggcgtgcctgaggccgacctgtgcagccccagcgacctgctgcagggcacagcccggggcctgaggacagccctggaggccgtgaagagggtgggcggcaaggccctgccccccctgtggcccccatctggcctgggcggctttgtggtgttctacgtggtgctgatgctgctgctgtatgtgacctacacccggctgctgggcagctag

SEQ ID NO: 127533 - DNA, 429 bp, Artificial Sequence
  derived and/or modified sequence
atgacccagctgcggcaggtgctggagagccggctgcagaggcccctgcctgaggacctggcccggctgtggcctgtggtgatcctgtgccagctggccaaccagctgcggcccaggtctgtgcccttcatccacgtgcccagccctgctgtgcccaagctgagcgccctgaaggccaggaagaatgtggagagcttcctggaggcctgcaggaagatgggcgtgcctgaggccgacctgtgcagccccagcgacctgctgcagggcacagcccggggcctgaggacagccctggaggccgtgaagagggtgggcggcaaggccctgccccccctgtggccacccagcggcctgggcggctttgtggtgttctacgtggtgctgatgctgctgctgtatgtgacctacacccggctgctgggcagctag

SEQ ID NO: 127534 - DNA, 2052 bp, Artificial Sequence
  derived and/or modified sequence
atggccgccgccgtggccgcccccctggccgccggcggcgaggaggctgccgccactacgagcgtgcctggcagccctgggttacccggcagaagaagcgccgagcgggcactggaggaagccgtggccaccggcactttaaaccttagcaatcgccggctgaaacattttcccaggggcgctgctcgatcctatgatctgtcagatattacgcaagccgacttgtcgcgcaatcggtttcctgaagtgcccgaagctgcatgtcagcttgttagtctcgaagggctctccctgtatcataactgcctcagatgcctcaatccagcactcggcaacctcaccgcgctgacctacttgaatctctctaggaatcagctgtccttgctccctccatacatatgtcagctgcccctgcgggtgctgattgtatctaacaataaactgggggccttgccccctgatataggcaccctcggttcgctccgtcagctcgacgtaagtagcaacgagttgcagagcctgcccagtgagctgtgcggcttaagctctctccgggacctaaatgtgagaaggaatcaactgagtactctaccagaggaactgggagatttgcctctagtgcgcctggactttagctgcaatcgcgtttcccgcataccagtctctttttgtcgccttcgccacctacaagtgatccttctcgattcgaacccactgcagtctcctcccgcacaggtgtgtctaaagggcaagctgcatatcttcaaatatctctctaccgaagctgggcagcgtgggtcagctcttggtgacctggcaccttcccgaccacctagcttcagtccctgtccagctgaggatctttttcctggacatcggtacgatgggggcctggacagcggctttcatagcgttgatagtggttctaaacgctggagcggcaacgaatcgacagacgagttctctgagttgagttttagaataagcgagctggcacgtgagccacgcggccctcgtgaacgcaaggaagacggatctgccgacggcgatcccgtgcaaattgactttatcgatagccacgtacctggcgaggatgaggaacgcggcaccgtcgaagaacagaggcctcccgagttgtcccccggtgccggagaccgagagcgcgccccttcttcaaggcgggaagagccagccggagaggagcgccggaggcctgataccctgcagctatggcaggagagggagagaaggcaacaacaacagagtggagcctggggcgcccctcgaaaggactcactgttgaagcctggactgagagcagttgtggggggtgccgccgccgtcagcacccaggctatgcacaatggctcccctaaatcttccgcatctcaagctggcgcggctgctggccagggggcacccgcgcctgccccagcatcgcaggaaccactgcctattgccggccccgctaccgccccggctccaaggcctttaggaagcatccaacggcccaattctttcctgtttcggtctagttctcagagcgggagcggcccatccagtcccgactctgttcttcgaccccgcagatacccccaggtccctgacgagaaggaccttatgactcagttgcgccaggtgctcgagtcacggctgcagcggccactgcccgaagacctcgcggaggccctcgcatcaggtgtgatcctgtgccagcttgccaaccagttgcgccccagatcagtgcctttcatccatgtaccatctccagctgtgcctaagttgagcgccctcaaggcccgtaaaaacgtcgagtcttttctggaagcctgtaggaagatgggagtacctgaagctgacctgtgctccccttcagatctactccaggggactgcccggggactcaggactgccttggaggctgtaaaacgagtgggcggtaaagcgttgccacctttatggccaccaagcgggttggggggcttcgtcgtgttctatgttgtgcttatgctcctgctgtatgtcacctacactaggttgctgggatcctag

SEQ ID NO: 127535 - DNA, 429 bp, Artificial Sequence
  derived and/or modified sequence
atgacccagctgcggcaggtgctggagagccggctgcagcggcccttgccggaggaccttgcgagactgtggcctgtggtgatcctgtgccagctggcgaatcagctacgaccccgtagtgtgccatttatccacgtcccttcaccagctgttccaaaactgtcggccctaaaagcacgcaaaaacgtggaatctttcttggaggcctgccggaaaatgggagttcctgaggcagacctgtgctcaccttccgacctgctgcaggggaccgcacgaggcctcaggacagccttggaggccgtcaagcgggtaggtggaaaggccctgcctcccctctggccccccagtgggcttggtggtttcgttgtattctatgtggtcttgatgctacttctgtacgttacttataccaggttgctcgggagctag

SEQ ID NO: 127536 - DNA, 2052 bp, Artificial Sequence
  derived and/or modified sequence
atggctgcagctgtggcagcgcctctcgcagcagggggtgaagaggcagccgcaaccacctcagttcccggtagccccggtttacctggtaggcggagtgctgagagagctctggaggaagccgtcgctaccggcacattgaacctctctaatcgcagactgaaacacttccctcgtggcgctgctcggtcctatgatttgtcagatatcacgcaagccgatttatcacgtaatagattcccagaagtacccgaggccgcatgccaactggttagcctggagggcctgtcactctaccataactgcctaagatgtctcaaccctgcacttggaaatctgactgccttgacttacttgaacctgtctcgcaaccagctgagtctactgcccccatacatctgccaactgcccctgcgggtactgatcgtgtcaaataataagcttggcgctctcccacccgatataggtactcttgggtccctgagacagctagatgtgtctagcaatgagctgcagagtttgccaagtgagctgtgcggcctcagctcgttacgagacctaaacgtccgcagaaatcaattgagcaccctccctgaagagctgggggatcttcctcttgtccgtctggatttcagttgtaatcgagtgtcccgtatccccgtcagtttttgccgcctcagacacttgcaggttattcttctcgactcaaaccctcttcagagccctcctgctcaggtatgtttgaagggtaaactccacattttcaagtatctttcaacagaagcgggacagagaggttctgccctgggggatctcgctccttccagacccccatcattttcaccatgccctgctgaagatctgtttccgggtcaccggtacgacggtgggctggactctggattccactcagttgacagcggcagcaagcgctggagtggcaacgagtccaccgatgaatttagtgagctcagtttccgcatcagcgaactagccagggagccccgaggtccaagagagcggaaggaggatggatcagcggacggggaccccgtgcagatcgactttattgacagtcatgtcccgggagaggatgaggaacggggtacagttgaggagcagagaccacctgagctgtctcctggggcaggtgaccgcgaacgggctcctagttctcgacgggaggagcctgctggcgaagagcgaagaaggcccgacacgttgcagctgtggcaggagcgtgaacggagacaacagcagcagagcggcgcatggggagctcccagaaaagattctctgctcaaaccagggctcagagccgttgtgggaggggcagctgccgtcagcacccaggctatgcataatggcagtcccaagtcctcagcctcacaggccggtgctgctgccggacagggcgctccagcccctgcccctgcctcacaggagccactccctatagctggtccagcaaccgctcccgctccaaggcctctcggaagtattcagcgcccaaactccttcctctttaggtctagctcccaaagtgggagtggaccctcttcccccgatagtgttttgcggccaaggagatacccacaagtgcccgatgagaaggatctcatgacgcagttgagacaggttctcgaaagcaggcttcaacgccctctgccggaagatctggcagaggccttagcatcaggagtgattctgtgtcagctggccaatcaactgaggccgaggtctgtcccattcatacatgtgccaagccctgccgttcccaagttgtcggctctgaaagccaggaagaacgtggagtcttttctggaagcatgcaggaagatgggcgtgccagaggctgatctgtgttctccgtccgatctcctccagggcacagccagaggattaagaaccgcactcgaggctgtgaaaagggtaggcggaaaagccctgccacctttatggccccctagcgggctgggaggtttcgtggtgttttacgtcgtacttatgctcctgctgtacgttacttacacacgactgctgggctcatag

SEQ ID NO: 127537 - DNA, 2098 bp, Artificial Sequence
  derived and/or modified sequence
ggggaatctcacagccctcacctacctcaacctcagccgaaaccagctgtcgctgctgccaccctacatctgccagctgcccctgagggtcctcatcgtcagcaacaacaagctgggagccctgccccctgacatcggcaccctgggaagcctgcgacagcttgacgtgagcagcaacgagctccaatccctgccctcggaactgtgtggcctctcttccctgcgggacctcaatgtccggaggaaccagctcagtacgctgcccgaagagctgggggacctccctctggtccgcctggatttctcctgtaaccgcgtctcccgaatcccagtctccttctgccgcctgaggcacctgcaggtcattctgctggacagcaaccctctgcagagtccacctgcccaggtctgcctgaaggggaaacttcacatcttcaagtatttgtccacagaggccgggcagcgtgggtcggccctgggggacctggccccttctcggcccccgagtttcagtccctgccctgcagaggatctatttccgggacatcggtacgatggtgggctggactcaggcttccacagcgttgatagtggcagcaagaggtggtctggaaatgagtcaacagatgaattttcagagctgtcattccggatctcagagctggcccgggagccccggggacccagagaacgcaaggaggatggctcagcggacggagaccctgtgcagattgacttcatcgacagccatgtccccggggaggatgaagagcgaggcactgtggaggagcagcgaccacccgaattaagccctggggcaggggacagggagagggcaccaagcagcaggcgggaggagccggcaggggaggagcggcggcgcccggacaccttgcagctgtggcaggagcgggaacggcggcagcagcagcagagcggggcgtggggggccccgaggaaggatagcggctcgcctaagtccagtgcctcccaagcaggggctgcagcggggcagggagcccccgcccctgcccctgcctcccaagagccccttcccatagctggaccagcgacagcacctgctccacggccacttggctccattcagagaccaaacagcttcctcttccgttcctcctctcagagtggctcaggcccttcctcaccagactctgtcctgagacctcggcggtacccccaggttccagatgagaaggacttaatgactcagctgcgccaggtccttgagtcccggctgcagcggcccctgcctgaggacctggccaggctctggccagtggtcatcctgtgccagctggccaaccagctacggccgcgctccgtgcccttcatccatgtgccctcccctgctgtgccaaaactcagtgccctcaaggctcggaagaatgtggagagttttctagaagcctgtcgaaaaatgggggtgcctgaggctgacctgtgctcgccctcggatctcctccagggcactgcccgggggctgcggaccgcgctggaggccgtgaagcgggtggggggcaaggccctaccgcccctctggcccccctctggtctgggcggcttcgtcgtcttctacgtggtcctcatgctgctgctctatgtcacctacactcggctcctgggttcctaggccccaaaatcggccctccctcacccctttcccttcctctctatttataaggtccctgctccacccgaccccacctgcggtgccttcagccccaaccaaagacactagtgcacccccttcacagacactgacctcagaggccccactctggtgcccccagaccctgggcccccagcctctggcctccctccagtagccccacgagtccccacctctcagtgctgacggtgccttcatgtccccgccggccctgcccctgccctctgtaccccgtgaggggtggcaggagctggagtctcccccttcctcctgtgccctccccttccccccccaacagctgctatgggggggctaaattatctctattttgtagagaggatctatatttgtaggggttcggggcccaggccgggtccctatctctgtgtataaactgtacagaccgtg

SEQ ID NO: 127538 - DNA, 429 bp, Artificial Sequence
  derived and/or modified sequence
atgacccagcttcggcaggtccttgagtccagattgcaacgccctctccccgaggatttggcgaggctttggccagttgtgatcctctgtcagcttgccaatcagctgagacctcgatcggtgccattcattcatgtgcccagcccggctgtcccaaagcttagtgcactcaaggctaggaagaatgttgagtcgtttcttgaggcttgtcgtaagatgggcgtgcccgaggcggacttgtgctcaccgtctgatctgctgcaaggaacggctagaggcctgcgtaccgcactggaagctgtaaagcgggtgggcggaaaagcccttcccccattatggccaccttccggattgggcggttttgtcgtgttctatgtggtgctgatgttgcttctgtatgttacttatactcggctgttggggtcttag

SEQ ID NO: 127539 - DNA, 2552 bp, Artificial Sequence
  derived and/or modified sequence
gaaggagggacggccggtcccgtcagtcaggcagcgggagccgccgggagcggatggcggcggccgtagcggctccactcgccgccgggggtgaggaggcggcagccacgacctccgtgcccgggtctccaggtctgccggggagacgcagtgcagagcgggccctagaggaggccgtggccaccgggaccctgaacctgtctaaccggcgcttgaagcacttcccccggggcgcggcccgtagctacgacctgtcagacatcacccaggctgacctgtcccggaaccggtttcccgaggtgcccgaggcggcgtgccagctggtgtccctggagggcctgagcctctaccacaattgcctgagatgcctgaacccagccttggggaatctcacagccctcacctacctcaacctcagccgaaaccagctgtcgctgctgccaccctacatctgccagctgcccctgagggtcctcatcgtcagcaacaacaagctgggagccctgccccctgacatcggcaccctgggaagcctgcgacagcttgacgtgagcagcaacgagctccaatccctgccctcggaactgtgtggcctctcttccctgcgggacctcaatgtccggaggaaccagctcagtacgctgcccgaagagctgggggacctccctctggtccgcctggatttctcctgtaaccgcgtctcccgaatcccagtctccttctgccgcctgaggcacctgcaggtcattctgctggacagcaaccctctgcagagtccacctgcccaggtctgcctgaaggggaaacttcacatcttcaagtatttgtccacagaggccgggcagcgtgggtcggccctgggggacctggccccttctcggcccccgagtttcagtccctgccctgcagaggatctatttccgggacatcggtacgatggtgggctggactcaggcttccacagcgttgatagtggcagcaagaggtggtctggaaatgagtcaacagatgaattttcagagctgtcattccggatctcagagctggcccgggagccccggggacccagagaacgcaaggaggatggctcagcggacggagaccctgtgcagattgacttcatcgacagccatgtccccggggaggatgaagagcgaggcactgtggaggagcagcgaccacccgaattaagccctggggcaggggacagggagagggcaccaagcagcaggcgggaggagccggcaggggaggagcggcggcgcccggacaccttgcagctgtggcaggagcgggaacggcggcagcagcagcagagcggggcgtggggggccccgaggaaggatagcctcttgaagccagggctcagggctgttgtgggaggggccgccgccgtgtccactcaagccatgcacaacggctcgcctaagtccagtgcctcccaagcaggggctgcagcggggcagggagcccccgcccctgcccctgcctcccaagagccccttcccatagctggaccagcgacagcacctgctccacggccacttggctccattcagagaccaaacagcttcctcttccgttcctcctctcagagtggctcaggcccttcctcaccagactctgtcctgagacctcggcggtacccccaggttccagatgagaaggacttaatgactcagctgcgccaggtccttgagtcccggctgcagcggcccctgcctgaggacctggccgaggctctggccagtggggtcatcctgtgccagctggccaaccagctacggccgcgctccgtgcccttcatccatgtgccctcccctgctgtgccaaaactcagtgccctcaaggctcggaagaatgtggagagttttctagaagcctgtcgaaaaatgggggtgcctgaggctgacctgtgctcgccctcggatctcctccagggcactgcccgggggctgcggaccgcgctggaggccgtgaagcgggtggggggcaaggccctaccgcccctctggcccccctctggtctgggcggcttcgtcgtcttctacgtggtcctcatgctgctgctctatgtcacctacactcggctcctgggttcctaggccccaaaatcggccctccctcacccctttcccttcctctctatttataaggtccctgctccacccgaccccacctgcggtgccttcagccccaaccaaagacactagtgcacccccttcacagacactgacctcagaggccccactctggtgcccccagaccctgggcccccagcctctggcctccctccagtagccccacgagtccccacctctcagtgctgacggtgccttcatgtccccgccggccctgcccctgccctctgtaccccgtgaggggtggcaggagctggagtctcccccttcctcctgtgccctccccttccccccccaacagctgctatgggggggctaaattatctctattttgtagagaggatctatatttgtaggggttcggggcccaggccgggtccctatctctgtgtataaactgtacagaccgtg

SEQ ID NO: 127540 - DNA, 2052 bp, Artificial Sequence
  derived and/or modified sequence
atggccgccgccgtggccgcccccctggccgccggcggcgaggaggccgccgccaccaccagcgtgcccggcagccccggcctgcccggcagaagaagcgccgagagagccctggaggaggccgtggccaccggcaccctgaacctgagcaacagaagactgaagcacttccccagaggcgccgccagaagctacgacctgagcgacatcacccaggccgacctgagcagaaacagattccccgaggtgcccgaggccgcctgccagctggtgagcctggagggcctgagcctgtaccacaactgcctgagatgcctgaaccccgccctgggcaacctgaccgccctgacctacctgaacctgagcagaaaccagctgagcctgctgcccccctacatctgccagctgcccctgagagtgctgatcgtgagcaacaacaagctgggcgccctgccccccgacatcggcaccctgggcagcctgagacagctggacgtgagcagcaacgagctgcagagcctgcccagcgagctgtgcggcctgagcagcctgagagacctgaacgtgagaagaaaccagctgagcaccctgcccgaggagctgggcgacctgcccctggtgagactggacttcagctgcaacagagtgagcagaatccccgtgagcttctgcagactgagacacctgcaggtgatcctgctggacagcaaccccctgcagagcccccccgcccaggtgtgcctgaagggcaagctgcacatcttcaagtacctgagcaccgaggccggccagagaggcagcgccctgggcgacctggcccccagcagaccccccagcttcagcccctgccccgccgaggacctgttccccggccacagatacgacggcggcctggacagcggcttccacagcgtggacagcggcagcaagagatggagcggcaacgagagcaccgacgagttcagcgagctgagcttcagaatcagcgagctggccagagagcccagaggccccagagagagaaaggaggacggcagcgccgacggcgaccccgtgcagatcgacttcatcgacagccacgtgcccggcgaggacgaggagagaggcaccgtggaggagcagagaccccccgagctgagccccggcgccggcgacagagagagagcccccagcagcagaagagaggagcccgccggcgaggagagaagaagacccgacaccctgcagctgtggcaggagagagagagaagacagcagcagcagagcggcgcctggggcgcccccagaaaggacagcctgctgaagcccggcctgagagccgtggtgggcggcgccgccgccgtgagcacccaggccatgcacaacggcagccccaagagcagcgccagccaggccggcgccgccgccggccagggcgcccccgcccccgcccccgccagccaggagcccctgcccatcgccggccccgccaccgcccccgcccccagacccctgggcagcatccagagacccaacagcttcctgttcagaagcagcagccagagcggcagcggccccagcagccccgacagcgtgctgagacccagaagatacccccaggtgcccgacgagaaggacctgatgacccagctgagacaggtgctggagagcagactgcagagacccctgcccgaggacctggccgaggccctggccagcggcgtgatcctgtgccagctggccaaccagctgagacccagaagcgtgcccttcatccacgtgcccagccccgccgtgcccaagctgagcgccctgaaggccagaaagaacgtggagagcttcctggaggcctgcagaaagatgggcgtgcccgaggccgacctgtgcagccccagcgacctgctgcagggcaccgccagaggcctgagaaccgccctggaggccgtgaagagagtgggcggcaaggccctgccccccctgtggccccccagcggcctgggcggcttcgtggtgttctacgtggtgctgatgctgctgctgtacgtgacctacaccagactgctgggcagctag

SEQ ID NO: 127541 - protein, 4544 aa, Artificial Sequence
  derived and/or modified sequence
MLTPPLLLLLPLLSALVAAAIDAPKTCSPKQFACRDQITCISKGWRCDGERDCPDGSDEAPEICPQSKAQRCQPNEHNCLGTELCVPMSRLCNGVQDCMDGSDEGPHCRELQGNCSRLGCQHHCVPTLDGPTCYCNSSFQLQADGKTCKDFDECSVYGTCSQLCTNTDGSFICGCVEGYLLQPDNRSCKAKNEPVDRPPVLLIANSQNILATYLSGAQVSTITPTSTRQTTAMDFSYANETVCWVHVGDSAAQTQLKCARMPGLKGFVDEHTINISLSLHHVEQMAIDWLTGNFYFVDDIDDRIFVCNRNGDTCVTLLDLELYNPKGIALDPAMGKVFFTDYGQIPKVERCDMDGQNRTKLVDSKIVFPHGITLDLVSRLVYWADAYLDYIEVVDYEGKGRQTIIQGILIEHLYGLTVFENYLYATNSDNANAQQKTSVIRVNRFNSTEYQVVTRVDKGGALHIYHQRRQPRVRSHACENDQYGKPGGCSDICLLANSHKARTCRCRSGFSLGSDGKSCKKPEHELFLVYGKGRPGIIRGMDMGAKVPDEHMIPIENLMNPRALDFHAETGFIYFADTTSYLIGRQKIDGTERETILKDGIHNVEGVAVDWMGDNLYWTDDGPKKTISVARLEKAAQTRKTLIEGKMTHPRAIVVDPLNGWMYWTDWEEDPKDSRRGRLERAWMDGSHRDIFVTSKTVLWPNGLSLDIPAGRLYWVDAFYDRIETILLNGTDRKIVYEGPELNHAFGLCHHGNYLFWTEYRSGSVYRLERGVGGAPPTVTLLRSERPPIFEIRMYDAQQQQVGTNKCRVNNGGCSSLCLATPGSRQCACAEDQVLDADGVTCLANPSYVPPPQCQPGEFACANSRCIQERWKCDGDNDCLDNSDEAPALCHQHTCPSDRFKCENNRCIPNRWLCDGDNDCGNSEDESNATCSARTCPPNQFSCASGRCIPISWTCDLDDDCGDRSDESASCAYPTCFPLTQFTCNNGRCININWRCDNDNDCGDNSDEAGCSHSCSSTQFKCNSGRCIPEHWTCDGDNDCGDYSDETHANCTNQATRPPGGCHTDEFQCRLDGLCIPLRWRCDGDTDCMDSSDEKSCEGVTHVCDPSVKFGCKDSARCISKAWVCDGDNDCEDNSDEENCESLACRPPSHPCANNTSVCLPPDKLCDGNDDCGDGSDEGELCDQCSLNNGGCSHNCSVAPGEGIVCSCPLGMELGPDNHTCQIQSYCAKHLKCSQKCDQNKFSVKCSCYEGWVLEPDGESCRSLDPFKPFIIFSNRHEIRRIDLHKGDYSVLVPGLRNTIALDFHLSQSALYWTDVVEDKIYRGKLLDNGALTSFEVVIQYGLATPEGLAVDWIAGNIYWVESNLDQIEVAKLDGTLRTTLLAGDIEHPRAIALDPRDGILFWTDWDASLPRIEAASMSGAGRRTVHRETGSGGWPNGLTVDYLEKRILWIDARSDAIYSARYDGSGHMEVLRGHEFLSHPFAVTLYGGEVYWTDWRTNTLAKANKWTGHNVTVVQRTNTQPFDLQVYHPSRQPMAPNPCEANGGQGPCSHLCLINYNRTVSCACPHLMKLHKDNTTCYEFKKFLLYARQMEIRGVDLDAPYYNYIISFTVPDIDNVTVLDYDAREQRVYWSDVRTQAIKRAFINGTGVETVVSADLPNAHGLAVDWVSRNLFWTSYDTNKKQINVARLDGSFKNAVVQGLEQPHGLVVHPLRGKLYWTDGDNISMANMDGSNRTLLFSGQKGPVGLAIDFPESKLYWISSGNHTINRCNLDGSGLEVIDAMRSQLGKATALAIMGDKLWWADQVSEKMGTCSKADGSGSVVLRNSTTLVMHMKVYDESIQLDHKGTNPCSVNNGDCSQLCLPTSETTRSCMCTAGYSLRSGQQACEGVGSFLLYSVHEGIRGIPLDPNDKSDALVPVSGTSLAVGIDFHAENDTIYWVDMGLSTISRAKRDQTWREDVVTNGIGRVEGIAVDWIAGNIYWTDQGFDVIEVARLNGSFRYVVISQGLDKPRAITVHPEKGYLFWTEWGQYPRIERSRLDGTERVVLVNVSISWPNGISVDYQDGKLYWCDARTDKIERIDLETGENREVVLSSNNMDMFSVSVFEDFIYWSDRTHANGSIKRGSKDNATDSVPLRTGIGVQLKDIKVFNRDRQKGTNVCAVANGGCQQLCLYRGRGQRACACAHGMLAEDGASCREYAGYLLYSERTILKSIHLSDERNLNAPVQPFEDPEHMKNVIALAFDYRAGTSPGTPNRIFFSDIHFGNIQQINDDGSRRITIVENVGSVEGLAYHRGWDTLYWTSYTTSTITRHTVDQTRPGAFERETVITMSGDDHPRAFVLDECQNLMFWTNWNEQHPSIMRAALSGANVLTLIEKDIRTPNGLAIDHRAEKLYFSDATLDKIERCEYDGSHRYVILKSEPVHPFGLAVYGEHIFWTDWVRRAVQRANKHVGSNMKLLRVDIPQQPMGIIAVANDTNSCELSPCRINNGGCQDLCLLTHQGHVNCSCRGGRILQDDLTCRAVNSSCRAQDEFECANGECINFSLTCDGVPHCKDKSDEKPSYCNSRRCKKTFRQCSNGRCVSNMLWCNGADDCGDGSDEIPCNKTACGVGEFRCRDGTCIGNSSRCNQFVDCEDASDEMNCSATDCSSYFRLGVKGVLFQPCERTSLCYAPSWVCDGANDCGDYSDERDCPGVKRPRCPLNYFACPSGRCIPMSWTCDKEDDCEHGEDETHCNKFCSEAQFECQNHRCISKQWLCDGSDDCGDGSDEAAHCEGKTCGPSSFSCPGTHVCVPERWLCDGDKDCADGADESIAAGCLYNSTCDDREFMCQNRQCIPKHFVCDHDRDCADGSDESPECEYPTCGPSEFRCANGRCLSSRQWECDGENDCHDQSDEAPKNPHCTSQEHKCNASSQFLCSSGRCVAEALLCNGQDDCGDSSDERGCHINECLSRKLSGCSQDCEDLKIGFKCRCRPGFRLKDDGRTCADVDECSTTFPCSQRCINTHGSYKCLCVEGYAPRGGDPHSCKAVTDEEPFLIFANRYYLRKLNLDGSNYTLLKQGLNNAVALDFDYREQMIYWTDVTTQGSMIRRMHLNGSNVQVLHRTGLSNPDGLAVDWVGGNLYWCDKGRDTIEVSKLNGAYRTVLVSSGLREPRALVVDVQNGYLYWTDWGDHSLIGRIGMDGSSRSVIVDTKITWPNGLTLDYVTERIYWADAREDYIEFASLDGSNRHVVLSQDIPHIFALTLFEDYVYWTDWETKSINRAHKTTGTNKTLLISTLHRPMDLHVFHALRQPDVPNHPCKVNNGGCSNLCLLSPGGGHKCACPTNFYLGSDGRTCVSNCTASQFVCKNDKCIPFWWKCDTEDDCGDHSDEPPDCPEFKCRPGQFQCSTGICTNPAFICDGDNDCQDNSDEANCDIHVCLPSQFKCTNTNRCIPGIFRCNGQDNCGDGEDERDCPEVTCAPNQFQCSITKRCIPRVWVCDRDNDCVDGSDEPANCTQMTCGVDEFRCKDSGRCIPARWKCDGEDDCGDGSDEPKEECDERTCEPYQFRCKNNRCVPGRWQCDYDNDCGDNSDEESCTPRPCSESEFSCANGRCIAGRWKCDGDHDCADGSDEKDCTPRCDMDQFQCKSGHCIPLRWRCDADADCMDGSDEEACGTGVRTCPLDEFQCNNTLCKPLAWKCDGEDDCGDNSDENPEECARFVCPPNRPFRCKNDRVCLWIGRQCDGTDNCGDGTDEEDCEPPTAHTTHCKDKKEFLCRNQRCLSSSLRCNMFDDCGDGSDEEDCSIDPKLTSCATNASICGDEARCVRTEKAAYCACRSGFHTVPGQPGCQDINECLRFGTCSQLCNNTKGGHLCSCARNFMKTHNTCKAEGSEYQVLYIADDNEIRSLFPGHPHSAYEQAFQGDESVRIDAMDVHVKAGRVYWTNWHTGTISYRSLPPAAPPTTSNRHRRQIDRGVTHLNISGLKMPRGIAIDWVAGNVYWTDSGRDVIEVAQMKGENRKTLISGMIDEPHAIVVDPLRGTMYWSDWGNHPKIETAAMDGTLRETLVQDNIQWPTGLAVDYHNERLYWADAKLSVIGSIRLNGTDPIVAADSKRGLSHPFSIDVFEDYIYGVTYINNRVFKIHKFGHSPLVNLTGGLSHASDVVLYHQHKQPEVTNPCDRKKCEWLCLLSPSGPVCTCPNGKRLDNGTCVPVPSPTPPPDAPRPGTCNLQCFNGGSCFLNARRQPKCRCQPRYTGDKCELDQCWEHCRNGGTCAASPSGMPTCRCPTGFTGPKCTQQVCAGYCANNSTCTVNQGNQPQCRCLPGFLGDRCQYRQCSGYCENFGTCQMAADGSRQCRCTAYFEGSRCEVNKCSRCLEGACVVNKQSGDVTCNCTDGRVAPSCLTCVGHCSNGGSCTMNSKMMPECQCPPHMTGPRCEEHVFSQQQPGHIASILIPLLLLLLLVLVAGVVFWYKRRVQGAKGFQHQRMTNGAMNVEIGNPTYKMYEGGEPDDVGGLLDADFALDPDKPTNFTNPVYATLYMGGHGSRHSLASTDEKRELLGRGPEDEIGDPLA

SEQ ID NO: 127542 - DNA, 13635 bp, Artificial Sequence
  derived and/or modified sequence
atgcttaccccacccctgctgctactacttccattgctgtctgctctggtcgctgccgctatcgatgcccccaaaacctgttcccctaagcagtttgcttgccgggaccagatcacctgtatcagcaaaggctggagatgcgacggagagagggactgtccagatggatccgacgaggcgccggaaatatgcccacagagtaaggcccaaaggtgtcagcctaatgagcataattgcttggggactgaactgtgcgtgcccatgtctagactgtgtaacggggtgcaggattgtatggacggcagtgatgaaggtccccattgtcgcgagctccagggaaattgctctcggctgggctgtcaacaccattgcgttcctacccttgacggccccacctgctactgtaattcttcctttcagctgcaggcagacggaaagacctgtaaagatttcgacgagtgtagtgtttatggtacatgctcccagctttgcacaaacaccgatggctcctttatctgtggatgcgtcgaggggtaccttctgcagccagataaccggtcatgtaaagctaaaaacgagcccgtggatagacctccagttcttctgatcgcaaactcccagaatatactagctacctacctcagcggggcccaggtctcaactatcacccctacttcaacccggcagaccacggcaatggatttttcatacgccaacgaaactgtgtgctgggtccacgtgggcgacagcgcagcccagacccagctcaagtgtgctaggatgccgggcctgaagggattcgttgacgagcatactatcaacatctctctcagcctgcaccacgtagaacagatggcgatagattggctgaccggaaatttctattttgtggacgacatagacgatcggatatttgtctgcaatcggaatggtgacacctgcgtgactctgcttgacctcgagttgtacaatcccaaagggatcgcgcttgatcccgctatgggcaaggtgttctttacagactacgggcagatccccaaagtcgaaaggtgcgatatggacggccagaaccgaacaaaactcgtcgactcgaagattgtgtttcctcacggcattacattggacttggtaagtagactggtgtactgggctgatgcctacctagattacatcgaggtggtcgattacgagggcaagggccgccagaccatcatccaggggatcctcatagaacacctgtacgggctcactgtctttgagaattatttatacgctaccaatagcgataatgccaatgcccaacagaaaacatccgtaatccgggtgaaccggtttaacagcactgagtatcaagtggtgacccgggtggataaaggcggtgctctacacatctatcaccagagacgtcaaccaagggtgcgttcgcacgcttgtgagaatgatcagtatggcaagccggggggatgctcagatatctgtctgctcgcaaactcccacaaggcacggacgtgtcggtgccgatccgggttcagcctcggaagtgacggaaaaagctgtaagaaacccgagcacgaacttttcctggtgtacggtaagggcagacccgggattatcagaggcatggacatgggtgctaaagtgcctgacgaacacatgattccaattgaaaacctcatgaatcctcgtgcactggacttccatgcggagacagggtttatatactttgcagacaccacttcttatcttattggcaggcagaaaattgacggcacagaacgggaaacaatccttaaggatgggattcacaatgtagaaggagtggcagtcgactggatgggcgataatctttactggaccgacgatggcccgaaaaagaccatctcagtggcccgactggagaaggccgcacagactaggaagaccctaatcgagggaaagatgacgcacccgagagcaatcgtggtggatccactcaacggatggatgtattggacagactgggaggaggatcccaaggactctcgacgcgggcgcttagagcgagcctggatggatggcagccatcgagacattttcgttacaagcaagacggtgctgtggccaaatggcctgagcttagacatccctgctggaaggctatattgggtggatgccttctatgacaggattgagaccatactgcttaacggaacagatcgaaaaatagtgtacgaaggaccagagcttaatcacgcctttggactttgccaccacggcaactatttattctggaccgaatacagaagtgggtcagtctatagattggagcgcggggtcgggggggcccccccaacagtgacactcttgcggtctgaacgccccccgatttttgagatcagaatgtatgacgcacaacagcaacaggttggcaccaataaatgtagagtgaacaacggtgggtgtagcagcctgtgcctggccactccaggctcacgccagtgtgcctgtgccgaggaccaggtactagacgcagacggagtcacatgtctcgccaatccttcttacgtgccgccgccacagtgccagcctggcgagttcgcctgtgccaacagcagatgtatccaagaaagatggaaatgcgatggcgataacgactgtttagacaattctgatgaagccccagcattgtgccatcagcatacatgcccatccgacagattcaagtgcgagaacaaccgctgcattcccaatcggtggctgtgtgatggagacaatgactgcggcaacagcgaagacgagagtaacgctacttgtagcgcgcgaacatgtccccccaaccagttttcctgtgcttcgggtcggtgtatccctatcagctggacatgcgatcttgacgatgattgcggggaccgctccgatgaatcagcctcctgtgcctatcctacatgctttcctctcacgcagttcacttgtaacaacgggagatgtataaacattaactggagatgtgataacgacaatgactgcggagacaactccgacgaggctggctgctcgcacagttgcagctccacgcagtttaaatgcaactccggcaggtgcatcccagagcattggacctgtgatggcgacaacgactgtggcgactacagcgatgagacacacgccaattgcaccaatcaggcaaccagaccaccaggggggtgtcacaccgatgaattccagtgtcggctagatggcctatgcattccgctcaggtggcgatgcgatggggatacagattgtatggattcttcagatgagaaatcgtgtgagggagtcacgcacgtctgcgatccttccgttaaattcggctgcaaggacagcgcgcgatgtatcagcaaagcatgggtttgtgatggtgacaacgactgtgaagacaattctgatgaggaaaattgtgagagtctggcgtgccgcccaccaagccatccctgtgccaataacacaagcgtgtgcttgcctccagataagctttgtgacggaaatgatgactgtggcgacgggtccgacgagggtgagctctgcgaccagtgttctctgaacaacgggggatgtagccataactgtagcgtagcccccggcgaaggcatcgtttgttcatgtcctctcggcatggagcttggccccgataatcacacgtgccaaatccagtcatattgcgctaaacacctcaagtgttcacaaaaatgcgaccagaataagttttcagtgaagtgtagctgctacgagggatgggtgctggaacccgatggcgagagctgcagatccctcgatccctttaagccctttattatatttagtaatcgacacgagatccggcgcatcgacctccataaaggagactacagcgttcttgtcccagggttacgcaacacaatagccctggattttcatctaagtcagagtgctctttattggactgacgtggtcgaagataagatctatcgaggcaaactgttggataatggcgccctcactagcttcgaggtggttatccagtatggccttgctaccccagagggactggctgtggattggattgccggtaacatttactgggtggaaagtaaccttgaccagatagaggtggcaaagctggatgggaccctgaggaccacgctcctagccggggacatcgaacacccaagagccatagctctcgaccccagggatggaatcttgttttggactgactgggacgcatcgctgcctcgaatcgaagctgcgagcatgtccggagccggaagacgtaccgtccaccgcgaaaccggatctggtggatggcctaacggactgactgtggattatctggagaaaaggatcctgtggattgatgcgcggagcgatgctatttattcagcccggtacgacggctccggacacatggaggtgctgcggggacacgagtttctttcgcaccctttcgccgtaaccctgtacggcggcgaggtctattggacagattggcgcaccaatacgcttgccaaggcaaataaatggaccggccacaatgtgacagtggtacaacgcacaaacacccagccgtttgacctccaggtgtatcacccatcaaggcaaccgatggcgcctaacccatgcgaagccaacggcggacagggaccatgcagccacctgtgtttgatcaactacaatagaaccgtgagctgtgcttgcccccacctcatgaaactgcataaggataataccacatgctatgaattcaagaagttcctgctctacgccagacaaatggagattcgcggcgtggatctagatgccccttactataattacatcatttccttcaccgttcccgatatagacaacgtgaccgtgctggactacgacgctagagaacagagagtgtactggagcgatgtgagaacgcaggcaatcaagagggcctttatcaacggaaccggggtcgaaacagtcgtctcagccgacctgcccaatgcacacggcctggctgttgactgggtgagtaggaatctgttctggacatcttacgacaccaacaagaagcagataaacgtggcaagacttgatggatcattcaagaatgcagtggtccagggcttagagcagccccatggcttagttgttcatccgctaaggggcaagctttattggaccgacggagacaatatttcaatggccaatatggacggatccaacaggacattgctctttagcggccagaaaggtcccgtaggattggctattgactttcctgaaagcaaactatattggattagctccgggaatcacacaatcaacagatgtaatctcgatgggtcagggctggaggtgatagatgccatgcgatcacagttaggcaaggcgactgctctggcaataatgggggataagctgtggtgggctgaccaggtgtctgaaaagatgggaacatgttccaaagccgacggctcaggttctgtagtgttaagaaactctaccacattagtcatgcatatgaaagtgtacgatgagagtatccagctggaccataaaggaacaaatccttgctccgtgaacaacggagattgttctcaactatgcctgcctacctcagagactacaaggagctgcatgtgtacagcgggctatagcttaaggtccggtcaacaggcctgcgaaggtgtgggttcctttttgctgtactccgttcacgaaggtattagaggcatacctctggaccccaacgataagtccgatgccttggtgccagtaagtggaaccagtctcgccgtgggaatcgatttccatgccgaaaacgacactatctattgggtcgatatgggcctttccacaattagtagggccaagagggaccaaacctggagggaagacgtggtcaccaacggaatcggaagggttgagggtattgccgtggattggatagctgggaacatctactggacagaccagggattcgacgtcattgaggttgccagactgaacgggagtttccgctacgtagtcatcagccaggggctcgacaaaccccgtgcaattacggtacaccctgagaaaggctacctcttttggaccgaatggggccagtaccccagaatcgagcgatcgcggttggacggaaccgagagagtggtgcttgtgaatgtgagcattagttggcctaatggaataagcgtggattatcaggacggtaagctctactggtgtgatgcacgaacggacaagatagagcggatcgatctcgagaccggagagaatagagaggtcgtcctgtctagcaataacatggatatgttctcagtgagtgtctttgaagactttatctattggagcgacagaacccacgcgaacggaagcatcaaacgtggaagcaaagacaacgcgacagacagcgtccccttgaggactgggattggagttcagctaaaagatattaaagtgttcaaccgggaccggcagaaaggaacaaatgtctgcgccgtggctaatggggggtgtcaacagctctgtctgtaccgcgggcgtggacagagagcctgcgcttgcgcacacggaatgctggcagaagatggagcatcttgtagggagtacgccggatatttgttatatagcgaacgcactatcctcaaaagtatccatttgtccgacgagcggaacctaaacgcccccgtgcagcctttcgaggatcccgaacacatgaagaacgtgatcgccctagcttttgactatcgggcaggtactagcccaggcaccccaaatagaatattcttttctgatatccattttgggaatatacagcagattaatgacgacggcagccggcggataaccatcgtggagaatgtgggcagcgttgagggcctggcatatcaccgcggttgggataccctttactggacttcctacacaacctccactatcacccgccacactgtggaccagacaagacccggagccttcgagcgcgaaacagttatcactatgtcaggagatgatcaccctagagcttttgtgctggatgaatgccagaacctgatgttttggaccaactggaatgaacagcaccctagtatcatgagggccgccctctccggcgctaacgtcctcaccctgattgagaaagatatccgcacaccaaatggccttgccattgatcaccgggcagagaagctgtatttctccgacgccactttggacaagatcgaaaggtgcgagtacgatggctcccataggtacgtcatcttaaagagcgaacccgtacatcctttcggcctagcagtgtatggcgaacatatcttctggaccgattgggtacggcgcgccgtgcagcgggctaataagcatgtgggaagcaatatgaaattactgagggtcgacatcccccagcagcctatggggataatcgcggtcgcgaacgataccaactcatgtgagctgagtccgtgcagaatcaataacggcggctgtcaggacctatgcctgctcactcaccaaggtcacgtgaactgcagctgtcgggggggacgaattctccaggatgatttaacttgcagagccgtgaactccagctgtcgcgcacaggacgaatttgaatgcgcgaatggagaatgtatcaatttctcgcttacctgtgatggagttccacattgcaaggataaaagtgacgagaagccgtcatattgcaattcccggagatgcaagaaaacttttcggcagtgttctaatggccggtgtgtgtctaatatgttatggtgcaacggcgccgacgactgcggagatggatccgatgaaattccgtgtaacaaaacggcatgtggggtgggggagttccgttgccgggatggcacatgcattggtaacagttcccgctgtaaccaattcgttgactgcgaggatgcctctgacgagatgaattgttccgccaccgattgcagtagttactttcggctaggcgtcaagggcgtgctcttccagccgtgcgaacgcacttccctgtgttacgccccatcctgggtgtgtgacggagctaacgactgcggtgattacagcgatgagcgagattgtcccggggttaagcggccccggtgcccccttaattactttgcttgcccttcaggcaggtgcatccccatgagctggacctgcgataaagaggacgattgtgagcacggcgaggatgaaacccactgcaataagttttgctctgaagcgcagtttgagtgtcaaaaccaccgctgcatctccaaacagtggttatgcgatggaagcgatgactgcggagatggtagtgacgaagcagcccactgtgagggcaagacttgtgggccatcaagttttagctgtcctggcacccacgtttgtgtgccagaacgctggctttgcgatggcgacaaggactgtgcagacggggcggatgaaagtattgccgcagggtgtttatacaactccacatgcgacgaccgagagtttatgtgccagaatcgccagtgtattcctaagcattttgtttgcgaccatgatagagactgtgcagatggatctgacgagtcgcccgagtgtgagtaccctacctgtggtccttcagaattccggtgtgccaacggacgatgtctttcatcccggcaatgggagtgcgacggcgagaatgactgccatgaccagtctgacgaagccccgaagaacccgcattgcactagccaggaacataagtgcaatgcgtcaagccagttcctatgttcatctgggcgctgcgtcgccgaggccctcctctgcaacggacaggacgattgcggagacagctccgatgagagaggctgtcacatcaatgagtgtctgtcccgtaaactgtccggctgttctcaggactgtgaggacttgaaaatcggtttcaagtgccgatgtagaccaggctttcggttgaaagatgacggtaggacatgtgcagatgtagatgagtgttccacaaccttcccttgctcccagcgatgtatcaacacccacgggtcttacaagtgtctgtgcgtggaaggctacgcccccaggggaggggaccctcactcctgcaaggctgtgactgacgaagagccttttctcatattcgctaatcgctactaccttcgaaagttgaacctggacggatccaactacacgttgctgaaacaaggcctgaacaatgcagtcgctctcgattttgactaccgcgaacagatgatctattggacggatgtcacaacccagggcagcatgattcggcgaatgcacctaaatggcagcaacgtgcaagtcttacatagaacagggctaagtaatccagacggtctggctgtagactgggtggggggcaacctctattggtgcgataagggaagagatacgatcgaggtcagcaaactgaatggggcatatagaaccgtcctggttagttccggcctgagagagccacgcgccctcgtcgtcgatgtccagaatgggtacttgtactggactgattggggcgatcactccctaattggccggatcggcatggacggcagttcaaggtcggtcatcgtggataccaagatcacatggcccaacggactgactctcgattacgtgactgagcgcatctactgggccgatgccagggaagactacatcgaattcgcctccctggatggcagtaatcggcatgtggtactgtcccaagacatcccccatatcttcgccctgactctgttcgaggattacgtatattggactgattgggaaacgaaatccataaatcgagcacacaaaaccactggaacgaataaaacccttctgataagtacactgcaccgccccatggatctgcacgttttccatgcgctcagacagccagacgtcccaaatcacccttgcaaagtgaacaatggcggatgttccaacctttgtcttttatctcctggcggaggccataaatgcgcgtgtcctactaatttctacctggggtcagatggccgcacttgtgtcagtaattgtactgccagccagttcgtctgtaagaacgataagtgcatacccttctggtggaagtgtgatactgaggatgactgtggagatcactccgatgaacctccagactgcccagagttcaagtgtcgtcccggtcagtttcagtgcagcacaggaatatgcaccaatcctgccttcatctgtgatggagataatgattgtcaagacaattccgatgaagccaactgcgacatacacgtgtgcctgccctcccagtttaagtgcaccaacacgaacaggtgcattcccggtattttccgttgtaatgggcaggacaattgtggtgacggagaggacgagcgggattgcccagaggtaacatgtgccccaaatcagtttcagtgttccataaccaaacggtgtattccgagggtctgggtgtgtgaccgggataacgactgtgtggacgggagtgacgaaccagctaattgcacgcaaatgacgtgcggggtagacgaatttaggtgtaaagactcaggcagatgtattcccgccaggtggaagtgtgatggagaggacgattgcggagatggctccgatgagcctaaagaagaatgtgacgagaggacctgtgaaccctaccagttccgctgtaaaaacaaccggtgtgtgccagggaggtggcaatgtgactacgacaatgattgcggcgacaactctgacgaagagtcctgtacgcccaggccatgctctgagtccgagtttagctgtgcaaatgggcgatgtatcgcaggccggtggaaatgtgacggagatcatgactgtgccgacgggtccgacgagaaggattgcaccccaagatgcgacatggatcaattccaatgtaagtcaggtcactgcatccccctcaggtggagatgcgacgctgatgccgattgtatggatggttctgatgaggaagcctgtggaacaggtgtgcggacctgtcccctcgacgaattccagtgcaacaatacactgtgtaagccgttggcatggaagtgcgatggcgaggatgactgcggagacaatagcgatgagaaccctgaagaatgcgcgcggttcgtttgcccccctaaccggccctttcgatgcaaaaatgaccgggtttgtttgtggatagggcggcagtgtgatggtaccgacaactgcggtgatggcactgacgaagaagattgtgagcctcccacagcccatactactcattgtaaggacaagaaggagtttctgtgcagaaatcagcggtgtctgagctcatctctgagatgcaatatgttcgacgactgcggagatggatcagatgaggaggactgttccattgatcctaaactcactagctgtgcgactaacgcgagcatctgtggcgatgaggctcggtgcgtgagaaccgagaaagcggcgtattgtgcatgtagatcagggtttcacactgtccctgggcagcccgggtgtcaggacattaatgaatgcctgcgattcggaacctgctcacagctctgtaacaatacaaaggggggacacctgtgcagctgtgctcgcaactttatgaaaactcataacacgtgtaaggctgaaggctctgagtaccaggtcctgtatatcgctgatgataacgaaattagatccttgttcccagggcacccacactctgcctacgaacaagccttccagggagatgaatcagttcgcatcgatgctatggatgtgcacgtcaaggcaggccgtgtgtactggacaaattggcataccggaacgattagttatcggtcgttacctcccgccgccccacccaccaccagtaacaggcaccgtagacagattgatcgcggcgtaactcatctaaacatcagcgggttgaagatgcctagaggcatcgctatcgactgggtggccggaaacgtatactggacagatagcggacgggatgtcattgaggttgcacaaatgaagggtgagaacaggaagaccctgatctctgggatgatcgacgagccacacgcgatcgtagtcgacccactgagagggaccatgtattggtctgattggggcaatcacccaaaaatagagactgctgccatggacggcacacttagagaaacacttgtgcaggacaacatccagtggcccactggtctggcagtggactaccataatgaacgcctgtactgggctgatgcaaagctatccgtcataggtagtattcgcttaaacggaactgaccccattgtggcagcggactctaagcgtgggctaagccatccattcagcatcgacgtgttcgaagattatatttatggcgttacctatatcaataaccgggtattcaaaatacataagttcggacatagtccactggtgaacttaaccggggggctcagtcatgcatccgacgtggtgctttaccatcaacacaagcagcctgaggtgaccaacccatgtgatcgtaagaagtgcgaatggctgtgcctgttgagcccttcaggacccgtgtgtacttgccctaacggaaagcggctggacaatgggacctgcgtgcccgtgccctccccaacccctccgcctgacgctcctaggcccggaacatgtaacctccagtgtttcaatggcggttcctgtttcctgaatgcgaggcggcagcctaaatgtaggtgtcagccccgctatactggcgataagtgcgaattggatcagtgttgggaacactgccggaatgggggtacctgcgcagcttcaccgtccgggatgccaacgtgtcggtgtcctaccggattcaccggacctaagtgtacgcagcaggtctgtgccggctactgcgctaataatagcacttgcactgtgaatcaggggaaccagccacagtgtcgttgtctccctggattcttgggcgacaggtgccagtatcgccagtgttccggatactgtgaaaactttggaacttgccagatggcagccgatgggtcacgacagtgccgctgcactgcttatttcgaaggctctcgatgcgaggtcaacaagtgtagcagatgcttggagggggcatgtgtggtgaacaaacagagcggcgatgtgacgtgtaactgcacagacggccgcgttgcacccagttgtttgacttgtgtcggccattgctccaatggaggcagttgtaccatgaacagcaaaatgatgcccgaatgccagtgcccccctcacatgacagggccgagatgtgaggagcacgtcttttcccaacaacagccgggccacatcgcatccatccttattcctctgttattgctactgctgctcgttttggtggccggcgtcgtattctggtacaagcgcagggtgcagggagccaagggatttcagcatcagcgcatgactaatggggccatgaacgttgagatcggaaacccaacatacaagatgtatgaaggaggtgagccggatgacgtgggtggacttctggatgctgacttcgccctggaccctgataaacctactaatttcacgaacccagtgtatgccactctctatatgggggggcatggctcacgccattcgctggccagcactgacgagaagagagaactgctcggcaggggacctgaggacgaaattggcgatcccctggcatag

SEQ ID NO: 127543 - DNA, 13635 bp, Artificial Sequence
  derived and/or modified sequence
atgctgaccccacccctgctgctgctgctgcccctgctgagcgccctggtggccgccgccattgatgcccccaagacctgcagccccaagcagtttgcctgccgggaccagatcacctgcatcagcaagggctggaggtgtgatggagagcgggactgcccagatggcagtgatgaggcccctgagatctgcccccagagcaaggcccagcgctgccagcccaatgagcacaactgcctgggcacagagctgtgtgtgcccatgagccggctgtgcaatggagtgcaggactgcatggatggcagtgatgagggcccccactgccgggagctgcagggcaactgcagccggctgggctgccagcaccactgtgtgcccaccctggatggccccacctgctactgcaacagcagcttccagctgcaggctgatggcaagacctgcaaggactttgatgaatgttctgtgtatggcacctgcagccagctgtgcaccaacacagatggcagcttcatctgtggctgtgtggagggctacctgctgcagcctgacaacagaagctgcaaggccaagaatgaacctgtggaccggccccctgtgctgctgattgccaacagccagaacatcctggccacctacctgagcggggcccaggtgtccaccatcacccccaccagcacccggcagaccacagccatggacttctcctatgccaatgaaacagtgtgctgggtgcacgtgggggacagcgctgcccagacccagctgaagtgtgccaggatgcctggcctgaagggctttgtggatgagcacaccatcaacatcagcctgagcctgcaccacgtggagcagatggccatcgactggctgactggaaacttctactttgtggatgacattgatgaccgcatctttgtgtgcaacagaaatggagacacctgtgtgaccctgctggacctggagctgtacaaccccaagggcatcgccctggaccctgccatgggcaaggtgttcttcacagattatggccagatccccaaggtggagcgctgtgacatggatggccagaacagaaccaagctggtggacagcaagatcgtgttcccccacggcatcaccctggacctggtgtcccggctggtgtactgggcagatgcctacctggactacatcgaggtggtggactatgagggcaagggccggcagaccatcatccagggcatcctgattgagcacctgtatggcctgactgtgtttgagaactacctgtatgccaccaacagcgacaatgccaatgcccagcagaagaccagcgtcatccgggtgaaccgcttcaacagcacagagtaccaggtggtgaccagggtggacaagggcggggccctgcacatctaccaccagaggcggcagccccgggtgcgcagccacgcctgtgaaaatgaccagtatggcaagccaggcggctgcagcgacatctgcctgctggccaacagccacaaggcccggacctgccgctgccgcagcggcttcagcctgggcagtgatggcaagagctgcaagaagccagagcacgagctgttcctggtgtatggcaagggccggcccggcatcatccggggcatggacatgggcgccaaggtgcctgatgagcacatgatccccatcgagaacctgatgaacccccgggccctggacttccacgccgagaccggcttcatctactttgctgacaccaccagctacctgattggccggcagaagattgatggaacagagcgggagaccatcctgaaggatggcatccacaacgtggagggcgtggccgtggactggatgggagacaacctgtactggacagatgatggccccaagaagaccatctctgtggcccggctggagaaggccgcccagaccaggaagaccctgattgagggcaagatgacccacccccgggccatcgtggtggaccccctgaatggctggatgtactggacagactgggaggaggaccccaaggacagcagaagaggccgcctggagcgggcctggatggatggcagccaccgggacatctttgtgaccagcaagacagtgctgtggcccaacggcctgagcctggacatcccagctggccgcctgtactgggtggatgccttctatgacagaattgagaccatcctgctgaatggaacagacaggaagatcgtgtatgagggccctgagctgaaccacgccttcggcctgtgccaccacggcaactacctgttctggacagagtaccgcagcggctctgtgtaccgcctggagcggggcgtgggcggggccccacccaccgtgaccctgctgcggtctgagaggcctcccatctttgagatccgcatgtatgatgcccagcagcagcaggtgggcaccaacaagtgccgggtgaacaatggaggctgcagcagcctgtgcctggccaccccaggcagccggcagtgtgcctgtgccgaggaccaggtgctggatgctgatggagtgacctgcctggccaaccccagctatgtgcccccaccccagtgccagcccggggagtttgcctgtgccaacagccgctgcatccaggagcgctggaagtgtgatggagacaatgactgcctggacaacagtgatgaggccccagccctgtgccaccagcacacctgccccagcgaccgcttcaagtgtgagaacaaccgctgcatccccaaccgctggctgtgtgatggagacaatgactgtggcaacagtgaagatgagagcaatgccacctgcagcgcccggacctgcccccccaaccagttcagctgtgccagcggccgctgcatccccatctcctggacctgtgacctggatgatgactgtggggacagaagtgatgagagcgccagctgtgcctaccccacctgcttccccctgacccagttcacctgcaacaacggccgctgcatcaacatcaactggaggtgtgacaatgacaatgactgtggggacaacagtgatgaagctggctgcagccacagctgcagcagcacccagttcaagtgcaacagcggccgctgcatccctgagcactggacctgtgatggagacaatgactgtggggactacagtgatgagacccacgccaactgcaccaaccaggccacccggcccccaggcggctgccacacagatgagttccagtgccgcctggatggcctgtgcatccccctgcgctggaggtgtgatggagacacagactgcatggacagcagtgatgagaagagctgtgaaggagtgacccacgtgtgtgaccccagcgtgaagtttggctgcaaggacagcgcccgctgcatcagcaaggcctgggtgtgtgatggagacaatgactgtgaggacaacagtgatgaggagaactgtgagagcctggcctgcaggcctcccagccacccctgtgccaacaacacctctgtgtgcctgcccccagacaagctgtgtgatggaaatgatgactgtggagatggcagtgatgaaggagagctgtgtgaccagtgcagcctgaacaatggaggctgcagccacaactgcagcgtggcccctggagagggcatcgtgtgcagctgccccctgggcatggagctgggccctgacaaccacacctgccagatccagagctactgtgccaagcacctgaagtgcagccagaagtgtgaccagaacaagttctctgtgaagtgcagctgctatgagggctgggtgctggagccagatggagagagctgccgcagcctggaccccttcaagcccttcatcatcttcagcaacagacatgagatcagaagaattgacctgcacaagggggactacagcgtgctggtgcccggcctgaggaacaccatcgccctggacttccacctgagccagagcgccctgtactggacagatgtggtggaggacaagatctaccggggcaagctgctggacaatggagccctgaccagctttgaggtggtgatccagtatggcctggccaccccagagggcctggccgtggactggattgctggcaacatctactgggtggagagcaacctggaccagatcgaggtggccaagctggatggcaccctgcggaccaccctgctggccggggacatcgagcacccccgggccatcgccctggaccccagagatggcatcctcttctggacagactgggatgccagcctgcccagaattgaagctgcctccatgtctggagctggaagaagaacagtgcaccgggagaccggcagcggcggctggcccaacggcctgactgtggactacctggagaagaggatcctgtggattgatgcccggagtgatgccatctacagcgcccgctatgatggcagcggccacatggaggtgctgcggggccacgagttcctgagccacccctttgctgtgaccctgtatggaggagaggtgtactggacagactggaggaccaacaccctggccaaggccaacaagtggacaggccacaacgtgacagtggtgcagaggaccaacacccagccctttgacctgcaggtgtaccaccccagccggcagcccatggcccccaacccctgtgaggccaatggaggccagggcccctgcagccacctgtgcctgatcaactacaacagaacagtgtcctgtgcctgcccccacctgatgaagctgcacaaggacaacaccacctgctatgagttcaagaagttcctgctgtatgcccggcagatggagatccggggcgtggacctggatgccccctactacaactacatcatctccttcaccgtgcctgacatcgacaacgtgacagtgctggactatgatgcccgggagcagagggtgtactggagcgatgtgaggacccaggccatcaagagggccttcatcaatggaactggagtggagaccgtggtgtctgctgacctgcccaatgcccacggcctggccgtggactgggtgtccaggaacctcttctggaccagctatgacaccaacaagaagcagatcaacgtggcccggctggatggcagcttcaagaatgctgtggtgcagggcctggagcagccccacggcctggtggtgcaccccctgcggggcaagctgtactggacagatggagacaacatctccatggccaacatggatggcagcaacagaaccctgctcttcagcggccagaagggccctgtgggcctggccatcgacttccctgagagcaagctgtactggatcagcagcggcaaccacaccatcaaccgctgcaacctggatggcagcggcctggaggtgattgatgccatgaggagccagctgggcaaggccacagccctggccatcatgggagacaagctgtggtgggccgaccaggtgtctgagaagatgggcacctgcagcaaggcagatggcagcggctctgtggtgctgaggaacagcaccaccctggtgatgcacatgaaggtgtatgatgagagcatccagctggaccacaagggcaccaacccctgcagcgtgaacaacggggactgcagccagctgtgcctgcccaccagcgagaccaccaggagctgcatgtgcacagctggctacagcctgcggagcggccagcaggcctgtgagggcgtgggcagcttcctgctgtacagcgtgcatgagggcatccggggcatccccctggaccccaatgacaagagtgatgccctggtgcctgtgtctggcaccagcctggccgtgggcatcgacttccacgccgagaatgacaccatctactgggtggacatgggcctgagcaccatcagccgggccaagagggaccagacctggagagaagatgtggtgaccaacggcatcggccgggtggagggcattgctgtggactggattgctggcaacatctactggacagaccagggctttgatgtgattgaggtggcccggctgaatggcagcttccgctacgtggtgatcagccagggcctggacaagccccgggccatcaccgtgcaccctgagaagggctacctgttctggacagagtggggccagtaccccagaattgaaagaagccggctggatggaacagagcgggtggtgctggtgaatgtgtccatctcctggcccaacggcatctctgtggactaccaggacggcaagctgtactggtgtgatgccaggacagacaagattgaaagaattgacctggagactggagaaaatcgggaggtggtgctgagcagcaacaacatggacatgttttctgtgtctgtgtttgaggacttcatctactggagcgacaggacccacgccaacggcagcatcaagaggggcagcaaggacaatgccacagattctgtgcccctgaggacaggcatcggcgtgcagctgaaggacatcaaggtgttcaacagagaccggcagaagggcaccaacgtgtgtgctgtggccaatggaggctgccagcagctgtgcctgtaccggggccggggccagagggcctgtgcctgtgcccacggcatgctggctgaagatggagccagctgccgggagtatgccggctacctgctgtacagcgagaggaccatcctgaagagcatccacctgagtgatgagaggaacctgaatgcccctgtgcagccctttgaggaccctgagcacatgaagaatgtgattgccctggcctttgactacagagctggcaccagccctggcacccccaaccgcatcttcttcagtgacatccacttcggcaacatccagcagatcaatgatgatggcagccgccgcatcaccatcgtggagaatgtgggctctgtggagggcctggcctaccaccggggctgggacaccctgtactggaccagctacaccaccagcaccatcaccaggcacacagtggaccagaccaggcctggggcctttgagcgggagaccgtcatcaccatgtctggagatgaccacccccgggcctttgtgctggatgagtgccagaacctgatgttctggaccaactggaatgagcagcaccccagcatcatgagagctgccctgagcggggccaacgtgctgaccctcatcgagaaggacatccgcacccccaacggcctggccatcgaccacagagctgagaagctgtacttcagtgatgccaccctggacaagattgagcgctgtgaatatgatggcagccaccgctacgtgatcctgaagtctgagcctgtgcaccccttcggcctggccgtgtatggagagcacatcttctggacagactgggtgagaagagctgtgcagagggccaacaagcacgtgggcagcaacatgaagctgctgcgggtggacatcccccagcagcccatgggcatcatcgctgtggccaatgacaccaacagctgtgagctgagcccctgccgcatcaacaacggcggctgccaggacctgtgcctgctgacccaccagggccacgtgaactgcagctgccggggcggccgcatcctgcaggatgacctgacctgcagagctgtgaacagcagctgccgggcccaggatgaatttgaatgtgccaacggggagtgcatcaacttcagcctgacctgtgatggagtgccccactgcaaggacaagagtgatgagaagcccagctactgcaacagccgccgctgcaagaagaccttccggcagtgcagcaatggccgctgtgtgagcaacatgctgtggtgcaatggagcagatgactgtggagatggcagtgatgagatcccctgcaacaagacagcctgtggggtgggggagttccgctgcagagatggcacctgcatcggcaacagcagccgctgcaaccagtttgtggactgtgaagatgccagtgatgagatgaactgcagcgccacagactgcagcagctacttccggctgggcgtgaagggcgtgctcttccagccctgtgagaggaccagcctgtgctacgcccccagctgggtgtgtgatggagccaatgactgtggggactacagtgatgagcgggactgccctggggtgaagaggccccgctgccccctgaactactttgcctgccccagcggccgctgcatccccatgtcctggacctgtgacaaggaggatgactgtgaacatggagaagatgagacccactgcaacaagttctgcagcgaggcccagtttgagtgccagaaccaccgctgcatcagcaagcagtggctgtgtgatggcagtgatgactgtggagatggcagtgatgaggccgcccactgtgagggcaagacctgtggccccagcagcttcagctgccccggcacccacgtgtgtgtgcctgagcgctggctgtgtgatggagacaaggactgtgctgatggagcagatgagagcattgctgctggctgcctgtacaacagcacctgtgatgaccgggagttcatgtgccagaaccggcagtgcatccccaagcactttgtgtgtgaccatgaccgggactgtgctgatggcagtgatgagagcccagaatgtgagtaccccacctgtggccccagcgagttccgctgtgccaacggccgctgcctgagcagccggcagtgggagtgtgatggagaaaatgactgccacgaccagagtgatgaggcccccaagaacccccactgcaccagccaggagcacaagtgcaatgccagcagccagttcctgtgcagcagcggccgctgtgtggccgaggccctgctgtgcaatggccaggatgactgtggggacagcagtgatgagcggggctgccacatcaatgaatgtctgagcaggaagctgagcggctgcagccaggactgtgaggacctgaagattggcttcaagtgccgctgcaggcctggcttccggctgaaggatgatggccgcacctgtgctgatgtggatgaatgttccaccaccttcccctgcagccagcgctgcatcaacacccacggcagctacaagtgcctgtgtgtggagggctacgccccccggggcggggacccccacagctgcaaggctgtgacagatgaggagcccttcctgatctttgccaaccgctactacctgaggaagctgaacctggatggcagcaactacaccctgctgaagcagggcctgaacaatgctgtggccctggactttgactaccgggagcagatgatctactggacagatgtgaccacccagggctccatgatccggaggatgcacctgaatggcagcaatgtgcaggtgctgcacaggacaggcctgagcaacccagatggcctggccgtggactgggtgggcggcaacctgtactggtgtgacaagggccgggacaccatcgaggtgtccaagctgaatggagcctacagaacagtgctggtgagcagcggcctgcgggagccccgggccctggtggtggatgtgcagaatggctacctgtactggacagactggggagaccacagcctcatcggcagaattggcatggatggcagcagccgctctgtgattgtggacaccaagatcacctggcccaacggcctgaccctggactatgtgacagagcgcatctactgggcagatgcccgggaggactacattgaatttgccagcctggatggcagcaacagacatgtggtgctgagccaggacatcccccacatctttgccctgaccctgtttgaagattatgtgtactggacagactgggagaccaagagcatcaacagagcccacaagaccaccggcaccaacaagaccctgctgatcagcaccctgcaccggcccatggacctgcacgtgttccacgccctgcggcagccagatgtgcccaaccacccctgcaaggtgaacaacggcggctgcagcaacctgtgcctgctgagccctgggggcggccacaagtgtgcctgccccaccaacttctacctgggcagtgatggccgcacctgtgtgagcaactgcacagccagccagtttgtgtgcaagaatgacaagtgcatccccttctggtggaagtgtgacacagaagatgactgtggggaccacagtgatgagcccccagactgcccagagttcaagtgccggcccggccagttccagtgcagcacaggcatctgcaccaacccagccttcatctgtgatggagacaatgactgccaggacaacagtgatgaggccaactgtgacatccacgtgtgcctgcccagccagttcaagtgcaccaacaccaaccgctgcatccctggcatcttccgctgcaatggccaggacaactgtggagatggagaagatgagcgggactgcccagaggtgacctgtgcccccaaccagttccagtgcagcatcaccaagcgctgcatcccccgggtgtgggtgtgtgaccgggacaatgactgtgtggatggcagtgatgagcccgccaactgcacccagatgacctgtggggtggatgagttccgctgcaaggacagcggccgctgcatcccagcccgctggaagtgtgatggagaagatgactgtggagatggcagtgatgagcccaaggaggagtgtgatgagaggacctgtgagccctaccagttccgctgcaagaacaacagatgtgtgcccggccgctggcagtgtgactatgacaatgactgtggggacaacagtgatgaggagagctgcaccccccggccctgcagcgagagcgagttcagctgtgccaacggccgctgcatcgccggccgctggaagtgtgatggagaccatgactgtgctgatggcagtgatgagaaggactgcaccccccgctgtgacatggaccagttccagtgcaagagcggccactgcatccccctgcgctggaggtgtgatgctgatgctgactgcatggatggcagtgatgaggaggcctgtggcactggagtgaggacctgccccctggatgagttccagtgcaacaacaccctgtgcaagcccctggcctggaagtgtgatggagaagatgactgtggggacaacagtgatgaaaatccagaagaatgtgccaggtttgtgtgcccccccaaccggcccttccgctgcaagaatgacagagtgtgcctgtggattggccggcagtgtgatggaacagacaactgtggagatggaacagatgaggaggactgtgagcccccaacagcccacaccacccactgcaaggacaagaaggagttcctgtgcaggaaccagcgctgcctgagcagcagcctgcgctgcaacatgtttgatgactgtggagatggcagtgatgaggaggactgcagcattgaccccaagctgaccagctgtgccaccaatgccagcatctgtggagatgaggcccgctgtgtgaggacagagaaggccgcctactgtgcctgccgcagcggcttccacacagtgcccggccagcccggctgccaggacatcaatgaatgtctgcgcttcggcacctgcagccagctgtgcaacaacaccaagggcggccacctgtgcagctgtgccaggaacttcatgaagacccacaacacctgcaaggccgagggcagcgagtaccaggtgctgtacatcgcagatgacaatgagatccgcagcctcttccctggccacccccacagcgcctatgagcaggccttccagggagatgaatctgtgagaattgatgccatggatgtgcacgtgaaggccggccgggtgtactggaccaactggcacacaggcaccatctcctaccgcagcctgcccccagctgccccacccaccaccagcaacagacaccggcggcagattgaccggggcgtgacccacctgaacatcagcggcctgaagatgccccggggcatcgccatcgactgggtggccggaaatgtgtactggacagattctggaagagatgtgattgaggtggcccagatgaagggggagaacaggaagaccctcatcagcggcatgattgatgagccccacgccatcgtggtggaccccctgcggggcaccatgtactggagcgactggggcaaccaccccaagattgaaacagctgccatggatggcaccctgcgggagaccctggtgcaggacaacatccagtggcccaccggcctggccgtggactaccacaatgaaagactctactgggcagatgccaagctgtctgtgattggcagcatccggctgaatggaacagaccccatcgtggccgctgacagcaagaggggcctgagccaccccttcagcattgatgtgtttgaggactacatctatggagtgacctacatcaacaacagagtcttcaagatccacaagtttggccacagccccctggtgaacctgactggaggcctgagccacgccagtgatgtggtgctgtaccaccagcacaagcagcctgaggtgaccaacccctgtgacaggaagaagtgtgagtggctgtgcctgctgagccccagcggccctgtgtgcacctgccccaacgggaagaggctggacaatggcacctgtgtgcctgtgcccagccccaccccacctccagatgcccccaggcctggcacctgcaacctgcagtgcttcaacggcggcagctgcttcctgaatgcccggcggcagcccaagtgccgctgccagccccgctacacaggagacaagtgtgagctggaccagtgctgggagcactgcagaaatggaggcacctgtgccgccagccccagcggcatgcccacctgccgctgccccaccggcttcaccggccccaagtgcacccagcaggtgtgtgccggctactgtgccaacaacagcacctgcaccgtgaaccagggcaaccagccccagtgccgctgcctgcccggcttcctgggggaccgctgccagtaccggcagtgcagcggctactgtgaaaattttggcacctgccagatggccgcagatggcagccggcagtgccgctgcacagcctactttgagggcagccgctgtgaggtgaacaagtgcagccgctgcctggagggcgcctgtgtggtgaacaagcagagcggagatgtgacctgcaactgcacagatggccgggtggcccccagctgcctgacctgtgtgggccactgcagcaatggaggcagctgcaccatgaacagcaagatgatgcctgagtgccagtgccccccccacatgacaggcccccgctgtgaggagcacgtgttcagccagcagcagcccggccacatcgccagcatcctgatccccctgctgctgctgctgctgctggtgctggtggccggcgtggtgttctggtacaagagaagagtgcagggcgccaagggcttccagcaccagaggatgaccaatggagccatgaatgtggagatcggcaaccccacctacaagatgtatgagggcggggagccagatgatgtgggcggcctgctggatgctgactttgccctggaccctgacaagcccaccaacttcaccaaccctgtgtatgccaccctgtacatgggcggccacggcagccgccacagcctggccagcacagatgagaagcgggagctgctgggccggggcccagaagatgaaattggagaccccctggcctag

SEQ ID NO: 127544 - DNA, 14897 bp, Artificial Sequence
  derived and/or modified sequence
cagcggtgcgagctccaggcccatgcactgaggaggcggaaacaaggggagcccccagagctccatcaagccccctccaaaggctcccctacccggtccacgccccccaccccccctccccgcctcctcccaattgtgcatttttgcagccggaggcggctccgagatggggctgtgagcttcgcccggggagggggaaagagcagcgaggagtgaagcgggggggtggggtgaagggtttggatttcggggcagggggcgcacccccgtcagcaggccctccccaaggggctcggaactctacctcttcacccacgcccctggtgcgctttgccgaaggaaagaataagaacagagaaggaggagggggaaaggaggaaaagggggaccccccaactggggggggtgaaggagagaagtagcaggaccagaggggaaggggctgctgcttgcatcagcccacaccatgctgaccccgccgttgctcctgctgctgcccctgctctcagctctggtcgcggcggctatcgacgcccctaagacttgcagccccaagcagtttgcctgcagagatcaaataacctgtatctcaaagggctggcggtgcgacggtgagagggactgcccagacggatctgacgaggcccctgagatttgtccacagagtaaggcccagcgatgccagccaaacgagcataactgcctgggtactgagctgtgtgttcccatgtcccgcctctgcaatggggtccaggactgcatggacggctcagatgaggggccccactgccgagagctccaaggcaactgctctcgcctgggctgccagcaccattgtgtccccacactcgatgggcccacctgctactgcaacagcagctttcagcttcaggcagatggcaagacctgcaaagattttgatgagtgctcagtgtacggcacctgcagccagctatgcaccaacacagacggctccttcatatgtggctgtgttgaaggatacctcctgcagccggataaccgctcctgcaaggccaagaacgagccagtagaccggccccctgtgctgttgatagccaactcccagaacatcttggccacgtacctgagtggggcccaggtgtctaccatcacacctacgagcacgcggcagaccacagccatggacttcagctatgccaacgagaccgtatgctgggtgcatgttggggacagtgctgctcagacgcagctcaagtgtgcccgcatgcctggcctaaagggcttcgtggatgagcacaccatcaacatctccctcagtctgcaccacgtggaacagatggccatcgactggctgacaggcaacttctactttgtggatgacatcgatgataggatctttgtctgcaacagaaatggggacacatgtgtcacattgctagacctggaactctacaaccccaagggcattgccctggaccctgccatggggaaggtgtttttcactgactatgggcagatcccaaaggtggaacgctgtgacatggatgggcagaaccgcaccaagctcgtcgacagcaagattgtgtttcctcatggcatcacgctggacctggtcagccgccttgtctactgggcagatgcctatctggactatattgaagtggtggactatgagggcaagggccgccagaccatcatccagggcatcctgattgagcacctgtacggcctgactgtgtttgagaattatctctatgccaccaactcggacaatgccaatgcccagcagaagacgagtgtgatccgtgtgaaccgctttaacagcaccgagtaccaggttgtcacccgggtggacaagggtggtgccctccacatctaccaccagaggcgtcagccccgagtgaggagccatgcctgtgaaaacgaccagtatgggaagccgggtggctgctctgacatctgcctgctggccaacagccacaaggcgcggacctgccgctgccgttccggcttcagcctgggcagtgacgggaagtcatgcaagaagccggagcatgagctgttcctcgtgtatggcaagggccggccaggcatcatccggggcatggatatgggggccaaggtcccggatgagcacatgatccccattgaaaacctcatgaacccccgagccctggacttccacgctgagaccggcttcatctactttgccgacaccaccagctacctcattggccgccagaagattgatggcactgagcgggagaccatcctgaaggacggcatccacaatgtggagggtgtggccgtggactggatgggagacaatctgtactggacggacgatgggcccaaaaagacaatcagcgtggccaggctggagaaagctgctcagacccgcaagactttaatcgagggcaaaatgacacaccccagggctattgtggtggatccactcaatgggtggatgtactggacagactgggaggaggaccccaaggacagtcggcgtgggcggctggagagggcgtggatggatggctcacaccgagacatctttgtcacctccaagacagtgctttggcccaatgggctaagcctggacatcccggctgggcgcctctactgggtggatgccttctacgaccgcatcgagacgatactgctcaatggcacagaccggaagattgtgtatgaaggtcctgagctgaaccacgcctttggcctgtgtcaccatggcaactacctcttctggactgagtatcggagtggcagtgtctaccgcttggaacggggtgtaggaggcgcaccccccactgtgacccttctgcgcagtgagcggccccccatctttgagatccgaatgtatgatgcccagcagcagcaagttggcaccaacaaatgccgggtgaacaatggcggctgcagcagcctgtgcttggccacccctgggagccgccagtgcgcctgtgctgaggaccaggtgttggacgcagacggcgtcacttgcttggcgaacccatcctacgtgcctccaccccagtgccagccaggcgagtttgcctgtgccaacagccgctgcatccaggagcgctggaagtgtgacggagacaacgattgcctggacaacagtgatgaggccccagccctctgccatcagcacacctgcccctcggaccgattcaagtgcgagaacaaccggtgcatccccaaccgctggctctgcgacggggacaatgactgtgggaacagtgaagatgagtccaatgccacttgttcagcccgcacctgcccccccaaccagttctcctgtgccagtggccgctgcatccccatctcctggacgtgtgatctggatgacgactgtggggaccgctctgatgagtctgcttcgtgtgcctatcccacctgcttccccctgactcagtttacctgcaacaatggcagatgtatcaacatcaactggagatgcgacaatgacaatgactgtggggacaacagtgacgaagccggctgcagccactcctgttctagcacccagttcaagtgcaacagcgggcgttgcatccccgagcactggacctgcgatggggacaatgactgcggagactacagtgatgagacacacgccaactgcaccaaccaggccacgaggccccctggtggctgccacactgatgagttccagtgccggctggatggactatgcatccccctgcggtggcgctgcgatggggacactgactgcatggactccagcgatgagaagagctgtgagggagtgacccacgtctgcgatcccagtgtcaagtttggctgcaaggactcagctcggtgcatcagcaaagcgtgggtgtgtgatggcgacaatgactgtgaggataactcggacgaggagaactgcgagtccctggcctgcaggccaccctcgcacccttgtgccaacaacacctcagtctgcctgccccctgacaagctgtgtgatggcaacgacgactgtggcgacggctcagatgagggcgagctctgcgaccagtgctctctgaataacggtggctgcagccacaactgctcagtggcacctggcgaaggcattgtgtgttcctgccctctgggcatggagctggggcccgacaaccacacctgccagatccagagctactgtgccaagcatctcaaatgcagccaaaagtgcgaccagaacaagttcagcgtgaagtgctcctgctacgagggctgggtcctggaacctgacggcgagagctgccgcagcctggaccccttcaagccgttcatcattttctccaaccgccatgaaatccggcgcatcgatcttcacaaaggagactacagcgtcctggtgcccggcctgcgcaacaccatcgccctggacttccacctcagccagagcgccctctactggaccgacgtggtggaggacaagatctaccgcgggaagctgctggacaacggagccctgactagtttcgaggtggtgattcagtatggcctggccacacccgagggcctggctgtagactggattgcaggcaacatctactgggtggagagtaacctggatcagatcgaggtggccaagctggatgggaccctccggaccaccctgctggccggtgacattgagcacccaagggcaatcgcactggatccccgggatgggatcctgttttggacagactgggatgccagcctgccccgcattgaggcagcctccatgagtggggctgggcgccgcaccgtgcaccgggagaccggctctgggggctggcccaacgggctcaccgtggactacctggagaagcgcatcctttggattgacgccaggtcagatgccatttactcagcccgttacgacggctctggccacatggaggtgcttcggggacacgagttcctgtcgcacccgtttgcagtgacgctgtacgggggggaggtctactggactgactggcgaacaaacacactggctaaggccaacaagtggaccggccacaatgtcaccgtggtacagaggaccaacacccagccctttgacctgcaggtgtaccacccctcccgccagcccatggctcccaatccctgtgaggccaatgggggccagggcccctgctcccacctgtgtctcatcaactacaaccggaccgtgtcctgcgcctgcccccacctcatgaagctccacaaggacaacaccacctgctatgagtttaagaagttcctgctgtacgcacgtcagatggagatccgaggtgtggacctggatgctccctactacaactacatcatctccttcacggtgcccgacatcgacaacgtcacagtgctagactacgatgcccgcgagcagcgtgtgtactggtctgacgtgcggacacaggccatcaagcgggccttcatcaacggcacaggcgtggagacagtcgtctctgcagacttgccaaatgcccacgggctggctgtggactgggtctcccgaaacctgttctggacaagctatgacaccaataagaagcagatcaatgtggcccggctggatggctccttcaagaacgcagtggtgcagggcctggagcagccccatggccttgtcgtccaccctctgcgtgggaagctctactggaccgatggtgacaacatcagcatggccaacatggatggcagcaatcgcaccctgctcttcagtggccagaagggccccgtgggcctggctattgacttccctgaaagcaaactctactggatcagctccgggaaccataccatcaaccgctgcaacctggatgggagtgggctggaggtcatcgatgccatgcggagccagctgggcaaggccaccgccctggccatcatgggggacaagctgtggtgggctgatcaggtgtcggaaaagatgggcacatgcagcaaggctgacggctcgggctccgtggtccttcggaacagcaccaccctggtgatgcacatgaaggtctatgacgagagcatccagctggaccataagggcaccaacccctgcagtgtcaacaacggtgactgctcccagctctgcctgcccacgtcagagacgacccgctcctgcatgtgcacagccggctatagcctccggagtggccagcaggcctgcgagggcgtaggttcctttctcctgtactctgtgcatgagggaatcaggggaattcccctggatcccaatgacaagtcagatgccctggtcccagtgtccgggacctcgctggctgtcggcatcgacttccacgctgaaaatgacaccatctactgggtggacatgggcctgagcacgatcagccgggccaagcgggaccagacgtggcgtgaagacgtggtgaccaatggcattggccgtgtggagggcattgcagtggactggatcgcaggcaacatctactggacagaccagggctttgatgtcatcgaggtcgcccggctcaatggctccttccgctacgtggtgatctcccagggtctagacaagccccgggccatcaccgtccacccggagaaagggtacttgttctggactgagtggggtcagtatccgcgtattgagcggtctcggctagatggcacggagcgtgtggtgctggtcaacgtcagcatcagctggcccaacggcatctcagtggactaccaggatgggaagctgtactggtgcgatgcacggacagacaagattgaacggatcgacctggagacaggtgagaaccgcgaggtggttctgtccagcaacaacatggacatgttttcagtgtctgtgtttgaggatttcatctactggagtgacaggactcatgccaacggctctatcaagcgcgggagcaaagacaatgccacagactccgtgcccctgcgaaccggcatcggcgtccagcttaaagacatcaaagtcttcaaccgggaccggcagaaaggcaccaacgtgtgcgcggtggccaatggcgggtgccagcagctgtgcctgtaccggggccgtgggcagcgggcctgcgcctgtgcccacgggatgctggctgaagacggagcatcgtgccgcgagtatgccggctacctgctctactcagagcgcaccattctcaagagtatccacctgtcggatgagcgcaacctcaatgcgcccgtgcagcccttcgaggaccctgagcacatgaagaacgtcatcgccctggcctttgactaccgggcaggcacctctccgggcacccccaatcgcatcttcttcagcgacatccactttgggaacatccaacagatcaacgacgatggctccaggaggatcaccattgtggaaaacgtgggctccgtggaaggcctggcctatcaccgtggctgggacactctctattggacaagctacacgacatccaccatcacgcgccacacagtggaccagacccgcccaggggccttcgagcgtgagaccgtcatcactatgtctggagatgaccacccacgggccttcgttttggacgagtgccagaacctcatgttctggaccaactggaatgagcagcatcccagcatcatgcgggcggcgctctcgggagccaatgtcctgacccttatcgagaaggacatccgtacccccaatggcctggccatcgaccaccgtgccgagaagctctacttctctgacgccaccctggacaagatcgagcggtgcgagtatgacggctcccaccgctatgtgatcctaaagtcagagcctgtccaccccttcgggctggccgtgtatggggagcacattttctggactgactgggtgcggcgggcagtgcagcgggccaacaagcacgtgggcagcaacatgaagctgctgcgcgtggacatcccccagcagcccatgggcatcatcgccgtggccaacgacaccaacagctgtgaactctctccatgccgaatcaacaacggtggctgccaggacctgtgtctgctcactcaccagggccatgtcaactgctcatgccgagggggccgaatcctccaggatgacctcacctgccgagcggtgaattcctcttgccgagcacaagatgagtttgagtgtgccaatggcgagtgcatcaacttcagcctgacctgcgacggcgtcccccactgcaaggacaagtccgatgagaagccatcctactgcaactcccgccgctgcaagaagactttccggcagtgcagcaatgggcgctgtgtgtccaacatgctgtggtgcaacggggccgacgactgtggggatggctctgacgagatcccttgcaacaagacagcctgtggtgtgggcgagttccgctgccgggacgggacctgcatcgggaactccagccgctgcaaccagtttgtggattgtgaggacgcctcagatgagatgaactgcagtgccaccgactgcagcagctacttccgcctgggcgtgaagggcgtgctcttccagccctgcgagcggacctcactctgctacgcacccagctgggtgtgtgatggcgccaatgactgtggggactacagtgatgagcgcgactgcccaggtgtgaaacgccccagatgccctctgaattacttcgcctgccctagtgggcgctgcatccccatgagctggacgtgtgacaaagaggatgactgtgaacatggcgaggacgagacccactgcaacaagttctgctcagaggcccagtttgagtgccagaaccatcgctgcatctccaagcagtggctgtgtgacggcagcgatgactgtggggatggctcagacgaggctgctcactgtgaaggcaagacgtgcggcccctcctccttctcctgccctggcacccacgtgtgcgtccccgagcgctggctctgtgacggtgacaaagactgtgctgatggtgcagacgagagcatcgcagctggttgcttgtacaacagcacttgtgacgaccgtgagttcatgtgccagaaccgccagtgcatccccaagcacttcgtgtgtgaccacgaccgtgactgtgcagatggctctgatgagtcccccgagtgtgagtacccgacctgcggccccagtgagttccgctgtgccaatgggcgctgtctgagctcccgccagtgggagtgtgatggcgagaatgactgccacgaccagagtgacgaggctcccaagaacccacactgcaccagccaagagcacaagtgcaatgcctcgtcacagttcctgtgcagcagtgggcgctgtgtggctgaggcactgctctgcaacggccaggatgactgtggcgacagctcggacgagcgtggctgccacatcaatgagtgtctcagccgcaagctcagtggctgcagccaggactgtgaggacctcaagatcggcttcaagtgccgctgtcgccctggcttccggctgaaggacgacggccggacgtgtgctgatgtggacgagtgcagcaccaccttcccctgcagccagcgctgcatcaacactcatggcagctataagtgtctgtgtgtggagggctatgcaccccgcggcggcgacccccacagctgcaaggctgtgactgacgaggaaccgtttctgatcttcgccaaccggtactacctgcgcaagctcaacctggacgggtccaactacacgttacttaagcagggcctgaacaacgccgttgccttggattttgactaccgagagcagatgatctactggacagatgtgaccacccagggcagcatgatccgaaggatgcaccttaacgggagcaatgtgcaggtcctacaccgtacaggcctcagcaaccccgatgggctggctgtggactgggtgggtggcaacctgtactggtgcgacaaaggccgggacaccatcgaggtgtccaagctcaatggggcctatcggacggtgctggtcagctctggcctccgtgagcccagggctctggtggtggatgtgcagaatgggtacctgtactggacagactggggtgaccattcactgatcggccgcatcggcatggatgggtccagccgcagcgtcatcgtggacaccaagatcacatggcccaatggcctgacgctggactatgtcactgagcgcatctactgggccgacgcccgcgaggactacattgaatttgccagcctggatggctccaatcgccacgttgtgctgagccaggacatcccgcacatctttgcactgaccctgtttgaggactacgtctactggaccgactgggaaacaaagtccattaaccgagcccacaagaccacgggcaccaacaaaacgctcctcatcagcacgctgcaccggcccatggacctgcatgtcttccatgccctgcgccagccagacgtgcccaatcacccctgcaaggtcaacaatggtggctgcagcaacctgtgcctgctgtcccccgggggagggcacaaatgtgcctgccccaccaacttctacctgggcagcgatgggcgcacctgtgtgtccaactgcacggctagccagtttgtatgcaagaacgacaagtgcatccccttctggtggaagtgtgacaccgaggacgactgcggggaccactcagacgagcccccggactgccctgagttcaagtgccggcccggacagttccagtgctccacaggtatctgcacaaaccctgccttcatctgcgatggcgacaatgactgccaggacaacagtgacgaggccaactgtgacatccacgtctgcttgcccagtcagttcaaatgcaccaacaccaaccgctgtattcccggcatcttccgctgcaatgggcaggacaactgcggagatggggaggatgagagggactgccccgaggtgacctgcgcccccaaccagttccagtgctccattaccaaacggtgcatcccccgggtctgggtctgcgaccgggacaatgactgtgtggatggcagtgatgagcccgccaactgcacccagatgacctgtggtgtggacgagttccgctgcaaggattcgggccgctgcatcccagcgcgttggaagtgtgacggagaggatgactgtggggatggctcggatgagcccaaggaagagtgtgatgaacgcacctgtgagccataccagttccgctgcaagaacaaccgctgcgtgcccggccgctggcagtgcgactacgacaacgattgcggtgacaactccgatgaagagagctgcacccctcggccctgctccgagagtgagttctcctgtgccaacggccgctgcatcgcggggcgctggaaatgcgatggagaccacgactgcgcggacggctcggacgagaaagactgcaccccccgctgtgacatggaccagttccagtgcaagagcggccactgcatccccctgcgctggcgctgtgacgcagacgccgactgcatggacggcagcgacgaggaggcctgcggcactggcgtgcggacctgccccctggacgagttccagtgcaacaacaccttgtgcaagccgctggcctggaagtgcgatggcgaggatgactgtggggacaactcagatgagaaccccgaggagtgtgcccggttcgtgtgccctcccaaccggcccttccgttgcaagaatgaccgcgtctgtctgtggatcgggcgccaatgcgatggcacggacaactgtggggatgggactgatgaagaggactgtgagccccccacagcccacaccacccactgcaaagacaagaaggagtttctgtgccggaaccagcgctgcctctcctcctccctgcgctgcaacatgttcgatgactgcggggacggctctgacgaggaggactgcagcatcgaccccaagctgaccagctgcgccaccaatgccagcatctgtggggacgaggcacgctgcgtgcgcaccgagaaagcggcctactgtgcctgccgctcgggcttccacaccgtgcccggccagcccggatgccaagacatcaacgagtgcctgcgcttcggcacctgctcccagctctgcaacaacaccaagggcggccacctctgcagctgcgctcggaacttcatgaagacgcacaacacctgcaaggccgaaggctctgagtaccaggtcctgtacatcgctgatgacaatgagatccgcagcctgttccccggccacccccattcggcttacgagcaggcattccagggtgacgagagtgtccgcattgatgctatggatgtccatgtcaaggctggccgtgtctattggaccaactggcacacgggcaccatctcctaccgcagcctgccacctgctgcgcctcctaccacttccaaccgccaccggcgacagattgaccggggtgtcacccacctcaacatttcagggctgaagatgcccagaggcatcgccatcgactgggtggccggaaacgtgtactggaccgactcgggccgagatgtgattgaggtggcgcagatgaagggcgagaaccgcaagacgctcatctcgggcatgattgacgagccccacgccattgtggtggacccactgagggggaccatgtactggtcagactggggcaaccaccccaagattgagacggcagcgatggatgggacgcttcgggagacactggtgcaggacaacattcagtggcccacaggcctggccgtggattatcacaatgagcggctgtactgggcagacgccaagctttcagtcatcggcagcatccggctcaatggcacggaccccattgtggctgctgacagcaaacgaggcctaagtcaccccttcagcatcgacgtctttgaggattacatctatggtgtcacctacatcaataatcgtgtcttcaagatccataagtttggccacagccccttggtcaacctgacagggggcctgagccacgcctctgacgtggtcctttaccatcagcacaagcagcccgaagtgaccaacccatgtgaccgcaagaaatgcgagtggctctgcctgctgagccccagtgggcctgtctgcacctgtcccaatgggaagcggctggacaacggcacatgcgtgcctgtgccctctccaacgccccccccagatgctccccggcctggaacctgtaacctgcagtgcttcaacggtggcagctgtttcctcaatgcacggaggcagcccaagtgccgctgccaaccccgctacacgggtgacaagtgtgaactggaccagtgctgggagcactgtcgcaatgggggcacctgtgctgcctccccctctggcatgcccacgtgccggtgccccacgggcttcacgggccccaaatgcacccagcaggtgtgtgcgggctactgtgccaacaacagcacctgcactgtcaaccagggcaaccagccccagtgccgatgcctacccggcttcctgggcgaccgctgccagtaccggcagtgctctggctactgtgagaactttggcacatgccagatggctgctgatggctcccgacaatgccgctgcactgcctactttgagggatcgaggtgtgaggtgaacaagtgcagccgctgtctcgaaggggcctgtgtggtcaacaagcagagtggggatgtcacctgcaactgcacggatggccgggtggcccccagctgtctgacctgcgtcggccactgcagcaatggcggctcctgtaccatgaacagcaaaatgatgcctgagtgccagtgcccaccccacatgacagggccccggtgtgaggagcacgtcttcagccagcagcagccaggacatatagcctccatcctaatccctctgctgttgctgctgctgctggttctggtggccggagtggtattctggtataagcggcgagtccaaggggctaagggcttccagcaccaacggatgaccaacggggccatgaacgtggagattggaaaccccacctacaagatgtacgaaggcggagagcctgatgatgtgggaggcctactggacgctgactttgccctggaccctgacaagcccaccaacttcaccaaccccgtgtatgccacactctacatggggggccatggcagtcgccactccctggccagcacggacgagaagcgagaactcctgggccggggccctgaggacgagataggggaccccttggcatagggccctgccccgtcggactgcccccagaaagcctcctgccccctgccagtgaagtccttcagtgagcccctccccagccagcccttccctggccccgccggatgtataaatgtaaaaatgaaggaattacattttatatgtgagcgagcaagccggcaagcgagcacagtattatttctccatcccctccctgcctgctccttggcacccccatgctgccttcagggagacaggcagggagggcttggggctgcacctcctaccctcccaccagaacgcaccccactgggagagctggtggtgcagccttcccctccctgtataagacactttgccaaggctctcccctctcgccccatccctgcttgcccgctcccacagcttcctgagggctaattctgggaagggagagttctttgctgcccctgtctggaagacgtggctctgggtgaggtaggcgggaaaggatggagtgttttagttcttgggggaggccaccccaaaccccagccccaactccaggggcacctatgagatggccatgctcaacccccctcccagacaggccctccctgtctccagggcccccaccgaggttcccagggctggagacttcctctggtaaacattcctccagcctcccctcccctggggacgccaaggaggtgggccacacccaggaagggaaagcgggcagccccgttttggggacgtgaacgttttaataatttttgctgaattcctttacaactaaataacacagatattgttataaataaaattgtaaaaaaaaaaa

SEQ ID NO: 127545 - DNA, 13635 bp, Artificial Sequence
  derived and/or modified sequence
atgctgaccccccccctgctgctgctgctgcccctgctgagcgccctggtggccgccgctattgacgctccaaaaacctgcagccccaagcagttcgcttgccgggatcagatcacttgtatcagtaaaggatggagatgcgatggggagagagattgtcccgacggtagcgatgaagccccagaaatatgcccccagtccaaggcccaacgctgtcagcccaacgaacataattgccttggcaccgaactttgcgtgcccatgtctcgtctctgcaacggggtgcaggattgtatggacggctccgacgagggaccacattgtcgcgaattgcagggtaactgtagccgtcttggctgtcaacaccactgtgtgcctactttagatggacctacctgttattgtaattcctcctttcagctccaggccgacggaaaaacctgcaaggactttgatgagtgtagcgtctacggaacctgttctcagctttgtactaataccgacgggtccttcatatgcggctgcgttgagggctatctgcttcaaccggataatagaagctgcaaggccaaaaatgagccagttgacagaccacccgtgcttctgatcgcaaattcacagaatatcttggcaacttacctgagcggtgcccaagtgagcacaataaccccaaccagcactcggcaaaccactgcaatggatttctcctacgccaacgaaacagtgtgttgggtgcatgtgggagactcagctgcacagacccagctcaagtgcgctaggatgcccgggctgaaaggttttgtagatgagcacacaattaacataagcctgtcgctgcatcacgttgagcagatggcaattgactggctgacaggtaacttctactttgtggacgatatagatgataggatttttgtgtgcaaccgtaacggtgatacttgcgtgaccctgttggacctggaactgtataacccaaaaggaatcgctctggatcctgccatgggcaaagtgttttttaccgattacggacagattccgaaagtggaacggtgcgacatggacgggcaaaacagaaccaaactggtggatagcaaaattgtttttccccatgggattacactggacctggtgtcccggctggtgtactgggctgatgcctacctcgattacatcgaagtagtggactatgaaggtaaaggccggcagaccataattcaagggatcttgattgaacacctgtacggcctgacagtctttgagaactacctgtatgccaccaatagtgataatgctaatgctcagcagaaaacctccgtgatccgggttaaccggttcaactcgactgaataccaagttgtaacaagagttgataaaggaggcgctctgcatatataccatcagaggagacagcctagagttagaagtcacgcttgtgagaatgaccagtatgggaagccaggcggttgtagcgacatttgcttgctcgcaaattcgcataaggcccggacttgccggtgccgctctgggttcagccttgggtccgacggaaagtcctgcaagaagccagaacacgaattatttctcgtctacggcaaaggaagaccgggcatcatcagggggatggacatgggcgctaaggtgccagacgagcatatgattcccattgagaacctcatgaatccccgggccctagactttcatgctgagacaggattcatttattttgccgacaccacctcctacttgattggtaggcagaagatcgatggaacagagagggagacgatactgaaagacggtatccacaatgttgagggagttgctgtggactggatgggcgataatctgtactggactgatgacggcccaaagaaaacaatttccgtcgcgagattagaaaaggctgctcagacccgcaagactttgatcgaaggcaagatgactcatccccgggcgatagttgttgacccactaaacggttggatgtactggactgattgggaggaggaccccaaggattctagacgtgggaggctggaaagggcatggatggacggttcccatcgtgacattttcgtgaccagtaaaacagtattgtggcccaatgggctgtcactcgacatccctgccggacggctgtattgggtggacgcattctacgataggatcgaaaccatactcttaaatggtaccgaccgcaaaatcgtgtacgaggggcccgaactgaaccacgctttcgggctgtgccatcacggcaactacctcttttggaccgagtacagatccgggagtgtgtatcgccttgagaggggcgtcggaggcgcacctccaactgtgacgctgttgcggtctgagagacctcccatcttcgaaataagaatgtatgatgcacagcaacaacaagtcgggacgaataagtgccgcgtgaataacgggggatgtagctccctctgcctagccacccctggctcgcgacagtgcgcctgtgctgaggatcaggtgctggacgcagacggggtgacgtgcctggctaatccaagctacgtcccgccccctcagtgccagcccggggagttcgcttgcgcaaacagccgctgcatccaggagagatggaaatgcgatggagataacgactgcctggataactccgatgaagctcctgcactctgccaccaacacacatgtcctagcgaccggttcaagtgcgaaaacaataggtgtatccctaaccgctggttatgtgacggcgataacgactgtgggaacagcgaagacgaaagcaacgcaacttgttcagctaggacttgtccgcccaaccaattcagttgtgccagtggccgctgcataccgatcagttggacatgtgatttagatgatgactgtggtgatcgatctgatgagtctgcgtcatgtgcctatcctacatgctttcctctaacccagttcacatgtaataatggacgatgcattaatataaactggcggtgcgacaatgacaatgactgcggcgacaacagcgacgaggccggatgcagccacagctgttcaagtacccagttcaagtgcaattccggtcgatgcattccagagcactggacatgcgacggcgacaacgactgcggcgactacagcgacgaaacacacgccaactgtaccaatcaagcgactagacctcccggcgggtgtcataccgatgagtttcagtgtcggctggatggtttgtgcataccccttaggtggcggtgtgatggcgacacagactgtatggactcttcagatgaaaagagctgcgaaggagtgacccacgtatgcgatccttcggtcaagtttgggtgcaaagactccgccaggtgtatttcaaaggcttgggtttgcgatggtgacaacgattgcgaggataatagtgatgaggagaattgtgaaagtctggcttgccgtcccccctctcatccatgtgcaaacaatactagcgtgtgtctgcctcccgataaactttgcgatggcaacgacgattgcggcgacgggtcggatgagggtgagctgtgcgatcagtgttcattgaacaacgggggctgctcccacaactgcagcgtcgcacctggcgaagggatcgtttgttcctgccccttaggtatggagttaggccctgacaatcatacatgccagattcagtcctattgcgcgaagcatctaaaatgctcacagaagtgtgatcaaaataaattctctgtaaaatgctcatgctacgaggggtgggtgcttgaaccagacggagagtcctgccggtcactcgatcccttcaagcctttcatcattttttccaaccgacatgaaatccgccggatagacctgcacaagggcgactattcggtactggtgcctggacttagaaataccattgccctggactttcatctgtctcagagtgcgttgtactggaccgacgtggttgaagacaagatatatagaggaaaactactggacaacggggctcttacaagcttcgaggtggtgatccaatacggccttgcgacacccgaaggactggcagttgattggattgccggcaatatttattgggtcgagtccaaccttgatcaaatagaagtagccaagttggatggcacattaagaaccaccctgttagctggggacatagagcacccccgagcgatcgcactggacccacgggatggtatcttgttttggactgactgggacgccagcctgcccagaatcgaggccgccagcatgtccggtgctgggcggagaactgttcatcgggaaactgggagtgggggatggccgaacggccttaccgttgactatctggagaagagaatcctgtggatagacgcccgctccgatgccatctactccgctcgatacgacggctctggccacatggaagttctgaggggccatgagttcctctcccaccctttcgcggttactttatacggaggagaagtgtattggactgactggagaacgaataccctggcaaaagcaaacaaatggactggtcacaacgtgaccgtggtccagaggactaacacgcagcccttcgatctgcaagtctaccaccccagcaggcaaccgatggcgccaaacccgtgcgaggctaacggcgggcaggggccctgctcccatctgtgcctgatcaattataataggactgtgtcctgcgcttgcccgcacctaatgaagctgcacaaggacaacaccacctgttacgagttcaagaaattcctgctctacgcacgacagatggagatacgaggcgtggatctcgatgcaccgtactataactacattatttcgtttacagttcccgacatagacaacgtcaccgtgctggactacgatgcccgtgagcagcgggtatactggtctgacgtcagaacccaagcgattaaacgcgcgtttatcaatggcacaggtgtggagacggtggtatcggcggatttaccaaacgcacacgggctggcggtggactgggtttccaggaacctgttctggactagctacgacaccaataagaagcagataaacgtggcccgactcgatggatcctttaaaaacgctgttgtccagggtttagagcaaccccacggccttgtggtacaccctctgcgaggtaaactatattggacagacggcgataacatttctatggctaatatggatggaagtaacagaacgcttcttttttctggccaaaaggggcccgtcgggctcgccatcgatttcccggaatccaagctctattggataagtagcggtaatcatacgattaatcggtgtaatcttgacggttcaggcctggaggtgattgacgctatgcgctctcaattggggaaggcgaccgccctcgcaataatgggagataaactttggtgggctgaccaagtctccgagaagatgggcacctgctccaaagctgatgggtccggcagtgttgtcttacggaacagtactaccctcgttatgcatatgaaggtgtacgacgaaagcattcagttagatcataagggcaccaacccctgctcagtgaacaatggcgattgcagccagctgtgtctgccaacctctgaaaccactaggagctgcatgtgcactgccggctactccctgaggtctggccagcaggcgtgtgagggagtcggctcctttctgctgtactccgtgcacgaagggattcgaggcattcctcttgacccaaatgacaagagcgatgccctcgtgccagtgagtggcacctctctggccgttggcatcgacttccacgccgagaacgatacaatctattgggtggacatgggactatcaactatcagccgggctaaacgggaccagacttggagagaagatgtagtcaccaacggtattggtcgagttgaaggaattgctgtggattggatcgctggaaacatctactggactgaccagggcttcgatgtgatcgaggtggctcggctcaatgggtcatttagatacgtggtcatttctcaaggcctggacaagccacgcgctataacggtacatcccgaaaaaggatatctgttctggactgagtggggacagtaccctcgtattgagaggtctcgcctggacgggaccgagcgcgtggttctggtgaacgtatctataagttggcccaacggcatctctgttgactaccaagacggcaagctgtattggtgcgacgcccggaccgacaaaatagagcgcatcgatctggaaaccggagaaaatcgcgaagttgtcctttcatctaacaacatggacatgtttagcgtgagtgtgttcgaagacttcatctactggtctgatcggacacacgctaatggtagtattaagcgtggcagcaaggacaacgccactgacagcgttccactgcggaccggcataggggtacaactcaaggacatcaaggtgttcaatcgggataggcagaaaggaacaaatgtatgcgccgtggccaacggaggctgccaacaactgtgtttgtatcgcggacgcggacaacgagcttgcgcctgcgctcacggaatgctggccgaagacggggcctcttgccgggagtatgccggttacttgctgtacagcgagagaacaatccttaaaagcatccacctgagcgatgaacgtaatctcaacgcccctgtgcaacccttcgaagatccggagcacatgaaaaacgtgattgccttagcttttgactaccgggcgggtacatccccagggacccccaaccggatcttcttttctgacatacatttcgggaacattcaacagattaacgacgatggctctcgccggatcacgatcgtggagaacgtgggctctgtcgaagggctggcataccaccggggctgggacacactgtattggaccagctacacgacatccaccattacacggcacacagttgaccaaaccaggcccggtgccttcgagcgggaaaccgtgatcacaatgagcggtgacgatcatcctcgggcgttcgtgctcgatgagtgtcagaatctgatgttttggactaattggaacgagcagcaccccagtattatgcgcgcagctctcagtggggcgaacgtgctgactctgattgaaaaagatatcagaactcccaacgggctcgccatagatcacagggcggaaaaactgtatttttccgacgcaactcttgataagattgaacgctgtgaatacgatggctcccaccgctatgtaatactgaaaagcgaaccggttcaccccttcggtttggccgtgtacggtgagcacatcttctggaccgattgggtccgccgtgctgtacagcgtgctaataagcacgtcgggagtaacatgaaactgctgagagtagatatcccccagcagccaatgggcattatagctgtggcaaacgacaccaacagttgcgagttaagcccctgtagaataaataatggagggtgccaagatctgtgtctgctgactcatcaaggccatgtgaactgtagttgtcgcggcggcagaattctgcaggatgacctcacatgtcgtgctgtgaactcttcatgtagggcacaagacgaatttgaatgtgccaatggagagtgtattaacttcagccttacttgtgatggggtaccccattgcaaggataagagcgacgagaaacctagctactgcaatagcagaaggtgcaaaaagacgtttcgacagtgttctaacggccggtgcgtcagcaatatgttgtggtgtaacggcgcagacgactgtggagatggctccgacgagattccctgcaacaagacagcctgcggagtgggcgaattccggtgtcgtgacggtacctgtatcgggaatagcagtcggtgcaaccagttcgtggattgcgaggacgcctcagatgagatgaactgctccgccacagattgctctagctacttcagacttggcgtaaagggcgtactattccagccatgcgaaaggacaagcctgtgctatgcgccttcttgggtctgcgacggtgccaatgactgtggtgattacagcgatgagcgcgattgcccgggtgtgaagagaccccgctgtcctctaaactactttgcctgtccctccgggaggtgtatccccatgagttggacatgcgacaaggaggacgattgtgagcacggagaagatgagacacattgtaacaaattttgctccgaagcccagttcgaatgtcaaaatcatcgatgcatttccaagcaatggctgtgtgacgggagcgatgactgcggagacgggtccgacgaagccgcccactgcgagggtaagacttgcgggccctcctccttttcttgtcccgggacgcacgtttgcgtgccagagagatggctatgtgacggagacaaggattgtgctgatggcgctgacgagtccatagctgccggatgcctgtacaatagtacctgtgatgatagagaattcatgtgccagaaccgtcaatgcatccctaaacactttgtctgtgaccatgatagggactgtgcagatggtagcgacgagtcaccagaatgcgagtatcctacttgtggacctagcgaatttcggtgtgctaacgggcgttgtctttcgagcaggcaatgggaatgtgacggcgaaaacgactgccatgatcaatctgatgaggctccgaagaacccgcactgtacgagccaggagcataagtgcaacgccagcagtcagttcctgtgttcttcaggaagatgcgtggccgaggctctcctttgcaacggacaagacgattgcggtgactcctcggatgagcgcggatgccacatcaacgagtgcctttcccgcaagttgtctggctgcagccaagactgtgaggacctgaagattggcttcaagtgcaggtgccgaccaggatttcgtctcaaggatgatgggcggacatgcgcagatgtggacgaatgcagtactacattcccctgtagccaaaggtgtattaacactcacgggtcctacaagtgcctttgtgtcgaaggctatgcaccacgagggggtgacccacactcgtgcaaggcagtgactgacgaggagccattcctgatattcgccaatcggtactatctgagaaaattaaacttggacgggtcaaactatacactgcttaagcagggactcaacaacgccgttgcacttgactttgattaccgagaacaaatgatctattggacggatgttactacccagggatcgatgatacgtcggatgcatctgaacgggtctaacgtccaagtgttgcatagaacagggctatctaatccagacggactcgccgtggactgggttggaggaaatctgtactggtgcgataaaggaagggacacaatcgaggtgtcaaagttgaatggcgcctaccgcactgtgctcgtatcatccgggctgagagagccccgggctttggtcgtcgatgtgcagaatggctacctgtattggacggattggggggaccacagcttaataggccggattggaatggatgggtcctcccgaagtgttatagtggacaccaagatcacctggcctaatggccttacccttgattacgttaccgaaaggatttattgggccgacgccagggaagactacatcgaatttgcttccctggatggtagtaatcgacacgtggtgctatcacaggacataccacatattttcgccctcaccctgttcgaggattatgtgtactggacagactgggaaaccaagagtattaaccgggcccataaaactacaggaaccaataaaaccctgcttatatccactttgcatcggcctatggacctgcatgttttccacgctctgcgacagccagacgtgccaaatcacccctgcaaagtgaacaacggtggttgttctaatttatgcctcctgtcccccggcggtgggcataagtgtgcttgccctacaaacttttatctgggttcagatgggcgcacatgcgtctccaattgcactgccagtcaatttgtgtgtaagaatgacaagtgcatcccattctggtggaaatgcgacaccgaggatgattgcggagaccactcggatgaaccccccgattgtccggagtttaagtgtaggcccggacagtttcaatgtagcacagggatatgtacaaacccggcctttatctgtgacggtgataacgattgccaggacaacagcgatgaagccaattgcgacatccatgtctgtctgcctagccagttcaagtgtaccaacacgaaccggtgtatcccaggcatttttcggtgtaatggacaggacaattgtggagatggtgaggacgaacgggactgtccagaagtcacttgcgcccctaaccagttccagtgcagtattacaaaaagatgcattccccgggtgtgggtctgtgacagagataacgactgcgtagacggttccgatgaaccggccaattgcactcagatgacttgcggcgtcgacgaattccgctgcaaagatagcggaaggtgcatccccgcgcgatggaaatgtgacggcgaggatgactgcggggatgggtctgacgagcctaaggaggagtgcgacgaacgcacctgtgagccataccaatttagatgcaaaaataaccgatgtgtgcctgggcggtggcaatgtgattacgataacgattgcggagataatagtgacgaagaatcctgtactccacggccttgttcagaatcagagttctcctgcgccaacggacgctgtattgctggccggtggaaatgcgatggtgaccacgattgcgccgacggttctgacgaaaaagactgtaccccaagatgcgatatggaccagttccagtgtaagagcggtcattgtattcctctgcgatggcgttgcgatgctgacgcagattgcatggatgggtcagacgaagaagcttgcggcacaggggtgcggacatgccccctcgacgagttccagtgtaataatacactttgtaagccactggcgtggaagtgcgacggcgaagacgactgcggcgacaacagtgatgagaatccagaagaatgcgccaggtttgtgtgtcctccaaacaggccttttaggtgcaagaatgaccgggtttgcctttggatcgggcggcagtgtgacgggacagataattgcggtgacgggactgacgaagaagactgtgaacccccgactgcccacacaacacactgcaaagacaagaaagaatttctgtgccgtaaccagcgttgtttgagttcttccctacgatgcaatatgttcgatgactgtggggacggctcagatgaggaagactgttccattgacccaaaactgacatcatgcgcaaccaatgcctccatttgcggggacgaagcccggtgcgtgcggaccgaaaaagcggcttactgcgcctgccgcagcggctttcatacagtcccaggacagcccgggtgccaggacattaacgagtgcctaagatttggtacctgtagccagttatgtaataacaccaagggtggccacctgtgttcatgcgccaggaacttcatgaagacacacaacacttgcaaggctgagggaagcgaatatcaggtgctgtatattgccgatgataacgaaatccggtcactctttccaggacacccacactcagcctacgagcaggcatttcaaggggacgaaagtgtgcgaatcgatgctatggacgttcatgtcaaggcgggccgtgtttattggacgaattggcatacaggcacgatcagctatcgatccctccccccggccgctccccccactacgagtaataggcaccggagacagattgacagaggtgtcacacacttgaacatctccggcctgaaaatgcctcgcgggatagccattgactgggtagctggcaacgtatactggaccgacagcgggcgcgacgtaatcgaagtggctcagatgaagggtgagaaccggaagaccctcatctcaggaatgatagatgaaccccacgccatcgttgttgacccactgcgggggacgatgtattggagtgactggggaaatcatcctaagatcgagaccgccgcgatggacggaacattacgggaaacactcgttcaggataacattcagtggccaactggcctggcagtggattatcataatgagcgtctttattgggccgatgccaaactctccgttattgggtcaattagactcaacggaacagaccctatagtcgccgccgactctaagcggggactgtctcatcctttctccattgatgtgtttgaggattatatttacggtgtaacgtacatcaacaaccgggttttcaaaatccataagtttggccatagtccactggtcaacttaactggagggctaagtcacgcttctgacgtcgtactttaccaccagcacaaacaaccagaggtcaccaatccttgcgatagaaaaaaatgcgaatggctgtgcctcttgtcaccttccggacccgtatgtacatgtcccaacggtaagcgcctggataacggcacttgcgttcccgtaccatctcctacaccgccccccgacgctccccggcctggaacatgtaaccttcaatgtttcaatggggggtcctgttttctgaacgcccgccgccaacccaaatgtcgatgccagcctagatataccggcgacaagtgtgagctcgatcagtgttgggaacattgcaggaatgggggaacctgcgccgctagccctagcggcatgccaacctgtagatgtcccaccgggttcacaggccctaaatgtacccagcaggtttgcgccggctattgtgccaataactctacctgcaccgtcaaccaaggcaaccagccccagtgtaggtgcctgcctggcttccttggtgatagatgtcagtacagacagtgttctggttactgtgaaaactttggaacttgccagatggccgccgacggtagcaggcagtgccggtgcacagcatattttgagggctcaagatgtgaagttaacaaatgtagtaggtgtctggaaggcgcctgtgtggttaataagcagagcggagatgttacctgcaattgtacagacgggagagtggctccgtcttgtctgacctgcgtcggacattgtagcaacggtggatcctgtacaatgaacagtaaaatgatgccagagtgtcagtgccctcctcacatgacaggaccccggtgtgaggaacacgtatttagccagcagcagcctggccacattgcctctattttgattcctctgttgctacttctgttactcgtgttagtggctggggtggtcttttggtataaaaggcgcgtacaaggtgccaagggcttccagcatcaaaggatgacaaatggcgccatgaacgtggagataggtaatcctacatacaagatgtacgagggaggggaacccgatgacgtgggcggccttctcgacgccgactttgccctcgaccctgataagccaactaacttcacaaaccccgtgtatgcgacactgtacatgggaggacacgggtcacgtcactccctggcgtccacggatgagaaaagggagctcctgggacgggggcctgaagacgagatcggcgatcctctggcgtag

SEQ ID NO: 127546 - DNA, 13635 bp, Artificial Sequence
  derived and/or modified sequence
atgctgactcctccattacttttactgctaccattgctctccgccctggtggctgcagcgattgacgcacccaagacatgttcaccgaagcagttcgcctgtcgtgatcaaataacttgtatcagcaagggttggcggtgcgatggcgaacgcgattgcccggacggctcagatgaggctcccgaaatttgtccccagagtaaggcccagagatgtcagccaaacgagcacaactgcttgggtaccgagctgtgtgtgcccatgtctaggttgtgcaacggagtacaggattgtatggatggatctgacgaaggacctcattgccgtgagctccaggggaattgtagtaggctggggtgccaacatcactgtgtgccgacacttgacggcccaacctgttactgtaattccagctttcagttacaagcagacggcaaaacatgtaaggatttcgatgagtgtagcgtgtatggtacctgcagccagctgtgtaccaatacagatgggtcattcatttgcgggtgcgtggagggatacttactgcaacccgataatcgatcttgtaaggctaagaatgaacctgtggacagacccccagtgctcctcatagcaaattcacagaacattctcgctacctatctatcaggggcacaagtcagcacaataacccccacctctacccggcagacaacagcgatggacttcagctatgcaaatgagacagtatgttgggtccatgttggggacagtgccgctcagacacagcttaagtgcgcccgaatgcctggcctgaaaggctttgttgacgaacatactatcaatatctctttgtccctgcaccatgttgagcagatggcaatcgattggctgaccggcaacttctactttgtggacgatatcgacgaccgcatttttgtctgcaatcgcaacggagacacctgcgtaaccctcctggatctagaactttataatcctaagggcattgcgttagatccagctatgggaaaggtgttctttaccgactatggacagatccccaaggtggaacgctgcgatatggacggacaaaaccggaccaaattagtcgactcaaagatcgtattcccccatggaattactcttgacctcgtttctaggctggtctactgggcggacgcctacctcgactatattgaagtggtggattacgaggggaagggccgacagaccatcattcaaggaatccttatcgaacacctctatgggctcacggtgttcgagaattacctctacgccaccaacagcgacaatgcaaatgcgcagcaaaagacttctgtgatccgcgtgaataggttcaatagtaccgagtaccaagtcgtgacacgggttgataaaggaggggcattacacatttaccatcagcgcaggcagcccagggtccggtctcatgcgtgcgaaaatgatcagtacggcaagccgggagggtgctcagacatctgccttctcgcgaactcccacaaggcacggacctgtagatgccgaagtggtttcagtctgggctccgacggcaaaagctgcaagaagccagagcacgagctgtttttggtatacggtaaaggccgtcccggtataatccggggaatggacatgggggctaaagtcccagatgagcatatgattcccattgaaaacctgatgaacccccgtgcccttgactttcacgccgagactggttttatttatttcgctgacaccacatcttatctcatagggagacagaaaatcgacggcacagagagggaaacaatcctgaaggacggtatccacaatgtcgaaggggtcgccgtggactggatgggtgataatttgtactggaccgacgacggtcccaagaaaacaatctccgttgcccgactagagaaagcggctcagacaagaaaaacacttatcgaaggcaagatgactcacccgagggcaatcgtagtagacccccttaacggctggatgtactggaccgactgggaagaggatccaaaagactcgagacgaggtaggctggaacgtgcttggatggacggatctcatcgggatatctttgttactagtaagactgtgctttggcctaatggcctgagcctcgatatccccgctggcaggttgtactgggtggacgccttttacgacagaattgagactatacttcttaatggtaccgaccgaaaaattgtctacgaaggacccgagcttaaccacgcatttgggctctgccaccacgggaactatctcttttggacagagtatcgttctgggtcagtttatcggctggagaggggcgtaggcggagctccacctactgtgacgctacttcgtagcgagcgcccacccatcttcgaaattaggatgtacgatgcgcagcagcagcaggtcggaaccaacaagtgcagggtgaacaatggcggatgcagcagcctgtgtctggctaccccaggaagcaggcagtgcgcatgcgccgaagaccaagtgctggacgccgatggcgtcacatgcctcgcgaaccccagctacgtcccgcctccgcagtgccagccaggggagttcgcctgcgccaatagcaggtgcattcaggaaaggtggaaatgcgatggagacaacgattgcctggacaacagcgacgaagctcctgccctctgtcaccagcacacctgcccttcagatagatttaagtgtgaaaataatcggtgcataccaaacaggtggttgtgcgatggggataatgattgcggcaactctgaagacgagagcaacgccacatgcagtgctcgcacttgtccccctaaccagttctcctgtgcgtctggacggtgcatacccatctcctggacttgcgacctcgatgatgattgtggcgataggtctgacgaatcagcttcttgcgcctatccgacctgctttccactgacgcaattcacctgcaataacggcagatgcatcaatatcaactggaggtgcgataacgataatgactgcggagataactccgatgaagctggttgttcacactcatgttcttcaacccagttcaagtgcaattccggcaggtgtatccctgagcactggacctgtgatggggataacgattgtggggactattcagatgagacccacgcaaattgtacaaaccaggctacacggccacctgggggttgccacacagatgagtttcaatgtagacttgacggcctgtgcataccattgagatggaggtgtgatggcgataccgattgcatggattctagtgatgagaagtcctgcgagggcgttactcacgtgtgtgatccaagcgttaaattcgggtgcaaggattcagcccgatgcatttccaaagcctgggtttgcgacggagataatgattgcgaggataactcagacgaggagaactgcgagagcctcgcgtgtcggccaccctcccacccatgtgccaacaacaccagcgtgtgcctgccccctgacaaactctgcgatgggaatgatgattgtggcgatggcagcgacgaaggagagttatgtgaccaatgctcacttaataacgggggttgctcacacaattgctctgtcgcacccggagaagggattgtgtgcagttgtcctcttgggatggaattaggtcctgacaaccacacatgtcagattcagtcttattgcgccaaacatctgaagtgcagccagaagtgtgaccagaataagttttccgtgaaatgcagctgctacgaggggtgggtcttggaaccagatggtgaatcatgtagatctctcgatcctttcaagcccttcatcattttcagcaacagacatgagattagaaggatcgacctgcataagggtgattactcagttctggtgccagggctacgcaataccatagcactggacttccacttgtcgcagagcgcgttgtactggaccgatgtcgtggaggacaagatttatcgcggtaaactcctcgataacggggctctcactagcttcgaagttgtcatacaatacgggttagccacccctgagggtcttgcagtggactggattgccggtaacatatattgggtggagtcaaatctggaccagatcgaggtagcgaaactcgatggcactctccggactacattactggccggtgacatcgagcaccctcgcgctattgcgctggatcctcgggatggtatcctcttttggacagactgggacgcctctctaccacgcatcgaggccgcttctatgagtggagccggacgcaggacagtacacagagaaaccggttccggaggctggccaaacggactgactgtagactatcttgagaagagaattctgtggatagacgctagaagtgacgctatatacagcgcaaggtatgacgggtcggggcatatggaggtcctacgcggacacgaattcctgagccacccgttcgccgtaaccttgtacggcggtgaagtctactggaccgactggcgcacaaataccctggcaaaggcaaacaagtggacaggccacaacgtcacagtcgtccagcgaacaaatacccagcctttcgatttacaggtatatcacccgtcgcggcaacctatggccccaaacccctgcgaggctaatggagggcaagggccttgttcgcatctgtgcctcatcaattacaacaggaccgtcagctgcgcctgtccgcatttgatgaagctccacaaagacaacactacctgttatgagtttaagaagttcctcttatatgcacgtcaaatggagattcggggtgtggatctggacgccccatattataactatattatctcctttactgtccctgatattgataatgtgacagtccttgactatgacgcaagagagcagagagtgtactggtccgatgttcggacccaggctattaagcgtgcattcattaacgggactggcgtggagaccgtggtaagcgccgatctccctaacgcacatgggcttgcggtcgattgggtgtccaggaatttgttttggacatcatatgacacaaataaaaagcagatcaacgtggctagacttgatgggtccttcaagaatgcagttgtgcaaggtctggaacagccccacggcctcgtggttcaccccttaaggggcaaactgtattggacagacggggacaatatttctatggctaatatggatggctcaaacaggacccttcttttttccgggcagaaaggacctgtcggcctggccattgattttccagagtccaaactgtactggatttcatcaggaaaccacacaatcaaccgctgcaacctggatggctccggcttggaggtgatagacgcgatgagatctcagttagggaaagcgaccgcactggctatcatgggagataaactgtggtgggccgaccaggtgtccgaaaagatgggcacttgctcaaaggctgacggctccggaagcgtggtgcttagaaactctacaacgcttgtgatgcacatgaaggtctatgatgagtctatacagctagatcacaaaggcacgaacccctgttcagttaataatggcgactgcagtcaactgtgtctccccacgtcagaaaccaccagatcatgcatgtgtacagctggctactcactcaggtccggccagcaggcatgtgagggcgtgggaagttttctgctgtactccgtgcacgagggcatccggggtatccctcttgacccgaatgataaatctgatgctctggtgccggtgagcggcacctccctggctgtgggcatagattttcacgccgaaaacgacacgatttattgggtagacatggggctctccacaatttctagagctaaaagagatcagacatggagggaggacgttgtgaccaacggtatcggacgggtcgagggaatcgctgtcgattggattgccggtaacatctattggacagaccagggattcgacgtaatcgaggtggccaggctgaatggatccttcaggtacgtcgttatctctcaaggcctcgataaacctcgcgcaatcaccgtgcatccagagaaggggtatttgttttggacagagtggggccagtacccacggatcgagaggagcagactggacggaaccgagcgagtggtacttgttaatgtgtccatcagttggccaaacgggatctctgtggattatcaagatggaaagctgtattggtgcgacgcacgcacagataagatcgagcgcatcgatctcgagacaggcgaaaacagagaggtggtgctcagtagcaacaacatggatatgttttccgtttccgtgtttgaagactttatttactggtctgatcgcacccatgccaatggatcgatcaagcgcggatccaaggacaacgcaacagactccgtaccgctgcgaacaggtatcggggtgcagctcaaggatattaaggtctttaatagagaccggcagaaaggaaccaacgtctgcgctgtggcaaacggcggatgtcagcagctttgtctctataggggcagaggccagcgggcttgcgcctgtgcacacggtatgctggcagaagatggcgcatcctgccgcgagtacgcgggatatctgctctacagtgagagaaccatcctgaaatcaattcatctgtccgatgagaggaatctgaacgcacccgtgcaaccctttgaagacccagagcatatgaagaatgtcatcgcgctggctttcgattaccgagctggcaccagccccggtacaccgaatcggatttttttctcagacatccactttggcaacatccaacagatcaacgatgacggttcacgtaggatcacaattgtcgaaaacgtgggcagtgttgaaggtctggcgtaccaccggggttgggataccctgtactggacaagctacactactagtacgatcacaaggcacactgtcgaccaaacccgcccaggagcatttgagagggagacagtaattaccatgtctggagacgatcaccccagggcttttgtcctcgacgagtgtcagaacctgatgttctggactaactggaacgaacagcatccctcaattatgcgcgctgcattatctggagcgaatgtcctgaccctgatcgaaaaggacatacggaccccaaatggattagccatcgaccaccgggcagagaagttgtacttctctgacgccactctagacaaaatcgaacggtgcgaatacgacgggtcccaccgctacgtgatcctgaaatccgagcccgtgcacccgttcgggctggcagtctatggcgagcatattttttggacagactgggttaggcgggcagtacagagggccaacaaacatgtggggtctaacatgaaattgctgcgcgtggacatcccacagcagccgatgggcattattgctgtggctaatgataccaactcctgcgagttatctccttgtcggatcaacaacggcggttgtcaggatctgtgcctgctgacccatcagggccacgtgaactgttcgtgcagaggagggagaattcttcaggacgatcttacctgcagagccgtcaactcctcttgcagggcgcaggatgaatttgagtgcgccaacggtgagtgcatcaattttagtctgacttgcgatggcgttccgcactgtaaagacaagtcagacgaaaagcctagctattgtaactctaggagatgcaagaagacctttcggcagtgtagcaatggcagatgtgtaagcaacatgctctggtgcaatggcgcagacgactgcggtgacggtagcgatgagatcccttgcaataaaacagcatgcggtgtgggggagtttcgatgtcgcgatgggacctgtatcggcaacagcagcaggtgtaatcagtttgtggactgcgaggacgcaagcgacgagatgaactgctccgccactgattgttctagctacttcagacttggtgtgaaaggcgtgctgtttcagccctgcgaacgcacctcgctttgttatgccccatcatgggtgtgcgacggtgctaacgactgtggcgactatagtgacgagcgagattgccctggggtcaagcgcccacggtgtccacttaactacttcgcctgtccctccgggaggtgcatacctatgtcatggacttgcgataaggaggatgattgtgagcacggagaggacgagacgcactgtaataagttctgctccgaagcccagttcgagtgccagaatcatcgatgcatctctaaacagtggctgtgcgacggcagcgacgattgcggcgacggaagcgacgaagccgcacactgcgaaggtaaaacttgcggtccaagcagctttagctgtcccggtacgcatgtgtgcgtcccagagcggtggttgtgcgacggggacaaggattgcgcagacggggctgacgagtctattgcagctgggtgtctttacaattccacctgcgatgatcgcgaatttatgtgtcagaacaggcagtgtatccctaagcatttcgtgtgtgatcacgatcgcgattgtgcagatggcagcgacgaatcgcccgagtgcgagtatccaacctgcggaccaagtgaattcaggtgcgccaatgggcgatgcctctcatctagacagtgggagtgcgatggcgagaatgattgccacgaccagagcgacgaggcccctaagaatccccattgtacatctcaagagcataagtgtaacgcctcttcacaatttttgtgctcctcaggacgatgcgtggccgaagcccttctctgtaatgggcaggatgattgcggagattcatccgatgagcggggttgtcacatcaacgagtgcttaagccgcaagctgagtggatgctcacaggactgcgaggacttgaagataggctttaagtgccgctgccggcctggctttaggcttaaggacgacggcagaacctgcgccgacgttgacgagtgcagcacaaccttcccgtgcagccaaaggtgcatcaatacccacgggagctacaagtgcctgtgcgtggagggttacgcccctcgaggcggtgatcctcattcctgtaaggctgtcaccgatgaggaaccattcttgatattcgcaaatcgttactacttgcggaagctgaacttggatggatcaaactatacgcttctgaaacaggggctcaacaacgccgtggcactggattttgactatagagagcagatgatctattggacagatgtgaccacacaaggtagtatgattagaaggatgcatcttaacgggtccaatgtccaggtgcttcacaggactggcctctccaatcctgacggactggcggtcgattgggtcggaggtaatctgtactggtgcgataaaggcagagataccattgaagtgtctaagttaaacggtgcttaccggacagtgctggtctcctctggtctgcgggagccccgagctctcgtagttgatgtgcagaatgggtatttgtactggaccgattggggcgatcacagcctgatcggcaggatcggtatggatggaagcagccgtagtgttattgtagacaccaaaattacttggcctaatgggctgaccctcgattatgttactgagcggatctactgggctgatgcacgagaagattacattgaatttgcttctttagacgggagtaatcggcacgtggtgttatcccaggacattcctcacatcttcgctctgaccctgtttgaggactatgtttattggactgactgggagactaagtctatcaaccgagcccacaaaacgaccggcaccaacaagaccttgctaatcagcaccctgcacagacccatggacctgcatgtctttcacgcgctgcgacagccagatgtgcccaatcacccttgtaaagtgaacaacggcggttgcagtaatttgtgtttgctcagccccggaggtggccacaaatgtgcatgtcccaccaatttttacttgggttcggacggtcgcacatgtgtgagtaattgcaccgcctcccagtttgtgtgcaagaacgacaaatgcataccgttctggtggaagtgtgatacggaggacgattgtggggaccactctgacgaaccccctgactgtccggagtttaaatgtcggccaggccagtttcagtgctccaccgggatctgtaccaacccagcttttatatgcgacggagacaatgattgtcaagataacagcgatgaagctaattgtgacatccacgtgtgcctgcctagccagtttaagtgcaccaatactaacaggtgcatcccaggtatcttccgctgcaacgggcaggacaattgcggggatggtgaggatgaacgcgattgtcccgaagttacctgcgcacccaatcagtttcaatgctccattaccaaacgctgcataccacgagtttgggtgtgcgacagggacaatgattgcgtggacgggtcggatgagcctgccaactgcacccaaatgacgtgtggcgtggatgaatttcgatgtaaggacagtggtcggtgtattcctgccagatggaaatgcgacggtgaagatgactgtggcgatggcagcgacgagccgaaggaggaatgcgacgaacgcacatgtgagccttaccagtttcgatgcaagaataaccgctgtgtacccggaagatggcagtgcgactatgacaatgactgcggcgacaacagcgatgaggagtcctgcacacctcggccttgctccgagtcagagttttcatgtgccaatgggaggtgcatagctggcaggtggaagtgcgacggcgaccatgactgtgccgatggtagcgacgagaaagattgtacaccacgttgcgatatggatcagttccagtgcaagtcaggacactgtatcccactgcgttggcggtgcgacgcggacgccgactgtatggacggatccgatgaggaggcatgcggtactggcgtccgcacttgtccccttgatgagtttcagtgcaataatacactttgcaagccactagcgtggaagtgtgacggcgaagatgattgcggggacaattccgacgaaaaccccgaggaatgcgccagattcgtgtgcccacctaacaggccctttcgatgcaagaacgaccgagtgtgcctgtggattggacggcaatgtgacggcacagataattgtggagacggcacggacgaagaggactgcgaacctccaacagcgcatactacccattgcaaagacaaaaaagaattcctgtgtagaaaccaaaggtgccttagcagcagtcttaggtgcaacatgttcgacgactgtggcgacggttcagatgaggaagattgcagcatcgatcccaagctgactagctgtgcaacaaatgcgtcaatctgtggcgatgaggctagatgcgtgaggaccgaaaaggctgcttactgcgcctgtcgcagcgggttccataccgtccctggacaacctggttgtcaggacatcaatgaatgcctgcggtttggtacatgctctcagctgtgtaataacacgaaaggagggcacctgtgttcctgcgctcgaaattttatgaagacacacaacacctgcaaggcagagggatccgagtaccaggtgttatatatcgctgacgataacgaaattcgctccttgtttccagggcatcctcattcagcttatgagcaggctttccagggcgacgagagtgttcgcatcgacgcaatggacgtccacgtgaaagccggaagagtttactggaccaattggcacaccggcaccatatcttataggagcctacctcccgctgcccctcctaccacttcaaatagacatagacggcagattgaccggggagtgacacatctcaatattagcggactaaagatgccaaggggtatcgccattgattgggtcgctggaaatgtttactggaccgattctggacgtgacgtgatcgaggtcgcgcagatgaagggagaaaatcgcaaaaccttgattagcgggatgatagacgagccccatgcaatcgtggtagacccccttcgtgggactatgtattggtctgactgggggaatcatccgaaaatcgagactgctgctatggacgggacccttagggaaacactggttcaggataacattcagtggcctacgggtctcgccgttgattaccacaatgaacggctgtattgggccgacgctaagctgtcagttatcggatccatcagactgaatggcactgaccctattgtggcagccgacagtaaacggggtttaagccacccctttagcatcgacgtgtttgaggactatatctacggtgtaacatacattaacaaccgggtgttcaaaatccacaagtttggacatagccctctggtgaatttaaccggcggactctcccatgcatcggatgttgtgctgtatcaccagcacaaacagccagaggtcaccaatccctgcgacaggaaaaaatgcgagtggctgtgtctgctcagcccttcaggcccagtctgtacctgccctaacggtaagcgtttagataatgggacgtgtgtgcctgtgccgtccccaacccctccaccagatgctcccaggccaggcacttgtaacctacagtgcttcaatggaggatcttgttttcttaacgctcgcagacagcccaagtgtcgttgccaacccaggtacaccggggataaatgcgagctggatcagtgctgggaacactgtagaaacgggggtacatgtgctgcttcaccctcagggatgcccacttgtcgttgccctaccggatttaccggccctaagtgtacccaacaagtgtgtgcagggtactgcgccaataatagtacctgtacagttaatcaggggaaccagccgcaatgtcgatgcctgccaggtttcctgggagatcgctgccagtacagacagtgcagcggctactgtgagaattttgggacatgtcaaatggcagccgacggatccaggcagtgccgctgcactgcatatttcgaaggttccaggtgcgaggtcaacaagtgtagccggtgtctcgaaggagcctgcgtggtaaacaaacagtctggggacgtcacctgcaattgcaccgacggacgggtggcacctagttgtctgacttgtgttgggcactgctccaacgggggatcctgtactatgaacagcaagatgatgcctgagtgccaatgcccaccccacatgacagggccacgatgtgaggagcacgttttctctcaacagcagcctggccacattgctagcattttaattcctttactgctgcttctgctgctggtcctggtggcgggtgtggtattctggtacaaacgcagggtccagggtgccaaggggttccagcatcagcggatgaccaacggcgctatgaacgtggaaatcggaaaccctacctataaaatgtacgaaggcggagaacccgacgatgttggcggtttgctggacgcggactttgccctggaccctgataaacctaccaatttcactaatcccgtatacgcgacactctacatggggggacacgggtcccgccattcccttgcttcgaccgatgagaaacgtgaacttctcggccgaggcccagaagatgaaatcggggatcctttggcttac

SEQ ID NO: 127547 - DNA, 13635 bp, Artificial Sequence
  derived and/or modified sequence
atgctgaccccccccctgctgctgctgctgcccctgctgagcgccctggtggccgccgccatcgacgcccccaagacctgcagccccaagcagttcgcctgcagagaccagatcacctgcatcagcaagggctggagatgcgacggcgagagagactgccccgacggcagcgacgaggcccccgagatctgcccccagagcaaggcccagagatgccagcccaacgagcacaactgcctgggcaccgagctgtgcgtgcccatgagcagactgtgcaacggcgtgcaggactgcatggacggcagcgacgagggcccccactgcagagagctgcagggcaactgcagcagactgggctgccagcaccactgcgtgcccaccctggacggccccacctgctactgcaacagcagcttccagctgcaggccgacggcaagacctgcaaggacttcgacgagtgcagcgtgtacggcacctgcagccagctgtgcaccaacaccgacggcagcttcatctgcggctgcgtggagggctacctgctgcagcccgacaacagaagctgcaaggccaagaacgagcccgtggacagaccccccgtgctgctgatcgccaacagccagaacatcctggccacctacctgagcggcgcccaggtgagcaccatcacccccaccagcaccagacagaccaccgccatggacttcagctacgccaacgagaccgtgtgctgggtgcacgtgggcgacagcgccgcccagacccagctgaagtgcgccagaatgcccggcctgaagggcttcgtggacgagcacaccatcaacatcagcctgagcctgcaccacgtggagcagatggccatcgactggctgaccggcaacttctacttcgtggacgacatcgacgacagaatcttcgtgtgcaacagaaacggcgacacctgcgtgaccctgctggacctggagctgtacaaccccaagggcatcgccctggaccccgccatgggcaaggtgttcttcaccgactacggccagatccccaaggtggagagatgcgacatggacggccagaacagaaccaagctggtggacagcaagatcgtgttcccccacggcatcaccctggacctggtgagcagactggtgtactgggccgacgcctacctggactacatcgaggtggtggactacgagggcaagggcagacagaccatcatccagggcatcctgatcgagcacctgtacggcctgaccgtgttcgagaactacctgtacgccaccaacagcgacaacgccaacgcccagcagaagaccagcgtgatcagagtgaacagattcaacagcaccgagtaccaggtggtgaccagagtggacaagggcggcgccctgcacatctaccaccagagaagacagcccagagtgagaagccacgcctgcgagaacgaccagtacggcaagcccggcggctgcagcgacatctgcctgctggccaacagccacaaggccagaacctgcagatgcagaagcggcttcagcctgggcagcgacggcaagagctgcaagaagcccgagcacgagctgttcctggtgtacggcaagggcagacccggcatcatcagaggcatggacatgggcgccaaggtgcccgacgagcacatgatccccatcgagaacctgatgaaccccagagccctggacttccacgccgagaccggcttcatctacttcgccgacaccaccagctacctgatcggcagacagaagatcgacggcaccgagagagagaccatcctgaaggacggcatccacaacgtggagggcgtggccgtggactggatgggcgacaacctgtactggaccgacgacggccccaagaagaccatcagcgtggccagactggagaaggccgcccagaccagaaagaccctgatcgagggcaagatgacccaccccagagccatcgtggtggaccccctgaacggctggatgtactggaccgactgggaggaggaccccaaggacagcagaagaggcagactggagagagcctggatggacggcagccacagagacatcttcgtgaccagcaagaccgtgctgtggcccaacggcctgagcctggacatccccgccggcagactgtactgggtggacgccttctacgacagaatcgagaccatcctgctgaacggcaccgacagaaagatcgtgtacgagggccccgagctgaaccacgccttcggcctgtgccaccacggcaactacctgttctggaccgagtacagaagcggcagcgtgtacagactggagagaggcgtgggcggcgccccccccaccgtgaccctgctgagaagcgagagaccccccatcttcgagatcagaatgtacgacgcccagcagcagcaggtgggcaccaacaagtgcagagtgaacaacggcggctgcagcagcctgtgcctggccacccccggcagcagacagtgcgcctgcgccgaggaccaggtgctggacgccgacggcgtgacctgcctggccaaccccagctacgtgccccccccccagtgccagcccggcgagttcgcctgcgccaacagcagatgcatccaggagagatggaagtgcgacggcgacaacgactgcctggacaacagcgacgaggcccccgccctgtgccaccagcacacctgccccagcgacagattcaagtgcgagaacaacagatgcatccccaacagatggctgtgcgacggcgacaacgactgcggcaacagcgaggacgagagcaacgccacctgcagcgccagaacctgcccccccaaccagttcagctgcgccagcggcagatgcatccccatcagctggacctgcgacctggacgacgactgcggcgacagaagcgacgagagcgccagctgcgcctaccccacctgcttccccctgacccagttcacctgcaacaacggcagatgcatcaacatcaactggagatgcgacaacgacaacgactgcggcgacaacagcgacgaggccggctgcagccacagctgcagcagcacccagttcaagtgcaacagcggcagatgcatccccgagcactggacctgcgacggcgacaacgactgcggcgactacagcgacgagacccacgccaactgcaccaaccaggccaccagaccccccggcggctgccacaccgacgagttccagtgcagactggacggcctgtgcatccccctgagatggagatgcgacggcgacaccgactgcatggacagcagcgacgagaagagctgcgagggcgtgacccacgtgtgcgaccccagcgtgaagttcggctgcaaggacagcgccagatgcatcagcaaggcctgggtgtgcgacggcgacaacgactgcgaggacaacagcgacgaggagaactgcgagagcctggcctgcagaccccccagccacccctgcgccaacaacaccagcgtgtgcctgccccccgacaagctgtgcgacggcaacgacgactgcggcgacggcagcgacgagggcgagctgtgcgaccagtgcagcctgaacaacggcggctgcagccacaactgcagcgtggcccccggcgagggcatcgtgtgcagctgccccctgggcatggagctgggccccgacaaccacacctgccagatccagagctactgcgccaagcacctgaagtgcagccagaagtgcgaccagaacaagttcagcgtgaagtgcagctgctacgagggctgggtgctggagcccgacggcgagagctgcagaagcctggaccccttcaagcccttcatcatcttcagcaacagacacgagatcagaagaatcgacctgcacaagggcgactacagcgtgctggtgcccggcctgagaaacaccatcgccctggacttccacctgagccagagcgccctgtactggaccgacgtggtggaggacaagatctacagaggcaagctgctggacaacggcgccctgaccagcttcgaggtggtgatccagtacggcctggccacccccgagggcctggccgtggactggatcgccggcaacatctactgggtggagagcaacctggaccagatcgaggtggccaagctggacggcaccctgagaaccaccctgctggccggcgacatcgagcaccccagagccatcgccctggaccccagagacggcatcctgttctggaccgactgggacgccagcctgcccagaatcgaggccgccagcatgagcggcgccggcagaagaaccgtgcacagagagaccggcagcggcggctggcccaacggcctgaccgtggactacctggagaagagaatcctgtggatcgacgccagaagcgacgccatctacagcgccagatacgacggcagcggccacatggaggtgctgagaggccacgagttcctgagccaccccttcgccgtgaccctgtacggcggcgaggtgtactggaccgactggagaaccaacaccctggccaaggccaacaagtggaccggccacaacgtgaccgtggtgcagagaaccaacacccagcccttcgacctgcaggtgtaccaccccagcagacagcccatggcccccaacccctgcgaggccaacggcggccagggcccctgcagccacctgtgcctgatcaactacaacagaaccgtgagctgcgcctgcccccacctgatgaagctgcacaaggacaacaccacctgctacgagttcaagaagttcctgctgtacgccagacagatggagatcagaggcgtggacctggacgccccctactacaactacatcatcagcttcaccgtgcccgacatcgacaacgtgaccgtgctggactacgacgccagagagcagagagtgtactggagcgacgtgagaacccaggccatcaagagagccttcatcaacggcaccggcgtggagaccgtggtgagcgccgacctgcccaacgcccacggcctggccgtggactgggtgagcagaaacctgttctggaccagctacgacaccaacaagaagcagatcaacgtggccagactggacggcagcttcaagaacgccgtggtgcagggcctggagcagccccacggcctggtggtgcaccccctgagaggcaagctgtactggaccgacggcgacaacatcagcatggccaacatggacggcagcaacagaaccctgctgttcagcggccagaagggccccgtgggcctggccatcgacttccccgagagcaagctgtactggatcagcagcggcaaccacaccatcaacagatgcaacctggacggcagcggcctggaggtgatcgacgccatgagaagccagctgggcaaggccaccgccctggccatcatgggcgacaagctgtggtgggccgaccaggtgagcgagaagatgggcacctgcagcaaggccgacggcagcggcagcgtggtgctgagaaacagcaccaccctggtgatgcacatgaaggtgtacgacgagagcatccagctggaccacaagggcaccaacccctgcagcgtgaacaacggcgactgcagccagctgtgcctgcccaccagcgagaccaccagaagctgcatgtgcaccgccggctacagcctgagaagcggccagcaggcctgcgagggcgtgggcagcttcctgctgtacagcgtgcacgagggcatcagaggcatccccctggaccccaacgacaagagcgacgccctggtgcccgtgagcggcaccagcctggccgtgggcatcgacttccacgccgagaacgacaccatctactgggtggacatgggcctgagcaccatcagcagagccaagagagaccagacctggagagaggacgtggtgaccaacggcatcggcagagtggagggcatcgccgtggactggatcgccggcaacatctactggaccgaccagggcttcgacgtgatcgaggtggccagactgaacggcagcttcagatacgtggtgatcagccagggcctggacaagcccagagccatcaccgtgcaccccgagaagggctacctgttctggaccgagtggggccagtaccccagaatcgagagaagcagactggacggcaccgagagagtggtgctggtgaacgtgagcatcagctggcccaacggcatcagcgtggactaccaggacggcaagctgtactggtgcgacgccagaaccgacaagatcgagagaatcgacctggagaccggcgagaacagagaggtggtgctgagcagcaacaacatggacatgttcagcgtgagcgtgttcgaggacttcatctactggagcgacagaacccacgccaacggcagcatcaagagaggcagcaaggacaacgccaccgacagcgtgcccctgagaaccggcatcggcgtgcagctgaaggacatcaaggtgttcaacagagacagacagaagggcaccaacgtgtgcgccgtggccaacggcggctgccagcagctgtgcctgtacagaggcagaggccagagagcctgcgcctgcgcccacggcatgctggccgaggacggcgccagctgcagagagtacgccggctacctgctgtacagcgagagaaccatcctgaagagcatccacctgagcgacgagagaaacctgaacgcccccgtgcagcccttcgaggaccccgagcacatgaagaacgtgatcgccctggccttcgactacagagccggcaccagccccggcacccccaacagaatcttcttcagcgacatccacttcggcaacatccagcagatcaacgacgacggcagcagaagaatcaccatcgtggagaacgtgggcagcgtggagggcctggcctaccacagaggctgggacaccctgtactggaccagctacaccaccagcaccatcaccagacacaccgtggaccagaccagacccggcgccttcgagagagagaccgtgatcaccatgagcggcgacgaccaccccagagccttcgtgctggacgagtgccagaacctgatgttctggaccaactggaacgagcagcaccccagcatcatgagagccgccctgagcggcgccaacgtgctgaccctgatcgagaaggacatcagaacccccaacggcctggccatcgaccacagagccgagaagctgtacttcagcgacgccaccctggacaagatcgagagatgcgagtacgacggcagccacagatacgtgatcctgaagagcgagcccgtgcaccccttcggcctggccgtgtacggcgagcacatcttctggaccgactgggtgagaagagccgtgcagagagccaacaagcacgtgggcagcaacatgaagctgctgagagtggacatcccccagcagcccatgggcatcatcgccgtggccaacgacaccaacagctgcgagctgagcccctgcagaatcaacaacggcggctgccaggacctgtgcctgctgacccaccagggccacgtgaactgcagctgcagaggcggcagaatcctgcaggacgacctgacctgcagagccgtgaacagcagctgcagagcccaggacgagttcgagtgcgccaacggcgagtgcatcaacttcagcctgacctgcgacggcgtgccccactgcaaggacaagagcgacgagaagcccagctactgcaacagcagaagatgcaagaagaccttcagacagtgcagcaacggcagatgcgtgagcaacatgctgtggtgcaacggcgccgacgactgcggcgacggcagcgacgagatcccctgcaacaagaccgcctgcggcgtgggcgagttcagatgcagagacggcacctgcatcggcaacagcagcagatgcaaccagttcgtggactgcgaggacgccagcgacgagatgaactgcagcgccaccgactgcagcagctacttcagactgggcgtgaagggcgtgctgttccagccctgcgagagaaccagcctgtgctacgcccccagctgggtgtgcgacggcgccaacgactgcggcgactacagcgacgagagagactgccccggcgtgaagagacccagatgccccctgaactacttcgcctgccccagcggcagatgcatccccatgagctggacctgcgacaaggaggacgactgcgagcacggcgaggacgagacccactgcaacaagttctgcagcgaggcccagttcgagtgccagaaccacagatgcatcagcaagcagtggctgtgcgacggcagcgacgactgcggcgacggcagcgacgaggccgcccactgcgagggcaagacctgcggccccagcagcttcagctgccccggcacccacgtgtgcgtgcccgagagatggctgtgcgacggcgacaaggactgcgccgacggcgccgacgagagcatcgccgccggctgcctgtacaacagcacctgcgacgacagagagttcatgtgccagaacagacagtgcatccccaagcacttcgtgtgcgaccacgacagagactgcgccgacggcagcgacgagagccccgagtgcgagtaccccacctgcggccccagcgagttcagatgcgccaacggcagatgcctgagcagcagacagtgggagtgcgacggcgagaacgactgccacgaccagagcgacgaggcccccaagaacccccactgcaccagccaggagcacaagtgcaacgccagcagccagttcctgtgcagcagcggcagatgcgtggccgaggccctgctgtgcaacggccaggacgactgcggcgacagcagcgacgagagaggctgccacatcaacgagtgcctgagcagaaagctgagcggctgcagccaggactgcgaggacctgaagatcggcttcaagtgcagatgcagacccggcttcagactgaaggacgacggcagaacctgcgccgacgtggacgagtgcagcaccaccttcccctgcagccagagatgcatcaacacccacggcagctacaagtgcctgtgcgtggagggctacgcccccagaggcggcgacccccacagctgcaaggccgtgaccgacgaggagcccttcctgatcttcgccaacagatactacctgagaaagctgaacctggacggcagcaactacaccctgctgaagcagggcctgaacaacgccgtggccctggacttcgactacagagagcagatgatctactggaccgacgtgaccacccagggcagcatgatcagaagaatgcacctgaacggcagcaacgtgcaggtgctgcacagaaccggcctgagcaaccccgacggcctggccgtggactgggtgggcggcaacctgtactggtgcgacaagggcagagacaccatcgaggtgagcaagctgaacggcgcctacagaaccgtgctggtgagcagcggcctgagagagcccagagccctggtggtggacgtgcagaacggctacctgtactggaccgactggggcgaccacagcctgatcggcagaatcggcatggacggcagcagcagaagcgtgatcgtggacaccaagatcacctggcccaacggcctgaccctggactacgtgaccgagagaatctactgggccgacgccagagaggactacatcgagttcgccagcctggacggcagcaacagacacgtggtgctgagccaggacatcccccacatcttcgccctgaccctgttcgaggactacgtgtactggaccgactgggagaccaagagcatcaacagagcccacaagaccaccggcaccaacaagaccctgctgatcagcaccctgcacagacccatggacctgcacgtgttccacgccctgagacagcccgacgtgcccaaccacccctgcaaggtgaacaacggcggctgcagcaacctgtgcctgctgagccccggcggcggccacaagtgcgcctgccccaccaacttctacctgggcagcgacggcagaacctgcgtgagcaactgcaccgccagccagttcgtgtgcaagaacgacaagtgcatccccttctggtggaagtgcgacaccgaggacgactgcggcgaccacagcgacgagccccccgactgccccgagttcaagtgcagacccggccagttccagtgcagcaccggcatctgcaccaaccccgccttcatctgcgacggcgacaacgactgccaggacaacagcgacgaggccaactgcgacatccacgtgtgcctgcccagccagttcaagtgcaccaacaccaacagatgcatccccggcatcttcagatgcaacggccaggacaactgcggcgacggcgaggacgagagagactgccccgaggtgacctgcgcccccaaccagttccagtgcagcatcaccaagagatgcatccccagagtgtgggtgtgcgacagagacaacgactgcgtggacggcagcgacgagcccgccaactgcacccagatgacctgcggcgtggacgagttcagatgcaaggacagcggcagatgcatccccgccagatggaagtgcgacggcgaggacgactgcggcgacggcagcgacgagcccaaggaggagtgcgacgagagaacctgcgagccctaccagttcagatgcaagaacaacagatgcgtgcccggcagatggcagtgcgactacgacaacgactgcggcgacaacagcgacgaggagagctgcacccccagaccctgcagcgagagcgagttcagctgcgccaacggcagatgcatcgccggcagatggaagtgcgacggcgaccacgactgcgccgacggcagcgacgagaaggactgcacccccagatgcgacatggaccagttccagtgcaagagcggccactgcatccccctgagatggagatgcgacgccgacgccgactgcatggacggcagcgacgaggaggcctgcggcaccggcgtgagaacctgccccctggacgagttccagtgcaacaacaccctgtgcaagcccctggcctggaagtgcgacggcgaggacgactgcggcgacaacagcgacgagaaccccgaggagtgcgccagattcgtgtgcccccccaacagacccttcagatgcaagaacgacagagtgtgcctgtggatcggcagacagtgcgacggcaccgacaactgcggcgacggcaccgacgaggaggactgcgagccccccaccgcccacaccacccactgcaaggacaagaaggagttcctgtgcagaaaccagagatgcctgagcagcagcctgagatgcaacatgttcgacgactgcggcgacggcagcgacgaggaggactgcagcatcgaccccaagctgaccagctgcgccaccaacgccagcatctgcggcgacgaggccagatgcgtgagaaccgagaaggccgcctactgcgcctgcagaagcggcttccacaccgtgcccggccagcccggctgccaggacatcaacgagtgcctgagattcggcacctgcagccagctgtgcaacaacaccaagggcggccacctgtgcagctgcgccagaaacttcatgaagacccacaacacctgcaaggccgagggcagcgagtaccaggtgctgtacatcgccgacgacaacgagatcagaagcctgttccccggccacccccacagcgcctacgagcaggccttccagggcgacgagagcgtgagaatcgacgccatggacgtgcacgtgaaggccggcagagtgtactggaccaactggcacaccggcaccatcagctacagaagcctgccccccgccgccccccccaccaccagcaacagacacagaagacagatcgacagaggcgtgacccacctgaacatcagcggcctgaagatgcccagaggcatcgccatcgactgggtggccggcaacgtgtactggaccgacagcggcagagacgtgatcgaggtggcccagatgaagggcgagaacagaaagaccctgatcagcggcatgatcgacgagccccacgccatcgtggtggaccccctgagaggcaccatgtactggagcgactggggcaaccaccccaagatcgagaccgccgccatggacggcaccctgagagagaccctggtgcaggacaacatccagtggcccaccggcctggccgtggactaccacaacgagagactgtactgggccgacgccaagctgagcgtgatcggcagcatcagactgaacggcaccgaccccatcgtggccgccgacagcaagagaggcctgagccaccccttcagcatcgacgtgttcgaggactacatctacggcgtgacctacatcaacaacagagtgttcaagatccacaagttcggccacagccccctggtgaacctgaccggcggcctgagccacgccagcgacgtggtgctgtaccaccagcacaagcagcccgaggtgaccaacccctgcgacagaaagaagtgcgagtggctgtgcctgctgagccccagcggccccgtgtgcacctgccccaacggcaagagactggacaacggcacctgcgtgcccgtgcccagccccacccccccccccgacgcccccagacccggcacctgcaacctgcagtgcttcaacggcggcagctgcttcctgaacgccagaagacagcccaagtgcagatgccagcccagatacaccggcgacaagtgcgagctggaccagtgctgggagcactgcagaaacggcggcacctgcgccgccagccccagcggcatgcccacctgcagatgccccaccggcttcaccggccccaagtgcacccagcaggtgtgcgccggctactgcgccaacaacagcacctgcaccgtgaaccagggcaaccagccccagtgcagatgcctgcccggcttcctgggcgacagatgccagtacagacagtgcagcggctactgcgagaacttcggcacctgccagatggccgccgacggcagcagacagtgcagatgcaccgcctacttcgagggcagcagatgcgaggtgaacaagtgcagcagatgcctggagggcgcctgcgtggtgaacaagcagagcggcgacgtgacctgcaactgcaccgacggcagagtggcccccagctgcctgacctgcgtgggccactgcagcaacggcggcagctgcaccatgaacagcaagatgatgcccgagtgccagtgccccccccacatgaccggccccagatgcgaggagcacgtgttcagccagcagcagcccggccacatcgccagcatcctgatccccctgctgctgctgctgctgctggtgctggtggccggcgtggtgttctggtacaagagaagagtgcagggcgccaagggcttccagcaccagagaatgaccaacggcgccatgaacgtggagatcggcaaccccacctacaagatgtacgagggcggcgagcccgacgacgtgggcggcctgctggacgccgacttcgccctggaccccgacaagcccaccaacttcaccaaccccgtgtacgccaccctgtacatgggcggccacggcagcagacacagcctggccagcaccgacgagaagagagagctgctgggcagaggccccgaggacgagatcggcgaccccctggcctag

SEQ ID NO: 127548 - protein, 1905 aa, Artificial Sequence
  derived and/or modified sequence
MRRQWGALLLGALLCAHGLASSPECACGRSHFTCAVSALGECTCIPAQWQCDGDNDCGDHSDEDGCILPTCSPLDFHCDNGKCIRRSWVCDGDNDCEDDSDEQDCPPRECEEDEFPCQNGYCIRSLWHCDGDNDCGDNSDEQCDMRKCSDKEFRCSDGSCIAEHWYCDGDTDCKDGSDEENCPSAVPAPPCNLEEFQCAYGRCILDIYHCDGDDDCGDWSDESDCSSHQPCRSGEFMCDSGLCINAGWRCDGDADCDDQSDERNCTTSMCTAEQFRCHSGRCVRLSWRCDGEDDCADNSDEENCENTGSPQCALDQFLCWNGRCIGQRKLCNGVNDCGDNSDESPQQNCRPRTGEENCNVNNGGCAQKCQMVRGAVQCTCHTGYRLTEDGHTCQDVNECAEEGYCSQGCTNSEGAFQCWCETGYELRPDRRSCKALGPEPVLLFANRIDIRQVLPHRSEYTLLLNNLENAIALDFHHRRELVFWSDVTLDRILRANLNGSNVEEVVSTGLESPGGLAVDWVHDKLYWTDSGTSRIEVANLDGAHRKVLLWQNLEKPRAIALHPMEGTIYWTDWGNTPRIEASSMDGSGRRIIADTHLFWPNGLTIDYAGRRMYWVDAKHHVIERANLDGSHRKAVISQGLPHPFAITVFEDSLYWTDWHTKSINSANKFTGKNQEIIRNKLHFPMDIHTLHPQRQPAGKNRCGDNNGGCTHLCLPSGQNYTCACPTGFRKISSHACAQSLDKFLLFARRMDIRRISFDTEDLSDDVIPLADVRSAVALDWDSRDDHVYWTDVSTDTISRAKWDGTGQEVVVDTSLESPAGLAIDWVTNKLYWTDAGTDRIEVANTDGSMRTVLIWENLDRPRDIVVEPMGGYMYWTDWGASPKIERAGMDASGRQVIISSNLTWPNGLAIDYGSQRLYWADAGMKTIEFAGLDGSKRKVLIGSQLPHPFGLTLYGERIYWTDWQTKSIQSADRLTGLDRETLQENLENLMDIHVFHRRRPPVSTPCAMENGGCSHLCLRSPNPSGFSCTCPTGINLLSDGKTCSPGMNSFLIFARRIDIRMVSLDIPYFADVVVPINITMKNTIAIGVDPQEGKVYWSDSTLHRISRANLDGSQHEDIITTGLQTTDGLAVDAIGRKVYWTDTGTNRIEVGNLDGSMRKVLVWQNLDSPRAIVLYHEMGFMYWTDWGENAKLERSGMDGSDRAVLINNNLGWPNGLTVDKASSQLLWADAHTERIEAADLNGANRHTLVSPVQHPYGLTLLDSYIYWTDWQTRSIHRADKGTGSNVILVRSNLPGLMDMQAVDRAQPLGFNKCGSRNGGCSHLCLPRPSGFSCACPTGIQLKGDGKTCDPSPETYLLFSSRGSIRRISLDTSDHTDVHVPVPELNNVISLDYDSVDGKVYYTDVFLDVIRRADLNGSNMETVIGRGLKTTDGLAVDWVARNLYWTDTGRNTIEASRLDGSCRKVLINNSLDEPRAIAVFPRKGYLFWTDWGHIAKIERANLDGSERKVLINTDLGWPNGLTLDYDTRRIYWVDAHLDRIESADLNGKLRQVLVSHVSHPFALTQQDRWIYWTDWQTKSIQRVDKYSGRNKETVLANVEGLMDIIVVSPQRQTGTNACGVNNGGCTHLCFARASDFVCACPDEPDSRPCSLVPGLVPPAPRATGMSEKSPVLPNTPPTTLYSSTTRTRTSLEEVEGRCSERDARLGLCARSNDAVPAAPGEGLHISYAIGGLLSILLILVVIAALMLYRHKKSKFTDPGMGNLTYSNPSYRTSTQEVKIEAIPKPAMYNQLCYKKEGGPDHNYTKEKIKIVEGICLLSGDDAEWDDLKQLRSSRGGLLRDHVCMKTDTVSIQASSGSLDDTETEQLLQEEQSECSSVHTAATPERRGSLPDTGWKHERKLSSESQV

SEQ ID NO: 127549 - DNA, 5718 bp, Artificial Sequence
  derived and/or modified sequence
atgcggcgccagtggggagctctgttattaggagccctgttgtgcgcccacggtctggcctctagccctgagtgcgcctgcgggcgcagtcactttacctgtgctgtgagtgctcttggggagtgcacctgcatacctgcgcagtggcagtgtgacggagataatgactgtggcgaccattcggatgaggacggttgcatcttgcctacatgctccccacttgactttcattgtgataacgggaaatgtatcagacggagctgggtgtgtgacggcgacaatgactgcgaggacgattctgacgaacaggattgcccgccacgagagtgtgaggaagacgaatttccttgccagaacggttactgcatccgttctctctggcattgcgacggcgataacgattgtggagacaactccgacgagcagtgcgacatgaggaaatgcagtgacaaggagtttaggtgctccgatgggtcatgtatcgcagagcattggtactgcgatggggacacagactgtaaagacgggtccgacgaggagaattgtccatccgccgtcccggcacctccatgtaatctggaggagtttcagtgtgcctatggtcgttgcatcttagatatctaccattgcgatggagacgatgattgcggggactggagcgatgagtctgattgttctagtcaccagccatgccggtcaggggaatttatgtgcgacagcggcctgtgcatcaacgccggttggaggtgtgatggggatgccgattgcgatgaccagtcagacgagagaaactgtactacatccatgtgtacagcggaacagtttcggtgtcactctggtagatgtgtgcggctgagctggcgttgcgacggggaggatgattgtgctgacaattcagatgaggaaaactgtgaaaatactgggtccccccaatgtgcgctggatcagttcctttgctggaacgggaggtgcataggccagcgtaaactttgcaacggcgttaacgactgcggtgataacagcgacgagagcccccaacagaattgccggccgagaactggagaagaaaactgcaacgtgaataacggtgggtgtgcgcagaagtgccagatggttcggggggcagtacagtgcacttgtcacacagggtacagactaactgaggacgggcacacttgtcaggatgtgaacgagtgcgcagaagaggggtactgttctcagggctgcacaaattccgagggggccttccagtgctggtgtgagactggctacgagctgcgtccagatcgcaggtcttgtaaggcccttgggccagagccggtgttactgtttgccaaccgcattgatatccgtcaagtccttccccatcgatctgagtacactctgctgctgaataatctcgaaaatgccatcgctttagactttcaccaccgccgagagctcgtcttctggagcgatgtgacccttgaccgcatcctccgcgccaacctgaacggctctaacgttgaggaggtggttagtacaggtcttgagagccccggaggccttgctgtggattgggtgcacgacaagttgtactggacagacagtggcacttcacgcattgaggtggccaatcttgacggcgcccataggaaagtgctactgtggcaaaatttggaaaagcctcgcgccatagcactgcatcccatggagggcactatatattggaccgattggggcaatacaccccgaatagaggccagtagcatggacgggagcgggagaaggataatagcagacacacacctgttctggcccaatgggctgactatagactatgccggcaggcgaatgtactgggtggatgccaaacaccatgttattgagcgcgcgaatctcgacggatcccatcggaaggcggtgatttcacagggtctgccgcatccatttgctattaccgtgttcgaggatagcctctattggactgattggcacacgaaatcaataaactccgctaacaagttcactggaaaaaatcaggagattattagaaacaagctccattttccaatggacatccacactctgcacccccagagacagcccgccggcaaaaatagatgcggggacaataatgggggctgtacgcacctgtgcttgcccagtggtcagaattatacttgcgcttgcccaactggctttcggaagataagcagtcatgcctgtgcacagagcttggataagttcctcctgtttgcccggagaatggacatccgacgtatctcctttgacacagaggacctatcagacgacgtgattccattagcagacgtgcgcagtgcagtggcgctcgactgggattccagggacgatcacgtgtattggactgatgtaagcaccgataccatcagtagagccaaatgggacggaaccggacaagaagtagttgtcgatacttcactcgaatctccagctggcctggctattgactgggttaccaataagctctattggaccgatgctggcactgataggatcgaagtggctaataccgacggaagcatgcgtacagttttgatctgggagaacctggatcgcccaagggacatagttgtagagccaatggggggctacatgtattggaccgattggggcgcctctcccaagatcgagcgggctgggatggacgccagtggcagacaggtaatcatttccagtaacctcacatggcccaatggactggcaattgactatggttctcagcggttgtactgggctgacgcaggtatgaaaactatcgaatttgccgggcttgacggcagcaaacgcaaggtactgattggcagccaactgccccatcccttcggcttgactctttatggtgaacgaatttattggaccgactggcagactaagtctatccagtccgctgaccggcttaccgggctggatcgggaaactctccaggaaaatttagaaaacctgatggacattcatgttttccatagacgcaggccgccagtgtcaacgccctgcgctatggagaacggagggtgcagtcacctttgtttgaggtcgcccaacccatctggattctcatgcacgtgccccacaggaattaatctcttgtctgacggcaaaacatgctcacctggcatgaatagttttctgatctttgcccggcgcatcgatatccgtatggtgtcgctcgatattccttactttgcagatgtcgtggtgcctataaacattacgatgaagaataccatagctatcggcgtggaccctcaggaggggaaagtatactggagcgatagcactttgcacaggatatcccgcgccaatctagacggctcccagcatgaggacatcatcaccacgggcttacaaactaccgacggccttgccgtggacgccataggccgtaaggtatactggacagacaccgggacaaaccgaattgaagttgggaatctcgacgggtctatgcgcaaggttttagtgtggcagaatctcgattctcctcgagccatagtgctctaccacgaaatggggtttatgtactggactgattggggcgagaatgctaagctggagcgatctggcatggacggcagcgatagggctgttttgatcaacaataacttgggctggcccaatggattaacagtggacaaggcatcctcccagctcctttgggccgacgcgcatacggagcggatagaggctgcggacctgaatggggccaacaggcacaccctggtttccccggtgcagcacccttatgggctcacccttctcgactcctacatctattggacggattggcagactcgctctatccatcgcgccgataaggggactggaagcaatgtgatcctggttcgatccaacctgccagggctaatggacatgcaagctgtggaccgcgcacagcctctcgggttcaacaagtgtggctctcgtaatggtggttgtagccacctctgcctgccacggccttccggctttagctgtgcctgtcctactgggatccaattgaaaggtgatggaaagacctgcgacccaagtccagaaacctatcttttattcagctccagaggatccatcagaagaatcagtctggatacatctgaccacactgatgtgcacgtgcccgtccccgagctgaacaacgtcatttcgctagactacgatagcgtggatggcaaggtctactatactgacgtgttcctggacgtcatcaggcgtgctgacctcaacggttctaacatggaaacagtgatcggtcgggggttgaaaaccacagatgggctggcggttgattgggtcgcaagaaacctgtactggacggacactgggcggaatacaattgaggccagcagactcgatggcagttgtcggaaggtgttgattaacaattcactggacgagccacgagctattgccgtgtttcctcgaaagggttacctgttctggactgactggggccacattgctaaaattgagagggccaacttagatgggtccgagcggaaagtactgattaacaccgatctgggctggcccaacgggttaactctggactacgatactcgccggatttattgggtggatgcccatctcgatcgcattgagtctgcggacctcaacggcaaactcagacaggtgctggtgagccacgtttcgcacccattcgcactgactcagcaggaccgctggatttactggactgactggcaaacaaagagcatacagcgggtagacaagtattctggaagaaacaaggagaccgtcctggcaaatgtggagggcctgatggatatcatcgtggtctcaccacagaggcagacaggaactaatgcctgcggagtcaataatggtggatgcacccacctgtgttttgcgagggctagcgattttgtctgcgcatgtccggatgaacccgattccaggccttgtagcctcgtacctggactggtgccgccagccccccgagcgaccgggatgtccgagaagagtcccgttctccccaatacaccccctacgacactgtactccagtactacaaggacccgcacctccctagaggaggtggaaggacgttgcagcgagcgcgacgctaggctgggactgtgtgcaagatctaatgatgccgttcccgccgcaccgggcgaaggcctccatataagctacgcgatcggtggccttctgtcaatcctcttaatactcgtggtaatcgccgctcttatgctgtatagacataaaaagtcaaagttcacggaccccggtatgggaaacctgacttactctaacccctcctatagaacatcaacccaagaggtaaagatcgaagccatccctaaacctgcaatgtataaccagctgtgctataaaaaagagggcgggcccgatcataattacaccaaggagaagattaagatagtggaagggatttgccttctatctggcgatgatgcagagtgggacgatctgaaacagctcagaagtagtcggggcggacttttgagggatcacgtgtgcatgaaaactgacactgtctcaatccaggcctccagtggatccttagatgacacagaaaccgagcagctgctgcaggaagagcaatccgaatgttccagcgtccacactgccgcaacgccagagaggagagggagcctacccgacactgggtggaaacatgaacggaagctatcctccgaaagccaggtgtag

SEQ ID NO: 127550 - DNA, 5718 bp, Artificial Sequence
  derived and/or modified sequence
atgaggcggcagtggggcgccctgctgctgggcgccctgctgtgtgcccacggcctggccagcagcccagaatgtgcctgtggccgcagccacttcacctgtgctgtgtctgccctgggagaatgtacctgcatcccagcccagtggcagtgtgatggagacaatgactgtggggaccacagtgatgaagatggctgcatcctgcccacctgcagccccctggacttccactgtgacaacgggaagtgcatcagaagatcctgggtgtgtgatggagacaatgactgtgaagatgacagtgatgagcaggactgccccccaagagaatgtgaggaggatgagttcccctgccagaatggctactgcatccgcagcctgtggcactgtgatggagacaatgactgtggggacaacagtgatgagcagtgtgacatgaggaaatgtagtgacaaggagttccgctgcagtgatggcagctgcatcgccgagcactggtactgtgatggagacacagactgcaaggatggcagtgatgaggagaactgccccagcgctgtgcctgccccaccctgcaacctggaggagttccagtgtgcctacggccgctgcatcctggacatctaccactgtgatggagatgatgactgtggggactggagcgatgaaagtgactgcagcagccaccagccctgccgctctggagagttcatgtgtgacagcggcctgtgcatcaatgccggctggaggtgtgatggagatgctgactgtgatgaccagagtgatgaaagaaactgcaccacctccatgtgcacagctgagcagttccgctgccacagcggccgctgtgtgcggctgtcctggaggtgtgatggagaagatgactgtgccgacaacagtgatgaggagaactgtgaaaatacaggcagcccccagtgtgccctggaccagttcctgtgctggaatggccgctgcatcggccagaggaagctgtgcaatggagtgaatgactgtggggacaacagtgatgagagcccccagcagaactgccggcccaggactggagaggagaactgcaatgtgaacaacggcggctgtgcccagaagtgccagatggtgagaggagctgtgcagtgcacctgccacacaggctaccgcctgacagaagatggccacacctgccaggatgtgaatgaatgtgccgaggagggctactgcagccagggctgcaccaacagcgagggcgccttccagtgctggtgtgagaccggctatgagctgcggccagaccggcgcagctgcaaggccctgggccctgagcctgtgctgctgtttgccaacagaattgacatccggcaggtgctgccccacaggtctgagtacaccctgctgctgaacaacctggagaatgccatcgccctggacttccaccaccggcgggagctggtgttctggagcgatgtgaccctggaccgcatcctgcgggccaacctgaatggcagcaatgtggaggaggtggtgtccacaggcctggagagccctgggggcctggccgtggactgggtgcatgacaagctgtactggacagacagcggcaccagcagaattgaggtggccaacctggatggagcccacaggaaggtgctgctgtggcagaacctggagaagccccgggccatcgccctgcaccccatggagggcaccatctactggacagactggggcaacaccccaagaattgaggccagctccatggatggcagcggccgccgcatcatcgctgacacccacctgttctggcccaacggcctgaccattgattatgccggccgcaggatgtactgggtggatgccaagcaccacgtgattgaaagagccaacctggatggcagccacaggaaggccgtcatcagccagggcctgccccacccctttgccatcaccgtgtttgaggacagcctgtactggacagactggcacaccaagagcatcaacagcgccaacaagttcaccgggaagaaccaggagatcatccggaacaagctgcacttccccatggacatccacaccctgcacccccagaggcagcctgctgggaagaacagatgtggggacaacaacggcggctgcacccacctgtgcctgcccagcggccagaactacacctgtgcctgccccaccggcttcaggaagatcagcagccacgcctgtgcccagagcctggacaagttcctgctgtttgcccggaggatggacatccgccgcatcagctttgacacagaggacctgagtgatgatgtgatccccctggctgatgtgcgctctgctgtggccctggactgggacagcagagatgaccacgtgtactggacagatgtgtccacagacaccatcagccgggccaagtgggatggcaccggccaggaggtggtggtggacaccagcctggagagccctgctggcctggccatcgactgggtgaccaacaagctgtactggacagatgctggaacagaccgcatcgaggtggccaacacagatggctccatgaggacagtgctgatctgggagaacctggaccggccccgggacatcgtggtggagcccatgggcggctacatgtactggacagactggggcgccagccccaagattgaaagagctggcatggatgccagcggccggcaggtgatcatcagcagcaacctgacctggcccaacggcctggccatcgactatggcagccagaggctgtactgggcagatgctggcatgaagaccattgaatttgctggcctggatggcagcaagaggaaggtgctgattggcagccagctgccccaccccttcggcctgaccctgtatggagagcgcatctactggacagactggcagaccaagagcatccagagcgctgaccggctgaccggcctggaccgggagaccctgcaggagaacctggagaacctgatggacatccacgtgttccacagaagaagacctcctgtgtccaccccctgtgccatggagaatggaggctgcagccacctgtgcctgcggagccccaaccccagcggcttcagctgcacctgccccaccggcatcaacctgctgagtgatggcaagacctgcagccctggcatgaacagcttcctgatctttgccaggagaattgacatccgcatggtgtccctggacatcccctactttgctgatgtggtggtgcccatcaacatcaccatgaagaacaccatcgccatcggcgtggacccccaggagggcaaggtgtactggagcgacagcaccctgcaccgcatcagccgggccaacctggatggcagccagcacgaggacatcatcaccaccggcctgcagaccacagatggcctggccgtggatgccatcggcaggaaggtgtactggacagacaccggcaccaaccgcatcgaggtgggcaacctggatggctccatgaggaaggtgctggtgtggcagaacctggacagcccccgggccatcgtgctgtaccacgagatgggcttcatgtactggacagactggggagaaaatgccaagctggagaggagcggcatggatggcagtgacagagctgtgctgatcaacaacaacctgggctggcccaacggcctgactgtggacaaggccagcagccagctgctgtgggcagatgcccacacagaaagaattgaagctgctgacctgaatggagccaacagacacaccctggtgtcccctgtgcagcacccctacggcctgaccctgctggacagctacatctactggacagactggcagaccaggagcatccacagagctgacaagggcaccggcagcaatgtcatcctggtgcgcagcaacctgcccggcctgatggacatgcaggccgtggaccgggcccagcccctgggcttcaacaagtgtggcagcagaaatggaggctgcagccacctgtgcctgccccggcccagcggcttcagctgtgcctgccccaccggcatccagctgaagggagatggcaagacctgtgaccccagccctgagacctacctgctcttcagcagccggggcagcatccgccgcatcagcctggacaccagtgaccacacagatgtgcacgtgcctgtgcctgagctgaacaacgtcatcagcctggactatgacagcgtggatggcaaggtgtactacacagatgtgttcctggatgtgatccggcgggctgacctgaatggcagcaacatggagaccgtgattggccggggcctgaagaccacagatggcctggccgtggactgggtggccaggaacctgtactggacagacacaggaagaaacaccatcgaggccagccggctggatggcagctgcaggaaggtgctgatcaacaacagcctggatgagccccgggccatcgctgtgttccccaggaagggctacctgttctggacagactggggccacatcgccaagattgaaagagccaacctggatggcagcgagaggaaggtgctgatcaacacagacctgggctggcccaacggcctgaccctggactatgacacccggcgcatctactgggtggatgcccacctggacagaattgaatctgctgacctgaatggcaagctgcggcaggtgctggtgagccacgtgagccacccctttgccctgacccagcaggaccgctggatctactggacagactggcagaccaagagcatccagagggtggacaagtacagcggcaggaacaaggagaccgtgctggccaacgtggagggcctgatggacatcatcgtggtgagcccccagaggcagacaggcaccaatgcctgtggggtgaacaatggaggctgcacccacctgtgctttgcccgggccagtgactttgtgtgtgcctgcccagatgagccagacagccggccctgcagcctggtgcccggcctggtgcccccagccccccgggccaccggcatgtctgagaagagccctgtgctgcccaacaccccacccaccaccctgtacagcagcaccaccaggaccaggaccagcctggaggaggtggagggccgctgcagcgagagagatgcccggctgggcctgtgtgcccggagcaatgatgctgtgcctgctgcccctggagagggcctgcacatctcctatgccatcggcggcctgctgagcatcctgctgatcctggtggtgattgctgccctgatgctgtaccgccacaagaagagcaagttcacagatcctggcatgggcaacctgacctacagcaaccccagctaccgcaccagcacccaggaggtgaagattgaggccatccccaagccagccatgtacaaccagctgtgctacaagaaggagggcggccctgaccacaactacaccaaggagaagatcaagatcgtggagggcatctgcctgctgtctggagatgatgctgagtgggatgacctgaagcagctgcggagcagccggggcggcctgctgcgggaccacgtgtgcatgaagacagacacagtgtccatccaggccagcagcggcagcctggatgacacagaaacagagcagctgctgcaggaggagcagagcgagtgcagctctgtgcacacagctgccaccccagagcggcggggcagcctgcctgacaccggctggaagcatgagaggaagctgagcagcgagagccaggtgtag

SEQ ID NO: 127551 - DNA, 8076 bp, Artificial Sequence
  derived and/or modified sequence
gtggccggggctgcggcgcggggggcggggcggtcgggcccgggacaccccctcccggtcccctggcggggcagcgtcggctctggcagcactggaggcggcggcggcccgagggcgacttgcggggcgcgcaggccgccgtgcacccgggacgcttccccctcggggaccctccgcgggcttctccgccgcgccgtccggcgggagccggcgggaccccgggcgagcggcgcgggcggcaccatgaggcggcagtggggcgcgctgctgcttggcgccctgctctgcgcacacggcctggccagcagccccgagtgtgcttgtggtcggagccacttcacatgtgcagtgagtgctcttggagagtgtacctgcatccctgcccagtggcagtgtgatggagacaatgactgcggggaccacagcgatgaggatggatgtatactacctacctgttcccctcttgactttcactgtgacaatggcaagtgcatccgccgctcctgggtgtgtgacggggacaacgactgtgaggatgactcggatgagcaggactgtcccccccgggagtgtgaggaggacgagtttccctgccagaatggctactgcatccggagtctgtggcactgcgatggtgacaatgactgtggcgacaacagcgatgagcagtgtgacatgcgcaagtgctccgacaaggagttccgctgtagtgacggaagctgcattgctgagcattggtactgcgacggtgacaccgactgcaaagatggctccgatgaggagaactgtccctcagcagtgccagcgcccccctgcaacctggaggagttccagtgtgcctatggacgctgcatcctcgacatctaccactgcgatggcgacgatgactgtggagactggtcagacgagtctgactgctcctcccaccagccctgccgctctggggagttcatgtgtgacagtggcctgtgcatcaatgcaggctggcgctgcgatggtgacgcggactgtgatgaccagtctgatgagcgcaactgcaccacctccatgtgtacggcagaacagttccgctgtcactcaggccgctgtgtccgcctgtcctggcgctgtgatggggaggacgactgtgcagacaacagcgatgaagagaactgtgagaatacaggaagcccccaatgtgccttggaccagttcctgtgttggaatgggcgctgcattgggcagaggaagctgtgcaacggggtcaacgactgtggtgacaacagcgacgaaagcccacagcagaattgccggccccggacgggtgaggagaactgcaatgttaacaacggtggctgtgcccagaagtgccagatggtgcggggggcagtgcagtgtacctgccacacaggctaccggctcacagaggatgggcacacgtgccaagatgtgaatgaatgtgccgaggaggggtattgcagccagggctgcaccaacagcgaaggggctttccaatgctggtgtgaaacaggctatgaactacggcccgaccggcgcagctgcaaggctctggggccagagcctgtgctgctgttcgccaatcgcatcgacatccggcaggtgctgccacaccgctctgagtacacactgctgcttaacaacctggagaatgccattgcccttgatttccaccaccgccgcgagcttgtcttctggtcagatgtcaccctggaccggatcctccgtgccaacctcaacggcagcaacgtggaggaggttgtgtctactgggctggagagcccagggggcctggctgtggattgggtccatgacaaactctactggaccgactcaggcacctcgaggattgaggtggccaatctggatggggcccaccggaaagtgttgctgtggcagaacctggagaagccccgggccattgccttgcatcccatggagggtaccatttactggacagactggggcaacaccccccgtattgaggcctccagcatggatggctctggacgccgcatcattgccgatacccatctcttctggcccaatggcctcaccatcgactatgccgggcgccgtatgtactgggtggatgctaagcaccatgtcatcgagagggccaatctggatgggagtcaccgtaaggctgtcattagccagggcctcccgcatcccttcgccatcacagtgtttgaagacagcctgtactggacagactggcacaccaagagcatcaatagcgctaacaaatttacggggaagaaccaggaaatcattcgcaacaaactccacttccctatggacatccacaccttgcacccccagcgccaacctgcagggaaaaaccgctgtggggacaacaacggaggctgcacgcacctgtgtctgcccagtggccagaactacacctgtgcctgccccactggcttccgcaagatcagcagccacgcctgtgcccagagtcttgacaagttcctgctttttgcccgaaggatggacatccgtcgaatcagctttgacacagaggacctgtctgatgatgtcatcccactggctgacgtgcgcagtgctgtggcccttgactgggactcccgggatgaccacgtgtactggacagatgtcagcactgataccatcagcagggccaagtgggatggaacaggacaggaggtggtagtggataccagtttggagagcccagctggcctggccattgattgggtcaccaacaaactgtactggacagatgcaggtacagaccggattgaagtagccaacacagatggcagcatgagaacagtactcatctgggagaaccttgatcgtcctcgggacatcgtggtggaacccatgggcgggtacatgtattggactgactggggtgcgagccccaagattgaacgagctggcatggatgcctcaggccgccaagtcattatctcttctaatctgacctggcctaatgggttagctattgattatgggtcccagcgtctatactgggctgacgccggcatgaagacaattgaatttgctggactggatggcagtaagaggaaggtgctgattggaagccagctcccccacccatttgggctgaccctctatggagagcgcatctattggactgactggcagaccaagagcatacagagcgctgaccggctgacagggctggaccgggagactctgcaggagaacctggaaaacctaatggacatccatgtcttccaccgccgccggcccccagtgtctacaccatgtgctatggagaatggcggctgtagccacctgtgtcttaggtccccaaatccaagcggattcagctgtacctgccccacaggcatcaacctgctgtctgatggcaagacctgctcaccaggcatgaacagtttcctcatcttcgccaggaggatagacattcgcatggtctccctggacatcccttattttgctgatgtggtggtaccaatcaacattaccatgaagaacaccattgccattggagtagacccccaggaaggaaaggtgtactggtctgacagcacactgcacaggatcagtcgtgccaatctggatggctcacagcatgaggacatcatcaccacagggctacagaccacagatgggctcgcggttgatgccattggccggaaagtatactggacagacacgggaacaaaccggattgaagtgggcaacctggacgggtccatgcggaaagtgttggtgtggcagaaccttgacagtccccgggccatcgtactgtaccatgagatggggtttatgtactggacagactggggggagaatgccaagttagagcggtccggaatggatggctcagaccgcgcggtgctcatcaacaacaacctaggatggcccaatggactgactgtggacaaggccagctcccaactgctatgggccgatgcccacaccgagcgaattgaggctgctgacctgaatggtgccaatcggcatacattggtgtcaccggtgcagcacccatatggcctcaccctgctcgactcctatatctactggactgactggcagactcggagcatccaccgtgctgacaagggtactggcagcaatgtcatcctcgtgaggtccaacctgccaggcctcatggacatgcaggctgtggaccgggcacagccactaggttttaacaagtgcggctcgagaaatggcggctgctcccacctctgcttgcctcggccttctggcttctcctgtgcctgccccactggcatccagctgaagggagatgggaagacctgtgatccctctcctgagacctacctgctcttctccagccgtggctccatccggcgtatctcactggacaccagtgaccacaccgatgtgcatgtccctgttcctgagctcaacaatgtcatctccctggactatgacagcgtggatggaaaggtctattacacagatgtgttcctggatgttatcaggcgagcagacctgaacggcagcaacatggagacagtgatcgggcgagggctgaagaccactgacgggctggcagtggactgggtggccaggaacctgtactggacagacacaggtcgaaataccattgaggcgtccaggctggatggttcctgccgcaaagtactgatcaacaatagcctggatgagccccgggccattgctgttttccccaggaaggggtacctcttctggacagactggggccacattgccaagatcgaacgggcaaacttggatggttctgagcggaaggtcctcatcaacacagacctgggttggcccaatggccttaccctggactatgatacccgcaggatctactgggtggatgcgcatctggaccggatcgagagtgctgacctcaatgggaaactgcggcaggtcttggtcagccatgtgtcccacccctttgccctcacacagcaagacaggtggatctactggacagactggcagaccaagtcaatccagcgtgttgacaaatactcaggccggaacaaggagacagtgctggcaaatgtggaaggactcatggatatcatcgtggtttcccctcagcggcagacagggaccaatgcctgtggtgtgaacaatggtggctgcacccacctctgctttgccagagcctcggacttcgtatgtgcctgtcctgacgaacctgatagccggccctgctcccttgtgcctggcctggtaccaccagctcctagggctactggcatgagtgaaaagagcccagtgctacccaacacaccacctaccaccttgtattcttcaaccacccggacccgcacgtctctggaggaggtggaaggaagatgctctgaaagggatgccaggctgggcctctgtgcacgttccaatgacgctgttcctgctgctccaggggaaggacttcatatcagctacgccattggtggactcctcagtattctgctgattttggtggtgattgcagctttgatgctgtacagacacaaaaaatccaagttcactgatcctggaatggggaacctcacctacagcaacccctcctaccgaacatccacacaggaagtgaagattgaagcaatccccaaaccagccatgtacaaccagctgtgctataagaaagagggagggcctgaccataactacaccaaggagaagatcaagatcgtagagggaatctgcctcctgtctggggatgatgctgagtgggatgacctcaagcaactgcgaagctcacgggggggcctcctccgggatcatgtatgcatgaagacagacacggtgtccatccaggccagctctggctccctggatgacacagagacggagcagctgttacaggaagagcagtctgagtgtagcagcgtccatactgcagccactccagaaagacgaggctctctgccagacacgggctggaaacatgaacgcaagctctcctcagagagccaggtctaaatgcccacattctcttccctgcctgcctgttccttctcctttatggacgtctagtccttgtgctcgcttacaccgcaggccccgcttctgtgtgcttgtcctcctcctcctcccaccccataactgttcctaagccttcaccggagctgtttaccacgtgagtccataactacctgtgcacaagaaatgatggcacatcacgagaatttagacctggattttaccatgaacctcacatcttgtactccatcctgggccccctgaaactgcttattcgtgattcctcaccagcgtagagctccacctcccctttccccagtaccctcagtgcctgcttctcagtgctgatgcagctgatgacccaggactgcgctctgccccatcacagccagcatgactgcttctctgagagaacttgcccatcaggggctgggacatgggggtgtgggtaaagacagggatgaaggatagaggctgagagaagaaggaagaatcagcccagcaggtatgggcatctgggaaacctccagcctcaagtgtgttagtaacatgaaaaagctttggggggtagttggatctgggtgtctggtccattgctggcagtggacattattcttgccctaagagacactgccttttcagcagcagatactggtgagatgggggtggctcaggctgttcttcctcctcctagaatgtctggagctgtttctacattcagataactgggtcccctatcacaaggctactggctaataggaattccctcctggtgccaccactggccagtacctttcctaagtctttgctcaaattaaccaggttgtgagccagtggcttgagtgaatgttaggccttgggggctgagtctctgaaaagtctaagaagctctgcctagaccaaatatggtatacctcctgacccctctctccctcatgtcctgggattctggggaagagacctagaaacaagctttcaaagaaaaaccagaagttgtcataaatggtcagaaagaacgatcaggttggagacttgggaaacccagggcctaaagagaagtatccatgagggtcaaacttcctgttgaacttcctatgttctttctcaagtgctcagggatctaagttagtggacagcaagcctgtggctacggggtggtgatgttcctcttccagctgtcccctcagctaaggggcttagtttccatgtgggatgccatcacttggttcatgctcattcacacaaagggcacgtgtctcagcctggtatcagggaaattgagacttatttttgccctaaaacgtctccctagctgttcttcgtggggtttttttgtttgtttttttgcctaatttgctttttctgaccaagccttgtggcaccagcaatctccaaagtcctgtggtgggagggctgaataaataaaaatacaaagaggtgggtaaggagtaggaaggtagagagcaccactgatgaggccctcctagcccatggcagacccagacctcttctcccccaggaattagaagtggcaggagagaacaacaggggctgggaatggaggggagaatttctaggggaagtttcctgagttgaaacttctcctgtggttactggtattgagaaatcagctaccaaagtgaaaaaggacaagatcaattcttttctagtcagttctaagactgctagagagagataccaggcccttagccttgctctcagtagcgtcagccccagttctgagcctccccacattacacttaacaagcagtaaaggagtgagcactttgggtccttagactcacgtctggggaggaagagcaagtagaaaagtggcattttcttgattggaaagggggaaggatcttattgcacttgggctgttcagaatgtagaaaggacatatttgaggaagtatctatttgagcactgatttactctgtaaaaagcaaaatctctctgtcctaaactaatggaagcgattctcccatgctcatgtgtaatggttttaacgttactcactggagagattggactttctggagttatttaaccactatgttcagtattttaggactttatgataatttaatataaatttagcttttcttaatc

SEQ ID NO: 127552 - DNA, 5718 bp, Artificial Sequence
  derived and/or modified sequence
atgcggcggcagtggggcgccctgctgctgggcgccctgctgtgcgcacacggtctcgcctcctctcctgagtgtgcttgcggtaggtcacactttacatgtgccgtgtcagctttgggggagtgtacgtgcatacctgcgcagtggcagtgcgacggggataatgactgcggtgatcattcggatgaggacggttgtatactgccaacctgctcacccctggactttcactgcgacaacggtaaatgtattcggcgaagctgggtttgtgatggggacaatgactgcgaggacgacagtgacgagcaggactgcccaccccgcgagtgtgaagaggatgaatttccttgccagaacggttattgtattcgctcgctgtggcattgcgatggggataatgactgcggggacaacagtgatgaacaatgcgatatgcgcaagtgcagcgacaaggagtttcgatgctctgatggttcgtgcattgcggaacactggtactgcgacggtgatactgactgcaaggacggctccgatgaggagaattgtcccagcgccgtaccagcacccccctgcaatcttgaggaatttcagtgcgcctatggccgctgcattctggatatctatcattgcgatggggatgatgattgcggtgactggtcagacgagtccgactgtagctcccatcagccatgtaggtctggggagttcatgtgtgatagcgggttgtgcattaatgccggctggcgctgtgacggagatgccgattgtgatgaccagtcagatgaacggaattgcaccacatcaatgtgtacggccgagcagtttaggtgccacagtggtcggtgcgtgcgattgtcctggcgctgcgacggggaagatgattgtgcagacaatagcgacgaagagaactgtgagaatacaggatctccccaatgcgccctggaccaatttctgtgctggaacggtcgctgtataggccagcggaaattgtgtaatggggtgaacgattgcggcgacaattccgatgagtctccccaacagaactgccggccccggactggcgaggagaactgtaacgtgaataatggaggctgtgcccagaaatgccagatggtgagaggcgctgttcagtgtacttgtcacaccggatatagactaacggaggacgggcatacctgtcaggacgtcaatgaatgtgcagaagagggctattgttcccagggctgcaccaattctgagggcgcttttcagtgttggtgcgagacgggctacgagttgcgccctgaccggcgatcttgtaaggcactgggcccagagcctgtactcctttttgccaaccgcattgatattcgccaggtgctgccccaccggagcgagtacactctcctgttgaataacctagagaatgccattgcattagatttccatcacaggcgtgagctagtattctggagtgacgtcacactcgataggatcctaagagctaatcttaacggttcaaacgtcgaagaggtggtgtccacaggtctggagagcccaggaggcctcgctgttgactgggtgcatgataaactctattggaccgattccggaactagtcgaatcgaggtggccaacctcgacggagcacatcgtaaagtgcttctgtggcagaaccttgagaaacctagagcgattgctttgcatcccatggaaggcaccatctactggactgactgggggaatacccctagaattgaggcatccagcatggatgggtccggccggcgcatcattgccgatactcacctattctggccaaacgggctcacaatcgactacgccggacgacgcatgtactgggtggacgccaagcatcacgttatagagagggccaacctggacgggtcccacaggaaagcagttattagccagggtttaccacacccattcgctatcactgttttcgaggatagtctttactggacagattggcataccaaatcaatcaactctgccaacaagtttacagggaagaatcaggagattataaggaacaagcttcactttcccatggatatccatactctccatccccagcggcagccagccggaaaaaacagatgtggagacaataacggcggctgcactcatctgtgtctgccatcggggcagaattacacctgcgcctgcccaacagggttccgtaaaatcagcagccacgcctgcgcccagagtctggataaattcctgcttttcgcaaggcggatggatatcagacgtatatcttttgataccgaagatttgtccgacgacgtgattccactggccgacgttcgctcagcggtggcattagactgggacagtagggatgatcacgtgtactggaccgatgtttccacagataccatcagtcgcgcaaaatgggatgggaccggtcaggaggtggtcgtagatacctccctggaaagccccgccggcctggctatagactgggttacgaacaaactgtactggacagacgccggtacagatagaatcgaagtcgcaaatacagacggtagtatgagaaccgtccttatttgggagaacttggataggcctcgggatatagttgttgaacccatgggcgggtacatgtactggacggactggggtgcatccccaaagatagagcgggccgggatggacgcatctggacgacaggttatcatctcctcgaatctgacctggccaaacggcctggccatcgattatgggagtcagcgcctctactgggccgacgctggcatgaagactattgagttcgcggggttggatggcagcaaacgaaaagttctcattggctctcagctgcctcacccattcggcctcacactgtacggcgagcgcatctactggacagactggcaaacgaagtctattcaaagcgccgatagactgactggtttggatagagagacgctccaggaaaacttggagaatcttatggacattcacgtgtttcatcgccggcgccccccagtgagcacgccttgcgctatggagaacggtggctgctcccatctttgtctgagatccccgaatcccagcggctttagctgcacttgtcccacaggtattaacctactgtccgacggaaagacttgtagcccagggatgaactcctttctgatctttgcgaggaggattgatatcaggatggtgtccttggatataccttacttcgctgacgtggtagtgcccattaatattaccatgaagaacacaatagccatcggggtggaccctcaagagggaaaggtatattggagtgacagtaccctccataggatctcacgggcaaacctagatgggtctcagcatgaggacattatcaccaccggactgcagactacggatggcctggccgtggacgcgattggtaggaaagtgtattggacagatactgggacgaatagaattgaggtgggcaatctcgatggatctatgaggaaggtcctggtttggcagaatctggatagccctagggctatagttctgtaccacgagatgggattcatgtattggactgattggggagagaatgcaaagctcgaaaggtctggcatggacgggtcagacagggctgtcctgattaataacaacttaggttggcccaatgggctgacggtggataaagcaagcagccagctcctgtgggcagacgcacacacagagcgaatcgaggctgccgacttaaacggagcaaatagacacacgctggtgtccccagtccagcacccgtacgggctgacattgctggatagttacatttactggactgattggcagactcgatccatccaccgcgcagacaaaggtactggaagcaacgtgatcctcgtgaggagcaacctgcctggactgatggacatgcaggctgtggatagggctcagccattaggattcaacaaatgtggaagccggaacggcggatgctcgcatctctgcctccctcgaccttccggcttctcttgcgcctgtccaaccgggattcagctgaagggggatggtaagacttgcgacccatccccggagacctacttactctttagttctagagggtccattcgccgcatctcgttagacacatcagaccacacagatgttcatgtacccgtccctgaacttaataacgtgatatccctggactatgatagcgttgacggcaaggtgtactacacggatgtgttccttgatgttattcggagagctgatctaaatggctccaatatggagactgtcatcggtcgaggcttgaagactactgatgggctggcggtcgactgggtggccaggaacttgtattggactgacaccgggcgaaacaccatagaagcctccaggctggacgggtcatgccgtaaagttctcataaacaactctctggatgaaccacgcgccattgcagtgtttcccagaaaaggctacttgttttggactgactgggggcacatagctaagattgaacgtgctaatcttgacggttcagagagaaaggtgttaatcaataccgatctagggtggcctaatgggctgactctagactatgacactcgaaggatttattgggtggacgcccacttggatcgcatcgaatcggcagatctcaacggaaagctgcggcaggtgctagtatcccacgtgtctcacccgttcgctctgacgcaacaggatagatggatttattggaccgattggcagaccaagtctattcagcgagtggataagtatagtggtcggaataaggagacagtcctagcaaatgtggaaggacttatggacatcatcgtggtgtcacctcagcgccaaacaggcacaaacgcctgcggcgtgaataatggcggctgcacgcacctgtgctttgcgcgtgcatcagatttcgtgtgtgcttgcccggacgagcctgatagtagaccttgcagcctggttccgggcctagttcctcccgcaccgcgcgccaccggcatgagtgagaaaagccccgtcctgccaaacacacctcctacaacactgtattcttctacaactcggacgcggacttctctcgaagaggtagaaggacggtgtagtgagcgcgatgcgaggttaggactgtgcgcacgctctaacgacgcggtgccggctgctccaggcgaaggcttacatatctcctatgcgatagggggactgttaagtattctgctcattctggtggtgattgccgcactgatgctttatcgccacaaaaaaagcaagttcacagacccagggatgggaaacctaacctattctaacccttcttaccgtaccagcactcaggaggtgaaaatcgaagctattcccaagccagcaatgtacaaccagctttgctataaaaaagaaggtggcccagaccacaactacaccaaggaaaagatcaagatcgtggagggcatctgtctcctctccggagacgacgcagaatgggacgatctcaagcagctcagatccagccggggggggcttctccgagaccatgtgtgtatgaaaaccgacactgtgtctattcaagcctcctctggcagcctggacgataccgagaccgagcagcttcttcaagaggagcagtcagagtgctccagtgtccacacagctgctactcccgagagacgtggatcactgcccgatacaggctggaagcacgaacggaagttgtcctctgagtcacaggtgtag

SEQ ID NO: 127553 - DNA, 5717 bp, Artificial Sequence
  derived and/or modified sequence
atgcgacggcaatggggtgcgctgctgctgggcgctttgctctgcgcccacggcctggcatcatccccagagtgcgcttgtggccgatctcattttacctgcgcagtgtccgctctgggagagtgcacgtgcataccagcacagtggcagtgtgatggcgacaatgattgtggcgaccactctgacgaggatggttgcattctcccgacctgcagccccttggactttcactgcgataacggcaagtgcatccgcaggtcctgggtgtgcgatggggacaacgattgcgaggacgactccgatgaacaggactgccccccaagagaatgcgaagaggacgaattcccatgtcagaatgggtactgtattcgatcactctggcattgcgatggcgataacgattgtggagacaatagtgacgaacagtgtgacatgagaaagtgttccgacaaggaattcaggtgcagcgacgggagttgtatcgcagaacattggtattgtgatggagatactgactgtaaggatggctcggacgaagaaaactgccccagcgccgtaccagccccaccatgtaaccttgaagaattccagtgtgcgtacgggcgatgtatcctcgacatctatcactgtgacggtgatgatgactgcggcgactggtctgacgagtcagactgctcctcgcatcaaccctgtcgcagcggtgagttcatgtgtgattccggtctgtgcatcaacgctgggtggcgatgtgacggcgatgcggactgcgacgatcagagtgatgaaaggaactgcacaacctctatgtgcactgcagaacaattcagatgccacagcggtcgatgtgtgcgcctgtcttggcggtgcgacggcgaagacgattgtgccgataacagtgacgaagagaattgcgaaaacactgggtcaccccagtgcgccctggatcagttcctgtgttggaatggaagatgcattggacaaaggaaactgtgtaatggagtcaacgactgtggcgataactcagatgagtccccccagcagaactgtcgcccaaggactggggaggagaattgtaatgttaacaatggaggatgcgcacagaaatgtcaaatggttcggggagcagtgcagtgcacctgccacactgggtaccgcttgaccgaggacggccatacatgtcaggatgtgaatgaatgcgcagaggagggctattgcagccagggttgtactaactctgagggggcttttcagtgttggtgcgaaacgggctatgaactgcgccctgatagacgcagctgcaaggcacttggtcccgagcccgtgttactgtttgccaatagaattgatatccggcaggtgttgccacatcgctccgagtatacccttctcctcaacaacctggaaaacgcgatcgcacttgacttccaccacagacgcgaactcgtcttctggagcgacgttacacttgataggattctccgcgcaaatctgaatgggtctaacgtggaagaagtcgtgtctacgggcctggaaagtcccggaggtttggccgtcgattgggttcatgacaaactctattggactgactccgggacctctcggatagaggttgccaacctcgacggcgcacatcgtaaggtgttattgtggcaaaacctagaaaaacccagggccattgctcttcatcctatggagggcaccatctattggacagactggggaaatactcctaggatcgaggcgtccagtatggatggatcaggaaggagaatcatcgctgacacccatttattttggcctaacgggctcactatagattacgccggacgccgtatgtattgggttgatgccaagcatcatgttattgagagagccaacttggacgggtcacatcgtaaggcagtgatcagtcagggtctcccccatccatttgccatcacagtgtttgaggattctctgtactggacagattggcataccaaaagcataaatagcgccaataagtttaccgggaagaatcaggagattatcaggaacaaactgcacttccctatggatatacatacacttcacccccagcggcagcctgccggaaagaatcgctgcggggacaacaacgggggatgcactcacctgtgtctgccatcagggcagaactacacctgcgcgtgtcctacagggtttagaaaaattagctcccatgcgtgcgcacagagtttggataaattcctactttttgctcggcgtatggatatccgaaggatctccttcgacaccgaagacttgtccgacgacgttatacccttggcagacgtccgttccgccgtggctctggactgggacagccgtgacgaccacgtatattggactgatgtgagtacagacaccatttcaagggccaaatgggacggtacaggccaagaagttgtggtggacactagtctcgagagtcccgcaggactggcgatcgattgggtcaccaacaagctttactggacggacgccggtaccgataggattgaggtagcaaacaccgatgggtctatgaggacggtgttaatctgggaaaacctggacagacccagagacatcgtcgtggaacccatgggcggttatatgtattggactgattggggcgcttcccccaagatcgagcgggctggtatggacgcatctggaaggcaggtgatcatatcttcgaacctgacttggccgaacggtctggccatcgactacgggtcccagcgtttgtactgggccgacgccggaatgaagaccatcgaattcgccggactcgacggctccaaacggaaagtcctgatcggcagccagcttccccaccccttcgggttaacactctatggagaaaggatctattggacagattggcagacgaagagtattcagtccgcagacagactgacaggcctggacagggagactctgcaagaaaatctcgagaacctcatggacattcatgtcttccacagacgaaggccccctgtttcaacaccctgcgcaatggaaaacggcggttgctctcatctgtgtctgcggagcccaaacccctccggattctcatgcacctgccctaccgggatcaacctcctgagtgacggaaaaacttgctcccccggtatgaattccttcttgatttttgcgagacgtatagatatccggatggtgtcattagatattccgtattttgctgacgtggtggtgcccatcaatatcacaatgaagaacactatcgcaatcggggtggacccacaagagggtaaggtgtactggagcgacagtacactgcataggatcagtcgggcaaacctcgacggtagtcagcacgaggatataattaccacaggcttacaaaccacggatgggcttgccgtggatgcaattggcagaaaagtgtattggactgacaccggtaccaacagaatagaagtcggaaatttagacggcagtatgcggaaggttctggtgtggcagaacctggattcgcccagggctatcgtgctataccatgagatggggtttatgtattggactgactggggagagaacgccaagctcgaaagatccgggatggatggatctgaccgcgcagttcttatcaacaacaatctgggctggcccaatggcttgacggtggacaaagctagtagccagctgctgtgggcagacgcgcacacagagcggattgaagcagctgatctgaatggagccaatcgccataccttagtatctccggtgcaacatccctacggactaacgcttctggattcctacatttactggactgactggcagactcgctcaatccaccgggctgacaaaggcaccggaagtaacgtcattcttgttcgttcaaacctgccaggcctgatggacatgcaggcagtagacagagctcagcctctcggattcaacaagtgtggaagtcgtaatggcggatgtagtcacctctgcttgccgaggccatcggggttttcttgtgcctgccccaccggaatccagctaaagggagacggcaaaacatgtgatccttcccctgagacatatctcctcttttctagcaggggctcaatcagaagaatctccctggacacctctgaccacaccgacgtgcatgtgcccgtgccggaactgaacaatgtgatctcgctggattacgattccgtggatgggaaagtgtattacacagatgtattcctggatgtcatcaggcgggctgacctgaacggaagcaatatggagacagtgatcgggagaggactgaaaacgaccgacggattagcagtggactgggtggcgcgaaatctgtactggaccgacactgggaggaataccattgaagcaagcaggcttgatggctcatgtaggaaggtgctcattaacaactccttagacgagccacgggcaatcgccgtgtttccacgcaaaggctacctcttttggactgattgggggcatattgccaaaatagaacgcgcaaatctggatggaagcgaaaggaaggttctgatcaacaccgatctgggatggccgaacggactcaccttggactacgatacacggaggatatactgggtggacgcgcacctggatagaatagaatctgctgacctgaacggaaagctcaggcaggttctcgtgagccacgtgtcccaccccttcgctctcacacagcaagatcgatggatctactggacggactggcagactaaaagcatacagcgggtcgataaatattccggcagaaacaaagagaccgtcctcgccaacgtggaaggactcatggatattatagtcgttagtccccagcggcaaaccggtacaaacgcatgtggcgtgaataacggcggatgcactcatctttgcttcgccagggctagcgactttgtatgcgcatgtcccgatgagcctgatagcaggccttgtagcttggtgccaggcctggtgcctccggctcctcgggcaacaggaatgtccgagaagagtcctgtgctccccaatacccccccaaccaccctgtattcgtcaactactcgcactagaacctctttggaggaggttgaggggcgatgtagcgagcgggacgccagactgggcctttgcgcgaggagcaatgacgcggtccccgcagctccgggtgaaggcctgcacatctcatatgctatcgggggtctcctgagcattctcctgattctggttgtgatagcggctcttatgctctataggcacaaaaagtcaaaatttacggacccaggcatgggaaacctgacctactctaatcctagctacaggacatctacacaagaggtgaaaattgaggccattccaaagcccgctatgtataaccaactgtgttataagaaggaaggtgggcctgaccacaactacactaaggaaaaaattaagatcgtcgaaggcatctgcctgctgagtggggatgatgccgaatgggatgaccttaagcagctccggtcaagtagagggggactcctgagagatcatgtttgtatgaagacagacacagtctcaattcaggcctcctcaggttctctcgacgatacagagaccgaacaactcttacaagaagaacaaagcgagtgtagcagcgtgcacactgccgcaacacctgagcggcgaggcagcctgcccgacaccggttggaaacatgaacgtaaactcagctcggagagtcaggtgta

SEQ ID NO: 127554 - DNA, 5718 bp, Artificial Sequence
  derived and/or modified sequence
atgagaagacagtggggcgccctgctgctgggcgccctgctgtgcgcccacggcctggccagcagccccgagtgcgcctgcggcagaagccacttcacctgcgccgtgagcgccctgggcgagtgcacctgcatccccgcccagtggcagtgcgacggcgacaacgactgcggcgaccacagcgacgaggacggctgcatcctgcccacctgcagccccctggacttccactgcgacaacggcaagtgcatcagaagaagctgggtgtgcgacggcgacaacgactgcgaggacgacagcgacgagcaggactgcccccccagagagtgcgaggaggacgagttcccctgccagaacggctactgcatcagaagcctgtggcactgcgacggcgacaacgactgcggcgacaacagcgacgagcagtgcgacatgagaaagtgcagcgacaaggagttcagatgcagcgacggcagctgcatcgccgagcactggtactgcgacggcgacaccgactgcaaggacggcagcgacgaggagaactgccccagcgccgtgcccgcccccccctgcaacctggaggagttccagtgcgcctacggcagatgcatcctggacatctaccactgcgacggcgacgacgactgcggcgactggagcgacgagagcgactgcagcagccaccagccctgcagaagcggcgagttcatgtgcgacagcggcctgtgcatcaacgccggctggagatgcgacggcgacgccgactgcgacgaccagagcgacgagagaaactgcaccaccagcatgtgcaccgccgagcagttcagatgccacagcggcagatgcgtgagactgagctggagatgcgacggcgaggacgactgcgccgacaacagcgacgaggagaactgcgagaacaccggcagcccccagtgcgccctggaccagttcctgtgctggaacggcagatgcatcggccagagaaagctgtgcaacggcgtgaacgactgcggcgacaacagcgacgagagcccccagcagaactgcagacccagaaccggcgaggagaactgcaacgtgaacaacggcggctgcgcccagaagtgccagatggtgagaggcgccgtgcagtgcacctgccacaccggctacagactgaccgaggacggccacacctgccaggacgtgaacgagtgcgccgaggagggctactgcagccagggctgcaccaacagcgagggcgccttccagtgctggtgcgagaccggctacgagctgagacccgacagaagaagctgcaaggccctgggccccgagcccgtgctgctgttcgccaacagaatcgacatcagacaggtgctgccccacagaagcgagtacaccctgctgctgaacaacctggagaacgccatcgccctggacttccaccacagaagagagctggtgttctggagcgacgtgaccctggacagaatcctgagagccaacctgaacggcagcaacgtggaggaggtggtgagcaccggcctggagagccccggcggcctggccgtggactgggtgcacgacaagctgtactggaccgacagcggcaccagcagaatcgaggtggccaacctggacggcgcccacagaaaggtgctgctgtggcagaacctggagaagcccagagccatcgccctgcaccccatggagggcaccatctactggaccgactggggcaacacccccagaatcgaggccagcagcatggacggcagcggcagaagaatcatcgccgacacccacctgttctggcccaacggcctgaccatcgactacgccggcagaagaatgtactgggtggacgccaagcaccacgtgatcgagagagccaacctggacggcagccacagaaaggccgtgatcagccagggcctgccccaccccttcgccatcaccgtgttcgaggacagcctgtactggaccgactggcacaccaagagcatcaacagcgccaacaagttcaccggcaagaaccaggagatcatcagaaacaagctgcacttccccatggacatccacaccctgcacccccagagacagcccgccggcaagaacagatgcggcgacaacaacggcggctgcacccacctgtgcctgcccagcggccagaactacacctgcgcctgccccaccggcttcagaaagatcagcagccacgcctgcgcccagagcctggacaagttcctgctgttcgccagaagaatggacatcagaagaatcagcttcgacaccgaggacctgagcgacgacgtgatccccctggccgacgtgagaagcgccgtggccctggactgggacagcagagacgaccacgtgtactggaccgacgtgagcaccgacaccatcagcagagccaagtgggacggcaccggccaggaggtggtggtggacaccagcctggagagccccgccggcctggccatcgactgggtgaccaacaagctgtactggaccgacgccggcaccgacagaatcgaggtggccaacaccgacggcagcatgagaaccgtgctgatctgggagaacctggacagacccagagacatcgtggtggagcccatgggcggctacatgtactggaccgactggggcgccagccccaagatcgagagagccggcatggacgccagcggcagacaggtgatcatcagcagcaacctgacctggcccaacggcctggccatcgactacggcagccagagactgtactgggccgacgccggcatgaagaccatcgagttcgccggcctggacggcagcaagagaaaggtgctgatcggcagccagctgccccaccccttcggcctgaccctgtacggcgagagaatctactggaccgactggcagaccaagagcatccagagcgccgacagactgaccggcctggacagagagaccctgcaggagaacctggagaacctgatggacatccacgtgttccacagaagaagaccccccgtgagcaccccctgcgccatggagaacggcggctgcagccacctgtgcctgagaagccccaaccccagcggcttcagctgcacctgccccaccggcatcaacctgctgagcgacggcaagacctgcagccccggcatgaacagcttcctgatcttcgccagaagaatcgacatcagaatggtgagcctggacatcccctacttcgccgacgtggtggtgcccatcaacatcaccatgaagaacaccatcgccatcggcgtggacccccaggagggcaaggtgtactggagcgacagcaccctgcacagaatcagcagagccaacctggacggcagccagcacgaggacatcatcaccaccggcctgcagaccaccgacggcctggccgtggacgccatcggcagaaaggtgtactggaccgacaccggcaccaacagaatcgaggtgggcaacctggacggcagcatgagaaaggtgctggtgtggcagaacctggacagccccagagccatcgtgctgtaccacgagatgggcttcatgtactggaccgactggggcgagaacgccaagctggagagaagcggcatggacggcagcgacagagccgtgctgatcaacaacaacctgggctggcccaacggcctgaccgtggacaaggccagcagccagctgctgtgggccgacgcccacaccgagagaatcgaggccgccgacctgaacggcgccaacagacacaccctggtgagccccgtgcagcacccctacggcctgaccctgctggacagctacatctactggaccgactggcagaccagaagcatccacagagccgacaagggcaccggcagcaacgtgatcctggtgagaagcaacctgcccggcctgatggacatgcaggccgtggacagagcccagcccctgggcttcaacaagtgcggcagcagaaacggcggctgcagccacctgtgcctgcccagacccagcggcttcagctgcgcctgccccaccggcatccagctgaagggcgacggcaagacctgcgaccccagccccgagacctacctgctgttcagcagcagaggcagcatcagaagaatcagcctggacaccagcgaccacaccgacgtgcacgtgcccgtgcccgagctgaacaacgtgatcagcctggactacgacagcgtggacggcaaggtgtactacaccgacgtgttcctggacgtgatcagaagagccgacctgaacggcagcaacatggagaccgtgatcggcagaggcctgaagaccaccgacggcctggccgtggactgggtggccagaaacctgtactggaccgacaccggcagaaacaccatcgaggccagcagactggacggcagctgcagaaaggtgctgatcaacaacagcctggacgagcccagagccatcgccgtgttccccagaaagggctacctgttctggaccgactggggccacatcgccaagatcgagagagccaacctggacggcagcgagagaaaggtgctgatcaacaccgacctgggctggcccaacggcctgaccctggactacgacaccagaagaatctactgggtggacgcccacctggacagaatcgagagcgccgacctgaacggcaagctgagacaggtgctggtgagccacgtgagccaccccttcgccctgacccagcaggacagatggatctactggaccgactggcagaccaagagcatccagagagtggacaagtacagcggcagaaacaaggagaccgtgctggccaacgtggagggcctgatggacatcatcgtggtgagcccccagagacagaccggcaccaacgcctgcggcgtgaacaacggcggctgcacccacctgtgcttcgccagagccagcgacttcgtgtgcgcctgccccgacgagcccgacagcagaccctgcagcctggtgcccggcctggtgccccccgcccccagagccaccggcatgagcgagaagagccccgtgctgcccaacaccccccccaccaccctgtacagcagcaccaccagaaccagaaccagcctggaggaggtggagggcagatgcagcgagagagacgccagactgggcctgtgcgccagaagcaacgacgccgtgcccgccgcccccggcgagggcctgcacatcagctacgccatcggcggcctgctgagcatcctgctgatcctggtggtgatcgccgccctgatgctgtacagacacaagaagagcaagttcaccgaccccggcatgggcaacctgacctacagcaaccccagctacagaaccagcacccaggaggtgaagatcgaggccatccccaagcccgccatgtacaaccagctgtgctacaagaaggagggcggccccgaccacaactacaccaaggagaagatcaagatcgtggagggcatctgcctgctgagcggcgacgacgccgagtgggacgacctgaagcagctgagaagcagcagaggcggcctgctgagagaccacgtgtgcatgaagaccgacaccgtgagcatccaggccagcagcggcagcctggacgacaccgagaccgagcagctgctgcaggaggagcagagcgagtgcagcagcgtgcacaccgccgccacccccgagagaagaggcagcctgcccgacaccggctggaagcacgagagaaagctgagcagcgagagccaggtgtag

SEQ ID NO: 127555 - protein, 1615 aa, Artificial Sequence
  derived and/or modified sequence
MEAAPPGPPWPLLLLLLLLLALCGCPAPAAASPLLLFANRRDVRLVDAGGVKLESTIVVSGLEDAAAVDFQFSKGAVYWTDVSEEAIKQTYLNQTGAAVQNVVISGLVSPDGLACDWVGKKLYWTDSETNRIEVANLNGTSRKVLFWQDLDQPRAIALDPAHGYMYWTDWGETPRIERAGMDGSTRKIIVDSDIYWPNGLTIDLEEQKLYWADAKLSFIHRANLDGSFRQKVVEGSLTHPFALTLSGDTLYWTDWQTRSIHACNKRTGGKRKEILSALYSPMDIQVLSQERQPFFHTRCEEDNGGCSHLCLLSPSEPFYTCACPTGVQLQDNGRTCKAGAEEVLLLARRTDLRRISLDTPDFTDIVLQVDDIRHAIAIDYDPLEGYVYWTDDEVRAIRRAYLDGSGAQTLVNTEINDPDGIAVDWVARNLYWTDTGTDRIEVTRLNGTSRKILVSEDLDEPRAIALHPVMGLMYWTDWGENPKIECANLDGQERRVLVNASLGWPNGLALDLQEGKLYWGDAKTDKIEVINVDGTKRRTLLEDKLPHIFGFTLLGDFIYWTDWQRRSIERVHKVKASRDVIIDQLPDLMGLKAVNVAKVVGTNPCADRNGGCSHLCFFTPHATRCGCPIGLELLSDMKTCIVPEAFLVFTSRAAIHRISLETNNNDVAIPLTGVKEASALDFDVSNNHIYWTDVSLKTISRAFMNGSSVEHVVEFGLDYPEGMAVDWMGKNLYWADTGTNRIEVARLDGQFRQVLVWRDLDNPRSLALDPTKGYIYWTEWGGKPRIVRAFMDGTNCMTLVDKVGRANDLTIDYADQRLYWTDLDTNMIESSNMLGQERVVIADDLPHPFGLTQYSDYIYWTDWNLHSIERADKTSGRNRTLIQGHLDFVMDILVFHSSRQDGLNDCMHNNGQCGQLCLAIPGGHRCGCASHYTLDPSSRNCSPPTTFLLFSQKSAISRMIPDDQHSPDLILPLHGLRNVKAIDYDPLDKFIYWVDGRQNIKRAKDDGTQPFVLTSLSQGQNPDRQPHDLSIDIYSRTLFWTCEATNTINVHRLSGEAMGVVLRGDRDKPRAIVVNAERGYLYFTNMQDRAAKIERAALDGTEREVLFTTGLIRPVALVVDNTLGKLFWVDADLKRIESCDLSGANRLTLEDANIVQPLGLTILGKHLYWIDRQQQMIERVEKTTGDKRTRIQGRVAHLTGIHAVEEVSLEEFSAHPCARDNGGCSHICIAKGDGTPRCSCPVHLVLLQNLLTCGEPPTCSPDQFACATGEIDCIPGAWRCDGFPECDDQSDEEGCPVCSAAQFPCARGQCVDLRLRCDGEADCQDRSDEADCDAICLPNQFRCASGQCVLIKQQCDSFPDCIDGSDELMCEITKPPSDDSPAHSSAIGPVIGIILSLFVMGGVYFVCQRVVCQRYAGANGPFPHEYVSGTPHVPLNFIAPGGSQHGPFTGIACGKSMMSSVSLMGGRGGVPLYDRNHVTGASSSSSSSTKATLYPPILNPPPSPATDPSLYNMDMFYSSNIPATARPYRPYIIRGMAPPTTPCSTDVCDSDYSASRWKASKYYLDLNSDSDPYPPPPTPHSQYLSAEDSCPPSPATERSYFHLFPPPPSPCTDSS

SEQ ID NO: 127556 - DNA, 4848 bp, Artificial Sequence
  derived and/or modified sequence
atggaggcggccccgcccggaccgccgtggccactgctactcttgctccttttgcttctggcactgtgtggctgccctgctccagccgccgcctcccccctcctcctcttcgcgaataggcgggatgttagactcgttgatgctggaggcgtgaagctggagtctactatcgtggtcagcggactggaagacgccgcagcggtggatttccagttctccaaaggcgcggtctactggactgacgtctctgaggaggccattaagcagacgtacctgaatcaaactggagcagcagtgcaaaatgtcgtgataagtggcctggtgtcacccgacggcctggcgtgtgactgggtgggaaagaagctgtattggacagattccgagaccaataggattgaggtggccaacttgaacgggacttctagaaaagtgctgttttggcaggacttagatcagcctagggccatcgccctggacccggctcacggatatatgtactggactgactggggcgagacccctcgcattgagagggccggcatggacggctctaccaggaaaatcattgtcgattctgacatttactggcccaatggtttgactattgacctggaggaacagaaactgtactgggccgacgccaaactgagcttcattcaccgtgccaaccttgatggcagttttaggcagaaagtggtggagggctcactgacgcacccttttgcgctgactctctccggcgacactctttactggactgactggcagacgcgctccatccatgcctgcaacaagcgcactggtggcaaacggaaggaaatcctgtctgccctctacagtccaatggatatacaggtcttgtcccaggagagacaacccttcttccatacacgctgcgaggaagacaacggcggctgtagtcatctctgcctcctgtcaccgtctgaaccattttacacgtgcgcatgtcccactggcgttcagttgcaagataatggccggacatgtaaggccggggccgaggaggtgctcttactggcacgccgcaccgatctccggagaatctccctggatactccagactttacggatattgtgttgcaggttgatgatatcagacacgccatcgccatcgactacgatcccctggagggatacgtctattggacggacgatgaagtacgagccattcgccgcgcctacctggatggatctggtgcgcagacattggttaataccgaaatcaacgacccagacggaatcgcagtggattgggtcgcgagaaacctctattggacagacactggcaccgatcggatcgaagtcacccgcctgaacggcacctccaggaagattctggtctccgaggaccttgacgaaccacgagctatcgcgctgcatcctgtgatgggtttgatgtattggacagactggggtgaaaatcccaagattgaatgcgccaaccttgacggacaggagagacgagtgttggtgaacgcctccctcggatggcccaatggcctcgcactagacctgcaggagggtaagctatactggggagacgctaagactgataagatagaggttattaatgtggacgggactaagagacggaccttattagaggacaagctgcctcatatttttgggttcacgctgcttggggattttatttactggacagactggcaaaggcgctccatcgaacgtgtgcataaggtgaaagcctctagagatgtgataattgatcagctgcctgaccttatgggcctgaaagctgtcaacgttgcgaaggtcgtagggaccaacccctgcgctgatcggaatggagggtgttcacacttatgcttcttcacaccccatgctacacggtgtggttgccccatcggtctagagcttttgtcagatatgaaaacctgtattgttcccgaagctttcctcgtgttcacaagccgagccgccatacacaggatttccctggagaccaacaacaacgacgtggctattcctctgaccggcgttaaagaagcttctgcactggactttgacgtatccaataaccacatctactggacagacgtgagcttaaaaaccatttcacgtgctttcatgaatggctcctcggtcgagcacgtcgttgaatttggactggactaccctgaaggtatggcagttgattggatggggaagaatttatactgggctgacaccgggactaatcggatcgaggtggcaaggctggacgggcagttcagacaggttctcgtgtggagggacctggataaccctcggtctctcgcattggatccaacaaagggctacatttattggactgaatggggcggcaagccaaggattgtgcgggccttcatggacggaacaaactgcatgacactcgtcgacaaagtcggaagggcaaacgacctcaccatcgattatgccgatcagagactctactggaccgacctggataccaacatgatcgagtcgtccaatatgctcggacaggaacgtgtcgtgatagccgacgatctgccacatccttttggtttgacacagtattcggattatatttactggaccgactggaacctgcatagtattgagcgagctgataagacctctggcaggaataggaccctgatccagggccatctggatttcgtgatggacatcctcgtctttcattctagcaggcaggatggacttaacgattgcatgcataacaacggccagtgcgggcaattatgcctggctatccccggagggcacagatgtggttgtgcttctcattatacactggatccatcttctcggaattgttctccgcccactacctttctcctgttctcccaaaaaagcgcaatctcgcgcatgatccctgacgaccagcattcccccgacctgatcctcccgttacacggcctccgcaatgtaaaggccattgactacgaccccctcgacaagtttatctactgggtggacggtcggcaaaatatcaaaagagccaaagacgatggcactcaacctttcgtgctgacatcactgtcccagggccagaaccccgaccgccagccccacgacctgtcgatcgatatctatagcagaaccctgttttggacatgtgaagccaccaacacaatcaatgtgcaccgcctcagcggagaggctatgggagtcgttctccggggcgacagggataaaccgcgggcaatagttgtgaatgcggagcgagggtatctctacttcacaaatatgcaggaccgggccgctaaaatcgagcgggcagctcttgatggaactgagcgggaagtgttattcaccacaggactcataagacctgtggccctggtcgtcgacaacacattgggcaaattgttctgggtcgacgcagatctcaagagaattgagagctgcgatctgtccggggcgaacaggctgactttggaggatgcaaacatagtccagcccctgggattaaccattctgggaaagcacctgtattggatcgataggcagcagcagatgatcgaaagggtcgagaagactaccggcgataagagaacgagaattcaggggagggttgctcacctgaccggcatacatgcagttgaggaggtgtctctggaagaatttagcgctcacccatgtgcccgggacaatggaggatgttcacacatctgcatcgctaaaggagatggcaccccaaggtgctcatgccctgtccatcttgtacttctgcagaatcttctgacgtgtggagagccaccaacctgcagcccggatcagttcgcctgcgccacaggagagatcgattgtattccgggggcctggcgctgcgatggatttccagagtgcgacgatcaatcagatgaggaaggctgccccgtctgtagtgccgctcaatttccgtgcgctcgtggccagtgcgtcgatctgcggctgcgatgtgatggagaggccgattgccaggacagatccgacgaagccgactgcgatgctatatgtctgccgaaccagtttcgatgtgcttccgggcaatgcgtgctgataaaacagcagtgcgacagtttccccgattgtatcgacggatcagatgaactgatgtgcgagatcaccaagccccctagtgatgatagcccagcccatagctctgccatcgggcccgtcattggtatcattttgtccctgtttgtgatgggcggagtctacttcgtctgccagcgggtggtatgccagaggtatgcgggcgcaaatgggccctttccccacgaatatgtgagtggcacaccacatgtaccattgaacttcattgctcccggggggtcccagcatggacctttcacaggtatcgcctgcggaaaatccatgatgagtagcgtgtccctgatgggcggacgcggtggcgtccccctgtacgaccggaaccacgtcaccggagcaagcagctcttcaagttcttctacaaaggccacactgtacccaccgatactgaacccaccccctagtccagccacggacccctccctatataatatggacatgttctatagtagcaatataccagctactgcacgcccctaccggccctacatcatccgcggcatggccccccccaccaccccttgttccacggatgtctgtgacagcgactatagtgcatctcgctggaaagcctctaagtactatctggacctgaattcagacagtgatccttatccaccacccccaactccccacagccagtatttgtctgccgaggatagctgccccccctctcccgccaccgagagatcttacttccatctcttcccgcccccgccttcgccctgcaccgattcatcttag

SEQ ID NO: 127557 - DNA, 4848 bp, Artificial Sequence
  derived and/or modified sequence
atggaggccgcccctcctggccccccctggcccctgctgctgctgctgctgctgctgctggccctgtgtggctgcccagccccagctgctgccagccccctgctgctgtttgccaacagaagagatgtgcggctggtggatgctgggggcgtgaagctggagagcaccatcgtggtgtctggcctggaggatgctgctgctgtggacttccagttcagcaaaggagctgtgtactggacagatgtgtctgaggaggccatcaagcagacctacctgaaccagacaggagctgctgtgcagaatgtggtgatcagcggcctggtgtccccagatggcctggcctgtgactgggtgggcaagaagctgtactggacagattctgagaccaaccgcatcgaggtggccaacctgaatggcaccagcaggaaggtgctcttctggcaggacctggaccagccccgggccatcgccctggaccctgcccacggctacatgtactggacagactggggcgagaccccccgcatcgagagagctggcatggatggcagcaccaggaagatcatcgtggacagcgacatctactggcccaacggcctgaccatcgacctggaggagcagaagctgtactgggcagatgccaagctgtccttcatccaccgggccaacctggatggcagcttccggcagaaggtggtggagggcagcctgacccacccctttgccctgaccctgagcggggacaccctgtactggacagactggcagaccaggagcatccacgcctgcaacaagaggactggaggcaagaggaaggagatcctgagcgccctgtacagccccatggacatccaggtgctgagccaggagcggcagcccttcttccacacccgctgtgaagaagataatggaggctgcagccacctgtgcctgctgagccccagcgagcccttctacacctgtgcctgccccactggagtgcagctgcaggacaatggccgcacctgcaaggccggggctgaggaggtgctgctgctggcccggaggacagacctgcggcgcatcagcctggacaccccagacttcacagacatcgtgctgcaggtggatgacatcagacatgccatcgccatcgactatgaccccctggagggctacgtgtactggacagatgatgaggtgcgggccatccggcgggcctacctggatggcagcggggcccagaccctggtgaacacagagatcaatgaccctgatggcattgctgtggactgggtggccaggaacctgtactggacagacacaggaacagaccgcatcgaggtgacccggctgaatggcaccagcaggaagatcctggtgtctgaggacctggatgagccccgggccatcgccctgcaccctgtgatgggcctgatgtactggacagactggggcgagaaccccaagattgaatgtgccaacctggatggccaggagcggcgggtgctggtgaatgccagcctgggctggcccaacggcctggccctggacctgcaggagggcaagctgtactggggagatgccaagacagacaagattgaagtcatcaacgtggatggcaccaagaggaggaccctgctggaggacaagctgccccacatcttcggcttcaccctgctgggggacttcatctactggacagactggcagaggaggagcattgaaagagtgcacaaggtgaaggccagcagagatgtgatcatcgaccagctgcctgacctgatgggcctgaaggctgtgaatgtggccaaggtggtgggcaccaacccctgtgccgacagaaatggaggctgcagccacctgtgcttcttcacccctcatgccacccgctgtggctgccccatcggcctggagctgctgagtgacatgaagacctgcatcgtgcctgaggccttcctggtgttcaccagcagagctgccatccaccgcatcagcctggagaccaacaacaatgatgtggccatccccctgactggagtgaaggaggccagcgccctggactttgatgtgagcaacaaccacatctactggacagatgtgtccctgaagaccatcagccgggccttcatgaatggcagctctgtggagcacgtggtggagtttggcctggactacccagagggcatggctgtggactggatgggcaagaacctgtactgggccgacaccggcaccaaccgcatcgaggtggcccggctggatggccagttccggcaggtgctggtgtggagggacctggacaaccccaggagcctggccctggaccccaccaagggctacatctactggacagagtggggcggcaagccccgcatcgtgcgggccttcatggatggcaccaactgcatgaccctggtggacaaggtgggccgggccaatgacctgaccattgattatgctgaccagaggctgtactggacagacctggacaccaacatgattgagagcagcaacatgctgggccaggagcgggtggtgattgctgatgacctgccccaccccttcggcctgacccagtacagcgactacatctactggacagactggaacctgcacagcattgaaagagctgacaagaccagcggcaggaacagaaccctcatccagggccacctggactttgtgatggacatcctggtgttccacagcagccggcaggacggcctgaatgactgcatgcacaacaacggccagtgtggccagctgtgcctggccatccctgggggccaccgctgtggctgtgccagccactacaccctggaccccagcagcaggaactgcagcccccccaccaccttcctgctcttcagccagaagagcgccatcagcaggatgatcccagatgaccagcacagcccagacctgatcctgcccctgcacggcctgagaaatgtgaaggccatcgactatgaccccctggacaagttcatctactgggtggatggccggcagaacatcaagagggccaaggatgatggcacccagccctttgtgctgaccagcctgagccagggccagaacccagaccggcagccccatgacctgagcattgacatctacagcaggaccctcttctggacctgtgaggccaccaacaccatcaacgtgcaccggctgagcggggaggccatgggcgtggtgctgcggggggaccgggacaagccccgggccatcgtggtgaatgctgagcggggctacctgtacttcaccaacatgcaggaccgggccgccaagattgagcgggccgccctggatggaacagagcgggaggtgctcttcaccaccggcctcatccggcctgtggccctggtggtggacaacaccctgggcaagctgttctgggtggatgctgacctgaagagaattgagagctgtgacctgagcggggccaaccggctgaccctggaggatgccaacatcgtgcagcccctgggcctgaccatcctgggcaagcacctgtactggattgaccggcagcagcagatgattgagcgggtggagaagaccaccggggacaagaggacccgcatccagggccgggtggcccacctgaccggcatccatgctgtggaggaggtgtccctggaggagttcagcgcccacccctgtgcccgggacaatggaggctgcagccacatctgcatcgccaagggagatggcaccccccgctgcagctgccctgtgcacctggtgctgctgcagaacctgctgacctgtggggagccccccacctgcagcccagaccagtttgcctgtgccaccggggagattgactgcatccctggggcctggaggtgtgatggcttcccagaatgtgatgaccagagtgatgaggagggctgccctgtgtgcagcgctgcccagttcccctgtgcccggggccagtgtgtggacctgcggctgcgctgtgatggagaggccgactgccaggacagaagtgatgaggccgactgtgatgccatctgcctgcccaaccagttccgctgtgccagcggccagtgtgtgctgatcaagcagcagtgtgacagcttcccagactgcattgatggcagtgatgagctgatgtgtgagatcaccaagcccccatctgatgacagccctgcccacagcagcgccatcggccctgtgattggcatcatcctgagcctgtttgtgatgggcggcgtgtactttgtgtgccagagggtggtgtgccagagatatgctggggccaacggccccttcccccatgaatatgtgtctggcaccccccacgtgcccctgaacttcatcgcccctgggggcagccagcacggccccttcaccggcatcgcctgtgggaagtccatgatgagctctgtgtccctgatgggcggccggggcggcgtgcccctgtatgacagaaatcatgtgactggagccagcagcagcagcagcagcagcaccaaggccaccctgtacccacccatcctgaaccccccacccagccctgccacagaccccagcctgtacaacatggacatgttctacagcagcaacatcccagccacagcccggccctaccggccctacatcatccggggcatggccccacccaccaccccctgcagcacagatgtgtgtgacagcgactacagcgccagccgctggaaggccagcaagtactacctggacctgaacagcgacagcgacccctacccacctccacccaccccccacagccagtacctgtctgctgaggacagctgcccccccagccctgccacagagaggagctacttccacctgtttcctcctccacccagcccctgcacagacagcagctag

SEQ ID NO: 127558 - DNA, 5159 bp, Artificial Sequence
  derived and/or modified sequence
gcccgaggggggaggcggaggcgccgggagccgcgcgaggagccgccgccgccgcgccatggagcccgagtgagcgcggcgcgggcccgtccggccgccggacaacatggaggcagcgccgcccgggccgccgtggccgctgctgctgctgctgctgctgctgctggcgctgtgcggctgcccggcccccgccgcggcctcgccgctcctgctatttgccaaccgccgggacgtacggctggtggacgccggcggagtcaagctggagtccaccatcgtggtcagcggcctggaggatgcggccgcagtggacttccagttttccaagggagccgtgtactggacagacgtgagcgaggaggccatcaagcagacctacctgaaccagacgggggccgccgtgcagaacgtggtcatctccggcctggtctctcccgacggcctcgcctgcgactgggtgggcaagaagctgtactggacggactcagagaccaaccgcatcgaggtggccaacctcaatggcacatcccggaaggtgctcttctggcaggaccttgaccagccgagggccatcgccttggaccccgctcacgggtacatgtactggacagactggggtgagacgccccggattgagcgggcagggatggatggcagcacccggaagatcattgtggactcggacatttactggcccaatggactgaccatcgacctggaggagcagaagctctactgggctgacgccaagctcagcttcatccaccgtgccaacctggacggctcgttccggcagaaggtggtggagggcagcctgacgcaccccttcgccctgacgctctccggggacactctgtactggacagactggcagacccgctccatccatgcctgcaacaagcgcactggggggaagaggaaggagatcctgagtgccctctactcacccatggacatccaggtgctgagccaggagcggcagcctttcttccacactcgctgtgaggaggacaatggcggctgctcccacctgtgcctgctgtccccaagcgagcctttctacacatgcgcctgccccacgggtgtgcagctgcaggacaacggcaggacgtgtaaggcaggagccgaggaggtgctgctgctggcccggcggacggacctacggaggatctcgctggacacgccggacttcaccgacatcgtgctgcaggtggacgacatccggcacgccattgccatcgactacgacccgctagagggctatgtctactggacagatgacgaggtgcgggccatccgcagggcgtacctggacgggtctggggcgcagacgctggtcaacaccgagatcaacgaccccgatggcatcgcggtcgactgggtggcccgaaacctctactggaccgacacgggcacggaccgcatcgaggtgacgcgcctcaacggcacctcccgcaagatcctggtgtcggaggacctggacgagccccgagccatcgcactgcaccccgtgatgggcctcatgtactggacagactggggagagaaccctaaaatcgagtgtgccaacttggatgggcaggagcggcgtgtgctggtcaatgcctccctcgggtggcccaacggcctggccctggacctgcaggaggggaagctctactggggagacgccaagacagacaagatcgaggtgatcaatgttgatgggacgaagaggcggaccctcctggaggacaagctcccgcacatttttgggttcacgctgctgggggacttcatctactggactgactggcagcgccgcagcatcgagcgggtgcacaaggtcaaggccagccgggacgtcatcattgaccagctgcccgacctgatggggctcaaagctgtgaatgtggccaaggtcgtcggaaccaacccgtgtgcggacaggaacggggggtgcagccacctgtgcttcttcacaccccacgcaacccggtgtggctgccccatcggcctggagctgctgagtgacatgaagacctgcatcgtgcctgaggccttcttggtcttcaccagcagagccgccatccacaggatctccctcgagaccaataacaacgacgtggccatcccgctcacgggcgtcaaggaggcctcagccctggactttgatgtgtccaacaaccacatctactggacagacgtcagcctgaagaccatcagccgcgccttcatgaacgggagctcggtggagcacgtggtggagtttggccttgactaccccgagggcatggccgttgactggatgggcaagaacctctactgggccgacactgggaccaacagaatcgaagtggcgcggctggacgggcagttccggcaagtcctcgtgtggagggacttggacaacccgaggtcgctggccctggatcccaccaagggctacatctactggaccgagtggggcggcaagccgaggatcgtgcgggccttcatggacgggaccaactgcatgacgctggtggacaaggtgggccgggccaacgacctcaccattgactacgctgaccagcgcctctactggaccgacctggacaccaacatgatcgagtcgtccaacatgctgggtcaggagcgggtcgtgattgccgacgatctcccgcacccgttcggtctgacgcagtacagcgattatatctactggacagactggaatctgcacagcattgagcgggccgacaagactagcggccggaaccgcaccctcatccagggccacctggacttcgtgatggacatcctggtgttccactcctcccgccaggatggcctcaatgactgtatgcacaacaacgggcagtgtgggcagctgtgccttgccatccccggcggccaccgctgcggctgcgcctcacactacaccctggaccccagcagccgcaactgcagcccgcccaccaccttcttgctgttcagccagaaatctgccatcagtcggatgatcccggacgaccagcacagcccggatctcatcctgcccctgcatggactgaggaacgtcaaagccatcgactatgacccactggacaagttcatctactgggtggatgggcgccagaacatcaagcgagccaaggacgacgggacccagccctttgttttgacctctctgagccaaggccaaaacccagacaggcagccccacgacctcagcatcgacatctacagccggacactgttctggacgtgcgaggccaccaataccatcaacgtccacaggctgagcggggaagccatgggggtggtgctgcgtggggaccgcgacaagcccagggccatcgtcgtcaacgcggagcgagggtacctgtacttcaccaacatgcaggaccgggcagccaagatcgaacgcgcagccctggacggcaccgagcgcgaggtcctcttcaccaccggcctcatccgccctgtggccctggtggtggacaacacactgggcaagctgttctgggtggacgcggacctgaagcgcattgagagctgtgacctgtcaggggccaaccgcctgaccctggaggacgccaacatcgtgcagcctctgggcctgaccatccttggcaagcatctctactggatcgaccgccagcagcagatgatcgagcgtgtggagaagaccaccggggacaagcggactcgcatccagggccgtgtcgcccacctcactggcatccatgcagtggaggaagtcagcctggaggagttctcagcccacccatgtgcccgtgacaatggtggctgctcccacatctgtattgccaagggtgatgggacaccacggtgctcatgcccagtccacctcgtgctcctgcagaacctgctgacctgtggagagccgcccacctgctccccggaccagtttgcatgtgccacaggggagatcgactgtatccccggggcctggcgctgtgacggctttcccgagtgcgatgaccagagcgacgaggagggctgccccgtgtgctccgccgcccagttcccctgcgcgcggggtcagtgtgtggacctgcgcctgcgctgcgacggcgaggcagactgtcaggaccgctcagacgaggcggactgtgacgccatctgcctgcccaaccagttccggtgtgcgagcggccagtgtgtcctcatcaaacagcagtgcgactccttccccgactgtatcgacggctccgacgagctcatgtgtgaaatcaccaagccgccctcagacgacagcccggcccacagcagtgccatcgggcccgtcattggcatcatcctctctctcttcgtcatgggtggtgtctattttgtgtgccagcgcgtggtgtgccagcgctatgcgggggccaacgggcccttcccgcacgagtatgtcagcgggaccccgcacgtgcccctcaatttcatagccccgggcggttcccagcatggccccttcacaggcatcgcatgcggaaagtccatgatgagctccgtgagcctgatggggggccggggcggggtgcccctctacgaccggaaccacgtcacaggggcctcgtccagcagctcgtccagcacgaaggccacgctgtacccgccgatcctgaacccgccgccctccccggccacggacccctccctgtacaacatggacatgttctactcttcaaacattccggccactgcgagaccgtacaggccctacatcattcgaggaatggcgcccccgacgacgccctgcagcaccgacgtgtgtgacagcgactacagcgccagccgctggaaggccagcaagtactacctggatttgaactcggactcagacccctatccacccccacccacgccccacagccagtacctgtcggcggaggacagctgcccgccctcgcccgccaccgagaggagctacttccatctcttcccgccccctccgtccccctgcacggactcatcctgacctcggccgggccactctggcttctctgtgcccctgtaaatagttttaaatatgaacaaagaaaaaaatatattttatgatttaaaaaataaatataattgggattttaaaaacatgagaaatgtgaactgtgatggggtgggcagggctgggagaactttgtacagtggagaaatatttataaacttaattttgtaaaacagaa

SEQ ID NO: 127559 - DNA, 4848 bp, Artificial Sequence
  derived and/or modified sequence
atggaggccgccccccccggccccccctggcccctgctgctgctgctgctcctgcttctcgctctatgcgggtgtccggcccccgcagccgcttcccctctgttgcttttcgcaaaccgtcgcgacgtcagactggttgatgccgggggtgtgaagctggagagcaccattgttgtttccggattggaagacgccgctgccgtagatttccaattcagtaagggggccgtttactggacggacgtgtctgaggaggctattaagcaaacgtatctgaatcagaccggtgcggccgtgcagaatgtggtgatcagtgggctggtttctcccgatggacttgcatgtgattgggttggcaagaagctgtattggacggactctgaaaccaaccgtatcgaggtggcgaatttaaatggtaccagccgcaaagtgctgttttggcaggacttggatcaacccagagctatcgcccttgatccggcacacggatacatgtattggactgactggggagagaccccgcggatcgaaagagccggtatggatgggagcacaagaaaaattattgtggactcagacatctattggccaaatggcctgaccatagatctggaggagcaaaagctctattgggccgatgcaaagctttcattcattcacagggctaatctcgacggctccttcagacagaaggtggtggagggtagtctgacacatcctttcgcattgaccctctcaggagacactctgtattggacagattggcaaaccaggtctattcacgcctgcaacaaaaggactggcggtaaacggaaagagattttgagtgcactgtacagtcctatggacatccaggtgctgtctcaagagagacagcccttctttcacaccagatgtgaagaggataacggcggctgctcgcatctctgcctgctgtcccctagcgaaccattttacacctgtgcttgcccaacaggagtacagttgcaggataacggaagaacgtgcaaggctggagccgaggaagttctgctccttgcccgcagaacagacttacgccgcatttctttagatacacccgacttcaccgatatagttttacaggttgatgatatccggcacgccatcgcaatagattatgaccccctcgaaggatatgtatactggaccgacgacgaagtgcgcgcaattagaagggcctaccttgatggttcgggtgcccaaactcttgtcaatacagagatcaatgatcccgacgggattgccgtcgactgggttgccagaaacttatactggacagataccgggacggatcgtattgaagtaactcggctgaatgggacttcaaggaagatcctggtgtccgaagaccttgacgagccaagggctattgccctacaccctgtgatgggattaatgtactggacagactggggggagaaccctaagatcgaatgcgcgaaccttgatggccaggagcgaagggtgctcgtcaacgcctccctgggatggcctaatggcctggccttagatctccaggagggcaaattatattggggggacgccaagacagataagattgaggtcataaatgttgacggcacaaagagacggactctcttagaagacaagcttccacacatctttggtttcactcttcttggggacttcatatattggacagactggcaaagacgatcaatcgaaagggtgcataaggtcaaggcatcacgggacgttatcattgaccaactaccagaccttatgggtctgaaagcagtaaacgttgccaaagtggtggggaccaatccctgcgccgaccgaaatggagggtgcagccacttgtgttttttcacacctcacgccacgcggtgcggatgccctatagggctggagctgctcagcgatatgaaaacttgtattgtccccgaagccttcctggtgttcacttctcgcgccgcaatccatcggatctctctggaaaccaacaacaatgatgtcgcgattcctttgacaggggtcaaagaggcctcagccctggatttcgatgtgagcaacaaccacatctactggactgatgtcagcttgaagacaatatcccgagctttcatgaatggcagcagcgtggaacacgtcgttgaatttggtcttgactaccccgaaggcatggccgtggactggatgggtaagaatctgtactgggcagatacagggacgaatcggattgaggttgccaggctggatggccagtttagacaggtgttggtgtggcgggaccttgacaaccctcgttctctggcattggatcctaccaagggttacatatactggactgagtggggtggcaagcctagaatcgttcgtgcattcatggacggaacaaattgtatgacgctcgtggacaaagtgggccgcgctaatgatctcacaatcgactatgcagaccagcgactctactggaccgacctggacactaacatgatagagagtagtaacatgttggggcaggagcgggtcgtcatagccgacgatcttccgcatccattcggtttgacacaatattccgactatatctattggacagattggaatcttcatagtatcgagcgggctgataagacgagcggaaggaatcgcacccttatccagggccacttagactttgtaatggacatcctggtcttccatagctcacgtcaggacgggctgaatgactgcatgcataacaacgggcagtgcgggcagttatgtcttgccattccaggtggtcatcgttgtggttgtgcctctcattatacactggacccttcctcccgcaactgcagccctccaacgacattccttctcttctcgcagaagtccgccatctcccgcatgattcctgacgaccagcatagcccggacctgatactcccactccacggattgcgcaacgtcaaggccatagattacgaccccttagataagttcatttactgggtcgacgggcgacagaatattaaaagagccaaggacgacggtacccaacccttcgtgctgacatctctcagtcagggtcagaatccagacaggcaacctcacgacctgtccatcgatatctactcgcggacattgttctggacctgtgaggctactaatacgatcaacgtgcacaggctgtcgggggaggccatgggggttgtcctacgaggggaccgggataagcccagggccattgttgttaatgccgaacgaggctacctgtactttaccaacatgcaggaccgcgcagcgaaaatagagcgcgctgctctggacgggactgagagagaggttcttttcactaccggccttattcgacccgtggcactcgtggtagataataccttgggaaagctgttctgggtcgacgccgatttgaagcgaatcgaatcatgcgacctctcaggcgcaaatagactcactcttgaagacgccaatatcgtccagcctctcggccttactattctcggcaagcacctgtattggatagacaggcagcagcaaatgattgaaagagtggagaagacaaccggagataagcgaacccggatccagggacgggtcgcacaccttaccggaattcatgccgtggaggaggttagccttgaagagttttctgcccatccctgtgcacgggacaacggaggatgcagtcacatctgcattgcaaagggggatgggacaccaagatgctcttgccctgtccacctagtgctgttgcagaatttgctcacctgtggcgaacctcccacatgtagccccgaccaattcgcttgtgcgactggtgagattgattgcattccgggcgcctggcgctgtgatgggtttcctgagtgtgacgaccagtcagacgaggaaggctgccctgtttgcagtgccgctcagttcccttgcgcaaggggtcagtgcgtagacctcaggcttaggtgtgatggcgaggccgactgccaggaccgatccgacgaagccgactgcgacgcaatctgcctccccaatcagttcagatgcgcttcagggcagtgcgtcctgatcaaacagcagtgtgactcgtttccagattgcattgacggctctgatgaactcatgtgcgaaattactaagcccccgtccgatgacagccctgcccacagtagtgccatcggaccagtgattggcataattctctcactttttgtgatggggggcgtctatttcgtatgtcagcgagttgtctgtcaaaggtacgccggcgcaaacggtccttttccccacgagtatgtatccggcactccacatgtgccactgaatttcatcgccccgggtggctcccagcatggcccctttacagggatcgcctgtggaaaaagcatgatgagtagcgtgtctctcatgggcggccggggaggagtgccattgtacgaccgtaatcacgtcacaggcgcctcttcttctagctcttccagcacgaaagctaccctgtaccctccaatcctgaatccgcctccttctcccgccacagatccatccctttacaatatggacatgttctacagctcaaacataccggcaacagcgagaccatatcggccatacatcatcaggggcatggcacctccaactacaccatgtagcacagacgtatgcgactccgactacagtgcaagccgttggaaggcctccaagtactatttagacttgaattctgactcagacccctaccctcccccgcccacaccccatagccaatacctctccgctgaagatagctgtccaccgagcccagccaccgaacggagttacttccaccttttccccccgcctccctcgccatgtactgacagcagttag

SEQ ID NO: 127560 - DNA, 4848 bp, Artificial Sequence
  derived and/or modified sequence
atggaggcagctcccccaggtcctccctggcctctgttacttctcctgctgttgctccttgcgctgtgcggatgtcccgctcctgcagcagctagccccctccttcttttcgcaaataggagagatgtgaggttggtggacgcaggtggcgtcaaattagagagcaccattgtggttagcggactggaggatgccgctgccgtggactttcagttttcgaagggcgcagtttactggaccgacgtctccgaagaagccatcaagcagacctatctcaatcagaccggcgctgccgttcagaacgtcgtgatctccggtctggtgtcccccgacggattagcttgcgactgggtcggaaagaagctctactggactgactcagagaccaaccgcatagaagtagcaaacctgaacggcacatctcggaaggtgttgttctggcaggatcttgaccagcccagagccattgctctggaccctgcccatggctacatgtattggactgactggggagagactcctagaattgagagagctggaatggacgggtcaactaggaaaatcatcgtggactcagacatctattggcctaacgggcttaccatcgatctagaagaacagaaactgtattgggcggatgccaagttgtcctttatacacagagcaaaccttgatggatcgttccgccagaaggtggtggagggctcccttacccatccctttgccttgaccctgagcggggacactctgtattggacagactggcagaccaggagcattcacgcctgtaacaagaggacaggcggaaaacggaaggaaatcttgagtgctctctactctcctatggacatacaggttcttagccaagagcgtcagcctttttttcacacacgttgtgaggaggacaatggtggatgcagtcacctctgtctgctatcaccgtccgagccattctacacctgtgcttgccccaccggggtccagttgcaggacaacggacgcacctgcaaggcaggcgcagaagaagttctcctgctagctagacggacggatctgcgtagaatttctctggacacaccagactttaccgatattgttctgcaggtggatgatattcgacacgccattgccattgactacgaccccctcgagggctacgtctactggaccgacgacgaggtcagggctatccgccgtgcctatcttgatggctcgggggctcaaactctggtcaatactgaaatcaacgaccctgacgggatagccgtcgattgggtagcccgaaacctctattggactgatacaggtactgataggattgaggtgacaaggctgaatggcacttcacgcaaaattttggtctcagaagatcttgatgagcccagagcgattgctctgcatcctgtcatggggctgatgtattggacagactggggagaaaaccccaaaatagagtgtgccaacttagacgggcaggagaggcgagtgctggtcaatgcctctttgggatggcctaatgggctcgccctcgatctgcaggaaggcaagttgtactggggcgatgccaaaacagataagatcgaagtgatcaacgtggatggcacaaaacgcaggaccctcttggaggataagctgcctcacatcttcgggttcaccctgctcggtgatttcatctattggaccgattggcagagaaggtccatagagcgggtgcacaaagtgaaggcctctcgggatgtgatcattgatcagctccccgaccttatgggactaaaggccgtaaatgtggcaaaagtcgttggcacaaacccatgcgcagacaggaatgggggttgttctcacttatgttttttcacaccccacgcaacaagatgtggctgtcccatcggtttggagctgctttcagatatgaaaacctgcatagtccctgaagccttcctggtgttcacctccagagcggcaatacaccgaatcagtctcgaaacaaacaacaacgacgtggcaattccactgaccggagtgaaggaggcctctgccttggacttcgatgtgtccaataaccacatctattggacagacgtaagcctcaagactatatcccgtgctttcatgaatgggagttcggtggaacacgtagtagaattcggcctcgattacccagagggaatggcggtggactggatggggaagaacctctactgggccgataccggaaccaatcggatcgaggtcgcaaggctggacggccagttcagacaggttctggtgtggagagatctggacaacccgagatcccttgcacttgatcccaccaaaggttatatctactggacagaatgggggggtaagccacgtatcgtaagggcgtttatggatggaacaaactgtatgaccctggtcgacaaagttggtcgcgcaaacgatcttactatagactacgcagaccaacgtctgtactggacggatctggacaccaacatgatcgagtcatccaacatgctcggccaggagagggtagtcatcgctgacgacctgccacatcccttcggactgacgcagtacagtgattacatctactggacagattggaatctccattctatcgagcgagcagataaaacttccgggagaaatagaacactgattcagggacacctggacttcgtaatggacatattggttttccacagcagcagacaggacggtttaaacgactgtatgcacaacaatgggcagtgcggtcagctttgcttggcaatcccaggtgggcataggtgtggttgcgcctcccactacacgctcgatcccagtagcaggaactgtagccccccaacaaccttcctgctattttcccaaaaatctgccattagccgaatgatccctgatgatcagcacagccctgacctcattctaccgctgcacggactgagaaatgtgaaggcgatcgattacgatcccctggacaagttcatttattgggtagacggacggcaaaacattaagcgagcgaaagatgatggcacccagccttttgtcctgaccagcctatctcaagggcagaatcccgacagacagccccatgatctcagcatagacatctacagtcgaactttgttttggacctgtgaggccactaacacaatcaacgtgcaccgccttagtggggaagctatgggtgtagtgctgaggggggaccgcgataaaccacgggctatagtcgtgaatgccgaaagaggatacctatacttcaccaacatgcaagaccgcgcagctaaaatcgaacgggctgctttagacggcacagaacgcgaggtactgttcaccacaggactcattaggcccgtggctctcgtggtagataacaccctgggcaaacttttttgggtagacgccgacttgaaacgcatagagtcttgcgacctgtctggtgctaaccgtttgactctcgaggatgcaaacatcgtccagcccttaggactgaccatactgggcaagcatttatactggatcgataggcagcagcagatgatcgagagggtggagaaaactaccggggacaaacggactaggattcagggaagagtggcgcatctcacggggatccacgctgtggaagaggtgtcactggaggagttttccgcacacccttgtgcacgggacaatgggggatgctcgcatatttgtattgctaaaggagatggcacaccgaggtgctcttgtccagtgcatctggttctgcttcagaatcttctaacttgcggcgaaccacccacctgttctcccgatcagttcgcctgtgcaactggcgagatcgattgtatcccaggtgcctggcggtgcgacgggttccctgaatgcgatgaccagtcagacgaggaaggatgccctgtttgcagcgccgcacagttcccgtgcgccaggggacaatgcgtagatctcagactacgctgtgacggggaggctgattgccaagatcgctctgacgaagccgattgcgacgccatttgcctgccaaaccagttccgatgtgcctctggccaatgtgtactaatcaaacaacagtgcgatagctttcctgactgcattgatggtagcgacgagctgatgtgcgagataaccaagccaccatccgacgattccccggctcacagttctgcaatcggcccagttatcggtatcattctgtcgctgttcgtaatgggcggagtctactttgtttgtcagcgagtggtgtgccaaaggtacgcaggcgctaacggacctttccctcatgaatatgtgagtggaacgccacatgtgcctcttaacttcattgccccaggcggaagccagcacgggccattcaccgggatagcttgcgggaaatccatgatgtcctccgtctcgctaatgggtggtagggggggagtccccctttacgatcgcaatcacgtgactggagcctcctcgagctcatcatcatccacgaaggctactctgtaccccccaatcttgaatccaccgccttctccggcaactgatccttctctgtacaacatggacatgttttacagctccaacataccagccaccgcccgaccctatagaccctatatcatccggggaatggcgcctcccacaacgccatgttccacagatgtgtgcgactcggattattcggcctcccgctggaaggcttccaagtattacttggacctgaattcagattcagatccttaccccccacccccaacgccccactctcaatatctttccgccgaggatagttgtcctcccagcccagccacagagaggtcatatttccaccttttccctcctcctccaagtccatgtactgattcatcatag

SEQ ID NO: 127561 - DNA, 4848 bp, Artificial Sequence
  derived and/or modified sequence
atggaggccgccccccccggccccccctggcccctgctgctgctgctgctgctgctgctggccctgtgcggctgccccgcccccgccgccgccagccccctgctgctgttcgccaacagaagagacgtgagactggtggacgccggcggcgtgaagctggagagcaccatcgtggtgagcggcctggaggacgccgccgccgtggacttccagttcagcaagggcgccgtgtactggaccgacgtgagcgaggaggccatcaagcagacctacctgaaccagaccggcgccgccgtgcagaacgtggtgatcagcggcctggtgagccccgacggcctggcctgcgactgggtgggcaagaagctgtactggaccgacagcgagaccaacagaatcgaggtggccaacctgaacggcaccagcagaaaggtgctgttctggcaggacctggaccagcccagagccatcgccctggaccccgcccacggctacatgtactggaccgactggggcgagacccccagaatcgagagagccggcatggacggcagcaccagaaagatcatcgtggacagcgacatctactggcccaacggcctgaccatcgacctggaggagcagaagctgtactgggccgacgccaagctgagcttcatccacagagccaacctggacggcagcttcagacagaaggtggtggagggcagcctgacccaccccttcgccctgaccctgagcggcgacaccctgtactggaccgactggcagaccagaagcatccacgcctgcaacaagagaaccggcggcaagagaaaggagatcctgagcgccctgtacagccccatggacatccaggtgctgagccaggagagacagcccttcttccacaccagatgcgaggaggacaacggcggctgcagccacctgtgcctgctgagccccagcgagcccttctacacctgcgcctgccccaccggcgtgcagctgcaggacaacggcagaacctgcaaggccggcgccgaggaggtgctgctgctggccagaagaaccgacctgagaagaatcagcctggacacccccgacttcaccgacatcgtgctgcaggtggacgacatcagacacgccatcgccatcgactacgaccccctggagggctacgtgtactggaccgacgacgaggtgagagccatcagaagagcctacctggacggcagcggcgcccagaccctggtgaacaccgagatcaacgaccccgacggcatcgccgtggactgggtggccagaaacctgtactggaccgacaccggcaccgacagaatcgaggtgaccagactgaacggcaccagcagaaagatcctggtgagcgaggacctggacgagcccagagccatcgccctgcaccccgtgatgggcctgatgtactggaccgactggggcgagaaccccaagatcgagtgcgccaacctggacggccaggagagaagagtgctggtgaacgccagcctgggctggcccaacggcctggccctggacctgcaggagggcaagctgtactggggcgacgccaagaccgacaagatcgaggtgatcaacgtggacggcaccaagagaagaaccctgctggaggacaagctgccccacatcttcggcttcaccctgctgggcgacttcatctactggaccgactggcagagaagaagcatcgagagagtgcacaaggtgaaggccagcagagacgtgatcatcgaccagctgcccgacctgatgggcctgaaggccgtgaacgtggccaaggtggtgggcaccaacccctgcgccgacagaaacggcggctgcagccacctgtgcttcttcaccccccacgccaccagatgcggctgccccatcggcctggagctgctgagcgacatgaagacctgcatcgtgcccgaggccttcctggtgttcaccagcagagccgccatccacagaatcagcctggagaccaacaacaacgacgtggccatccccctgaccggcgtgaaggaggccagcgccctggacttcgacgtgagcaacaaccacatctactggaccgacgtgagcctgaagaccatcagcagagccttcatgaacggcagcagcgtggagcacgtggtggagttcggcctggactaccccgagggcatggccgtggactggatgggcaagaacctgtactgggccgacaccggcaccaacagaatcgaggtggccagactggacggccagttcagacaggtgctggtgtggagagacctggacaaccccagaagcctggccctggaccccaccaagggctacatctactggaccgagtggggcggcaagcccagaatcgtgagagccttcatggacggcaccaactgcatgaccctggtggacaaggtgggcagagccaacgacctgaccatcgactacgccgaccagagactgtactggaccgacctggacaccaacatgatcgagagcagcaacatgctgggccaggagagagtggtgatcgccgacgacctgccccaccccttcggcctgacccagtacagcgactacatctactggaccgactggaacctgcacagcatcgagagagccgacaagaccagcggcagaaacagaaccctgatccagggccacctggacttcgtgatggacatcctggtgttccacagcagcagacaggacggcctgaacgactgcatgcacaacaacggccagtgcggccagctgtgcctggccatccccggcggccacagatgcggctgcgccagccactacaccctggaccccagcagcagaaactgcagcccccccaccaccttcctgctgttcagccagaagagcgccatcagcagaatgatccccgacgaccagcacagccccgacctgatcctgcccctgcacggcctgagaaacgtgaaggccatcgactacgaccccctggacaagttcatctactgggtggacggcagacagaacatcaagagagccaaggacgacggcacccagcccttcgtgctgaccagcctgagccagggccagaaccccgacagacagccccacgacctgagcatcgacatctacagcagaaccctgttctggacctgcgaggccaccaacaccatcaacgtgcacagactgagcggcgaggccatgggcgtggtgctgagaggcgacagagacaagcccagagccatcgtggtgaacgccgagagaggctacctgtacttcaccaacatgcaggacagagccgccaagatcgagagagccgccctggacggcaccgagagagaggtgctgttcaccaccggcctgatcagacccgtggccctggtggtggacaacaccctgggcaagctgttctgggtggacgccgacctgaagagaatcgagagctgcgacctgagcggcgccaacagactgaccctggaggacgccaacatcgtgcagcccctgggcctgaccatcctgggcaagcacctgtactggatcgacagacagcagcagatgatcgagagagtggagaagaccaccggcgacaagagaaccagaatccagggcagagtggcccacctgaccggcatccacgccgtggaggaggtgagcctggaggagttcagcgcccacccctgcgccagagacaacggcggctgcagccacatctgcatcgccaagggcgacggcacccccagatgcagctgccccgtgcacctggtgctgctgcagaacctgctgacctgcggcgagccccccacctgcagccccgaccagttcgcctgcgccaccggcgagatcgactgcatccccggcgcctggagatgcgacggcttccccgagtgcgacgaccagagcgacgaggagggctgccccgtgtgcagcgccgcccagttcccctgcgccagaggccagtgcgtggacctgagactgagatgcgacggcgaggccgactgccaggacagaagcgacgaggccgactgcgacgccatctgcctgcccaaccagttcagatgcgccagcggccagtgcgtgctgatcaagcagcagtgcgacagcttccccgactgcatcgacggcagcgacgagctgatgtgcgagatcaccaagccccccagcgacgacagccccgcccacagcagcgccatcggccccgtgatcggcatcatcctgagcctgttcgtgatgggcggcgtgtacttcgtgtgccagagagtggtgtgccagagatacgccggcgccaacggccccttcccccacgagtacgtgagcggcaccccccacgtgcccctgaacttcatcgcccccggcggcagccagcacggccccttcaccggcatcgcctgcggcaagagcatgatgagcagcgtgagcctgatgggcggcagaggcggcgtgcccctgtacgacagaaaccacgtgaccggcgccagcagcagcagcagcagcagcaccaaggccaccctgtacccccccatcctgaaccccccccccagccccgccaccgaccccagcctgtacaacatggacatgttctacagcagcaacatccccgccaccgccagaccctacagaccctacatcatcagaggcatggccccccccaccaccccctgcagcaccgacgtgtgcgacagcgactacagcgccagcagatggaaggccagcaagtactacctggacctgaacagcgacagcgacccctacccccccccccccaccccccacagccagtacctgagcgccgaggacagctgcccccccagccccgccaccgagagaagctacttccacctgttcccccccccccccagcccctgcaccgacagcagctag

SEQ ID NO: 127562 - protein, 1613 aa, Artificial Sequence
  derived and/or modified sequence
MGAVLRSLLACSFCVLLRAAPLLLYANRRDLRLVDATNGKENATIVVGGLEDAAAVDFVFSHGLIYWSDVSEEAIKRTEFNKTESVQNVVVSGLLSPDGLACDWLGEKLYWTDSETNRIEVSNLDGSLRKVLFWQELDQPRAIALDPSSGFMYWTDWGEVPKIERAGMDGSSRFIIINSEIYWPNGLTLDYEEQKLYWADAKLNFIHKSNLDGTNRQAVVKGSLPHPFALTLFEDILYWTDWSTHSILACNKYTGEGLREIHSDIFSPMDIHAFSQQRQPNATNPCGIDNGGCSHLCLMSPVKPFYQCACPTGVKLLENGKTCKDGATELLLLARRTDLRRISLDTPDFTDIVLQLEDIRHAIAIDYDPVEGYIYWTDDEVRAIRRSFIDGSGSQFVVTAQIAHPDGIAVDWVARNLYWTDTGTDRIEVTRLNGTMRKILISEDLEEPRAIVLDPMVGYMYWTDWGEIPKIERAALDGSDRVVLVNTSLGWPNGLALDYDEGKIYWGDAKTDKIEVMNTDGTGRRVLVEDKIPHIFGFTLLGDYVYWTDWQRRSIERVHKRSAEREVIIDQLPDLMGLKATNVHRVIGSNPCAEENGGCSHLCLYRPQGLRCACPIGFELISDMKTCIVPEAFLLFSRRADIRRISLETNNNNVAIPLTGVKEASALDFDVTDNRIYWTDISLKTISRAFMNGSALEHVVEFGLDYPEGMAVDWLGKNLYWADTGTNRIEVSKLDGQHRQVLVWKDLDSPRALALDPAEGFMYWTEWGGKPKIDRAAMDGSERTTLVPNVGRANGLTIDYAKRRLYWTDLDTNLIESSNMLGLNREVIADDLPHPFGLTQYQDYIYWTDWSRRSIERANKTSGQNRTIIQGHLDYVMDILVFHSSRQSGWNECASSNGHCSHLCLAVPVGGFVCGCPAHYSLNADNRTCSAPTTFLLFSQKSAINRMVIDEQQSPDIILPIHSLRNVRAIDYDPLDKQLYWIDSRQNMIRKAQEDGSQGFTVVVSSVPSQNLEIQPYDLSIDIYSRYIYWTCEATNVINVTRLDGRSVGVVLKGEQDRPRAVVVNPEKGYMYFTNLQERSPKIERAALDGTEREVLFFSGLSKPIALALDSRLGKLFWADSDLRRIESSDLSGANRIVLEDSNILQPVGLTVFENWLYWIDKQQQMIEKIDMTGREGRTKVQARIAQLSDIHAVKELNLQEYRQHPCAQDNGGCSHICLVKGDGTTRCSCPMHLVLLQDELSCGEPPTCSPQQFTCFTGEIDCIPVAWRCDGFTECEDHSDELNCPVCSESQFQCASGQCIDGALRCNGDANCQDKSDEKNCEVLCLIDQFRCANGQCIGKHKKCDHNVDCSDKSDELDCYPTEEPAPQATNTVGSVIGVIVTIFVSGTVYFICQRMLCPRMKGDGETMTNDYVVHGPASVPLGYVPHPSSLSGSLPGMSRGKSMISSLSIMGGSSGPPYDRAHVTGASSSSSSSTKGTYFPAILNPPPSPATERSHYTMEFGYSSNSPSTHRSYSYRPYSYRHFAPPTTPCSTDVCDSDYAPSRRMTSVATAKGYTSDLNYDSEPVPPPPTPRSQYLSAEENYESCPPSPYTERSYSHHLYPPPPSPCTDSS

SEQ ID NO: 127563 - protein, 1478 aa, Artificial Sequence
  derived and/or modified sequence
  misc_feature (1)..(1): Xaa can be any naturally occurring amino acid
XLDQPRAIALDPSSGFMYWTDWGEVPKIERAGMDGSSRFIIINSEIYWPNGLTLDYEEQKLYWADAKLNFIHKSNLDGTNRQAVVKGSLPHPFALTLFEDILYWTDWSTHSILACNKYTGEGLREIHSDIFSPMDIHAFSQQRQPNATNPCGIDNGGCSHLCLMSPVKPFYQCACPTGVKLLENGKTCKDGATELLLLARRTDLRRISLDTPDFTDIVLQLEDIRHAIAIDYDPVEGYIYWTDDEVRAIRRSFIDGSGSQFVVTAQIAHPDGIAVDWVARNLYWTDTGTDRIEVTRLNGTMRKILISEDLEEPRAIVLDPMVGYMYWTDWGEIPKIERAALDGSDRVVLVNTSLGWPNGLALDYDEGKIYWGDAKTDKIEVMNTDGTGRRVLVEDKIPHIFGFTLLGDYVYWTDWQRRSIERVHKRSAEREVIIDQLPDLMGLKATNVHRVIGSNPCAEENGGCSHLCLYRPQGLRCACPIGFELISDMKTCIVPEAFLLFSRRADIRRISLETNNNNVAIPLTGVKEASALDFDVTDNRIYWTDISLKTISRAFMNGSALEHVVEFGLDYPEGMAVDWLGKNLYWADTGTNRIEVSKLDGQHRQVLVWKDLDSPRALALDPAEGFMYWTEWGGKPKIDRAAMDGSERTTLVPNVGRANGLTIDYAKRRLYWTDLDTNLIESSNMLGLNREVIADDLPHPFGLTQYQDYIYWTDWSRRSIERANKTSGQNRTIIQGHLDYVMDILVFHSSRQSGWNECASSNGHCSHLCLAVPVGGFVCGCPAHYSLNADNRTCSAPTTFLLFSQKSAINRMVIDEQQSPDIILPIHSLRNVRAIDYDPLDKQLYWIDSRQNMIRKAQEDGSQGFTVVVSSVPSQNLEIQPYDLSIDIYSRYIYWTCEATNVINVTRLDGRSVGVVLKGEQDRPRAVVVNPEKGYMYFTNLQERSPKIERAALDGTEREVLFFSGLSKPIALALDSRLGKLFWADSDLRRIESSDLSGANRIVLEDSNILQPVGLTVFENWLYWIDKQQQMIEKIDMTGREGRTKVQARIAQLSDIHAVKELNLQEYRQHPCAQDNGGCSHICLVKGDGTTRCSCPMHLVLLQDELSCGEPPTCSPQQFTCFTGEIDCIPVAWRCDGFTECEDHSDELNCPVCSESQFQCASGQCIDGALRCNGDANCQDKSDEKNCEVLCLIDQFRCANGQCIGKHKKCDHNVDCSDKSDELDCYPTEEPAPQATNTVGSVIGVIVTIFVSGTVYFICQRMLCPRMKGDGETMTNDYVVHGPASVPLGYVPHPSSLSGSLPGMSRGKSMISSLSIMGGSSGPPYDRAHVTGASSSSSSSTKGTYFPAILNPPPSPATERSHYTMEFGYSSNSPSTHRSYSYRPYSYRHFAPPTTPCSTDVCDSDYAPSRRMTSVATAKGYTSDLNYDSEPVPPPPTPRSQYLSAEENYESCPPSPYTERSYSHHLYPPPPSPCTDSS

SEQ ID NO: 127564 - DNA, 4842 bp, Artificial Sequence
  derived and/or modified sequence
atgggggcagtactccgcagcctgctggcttgctctttctgcgttctgcttcgggccgccccactgctgctgtatgcgaatcgtcgtgatcttaggctagtcgacgcaacaaatggaaaggaaaatgcgactatcgtggtgggaggacttgaagatgctgccgcggtagactttgtcttctcacacggcttgatctactggagtgacgtgagtgaagaggcaatcaagcggacagaattcaataaaactgaaagcgtgcagaatgtagtggtctccggactgttatcaccggacgggctggcatgcgactggctaggagagaagctttactggacggactccgagactaatcgcattgaagtgtccaatctggatgggtcgctgaggaaagtgcttttttggcaagagctcgaccaaccccgcgcaattgccttggacccgtctagcggattcatgtattggacagactggggtgaggtgcccaaaattgagagagccggcatggacgggagttcaagatttattataataaattctgagatctattggccaaatggcttgacactggactatgaggaacagaagctttactgggccgacgccaaactgaattttatccacaagtctaatttggatggcaccaatcgtcaggcggtggtcaaaggcagtttgcctcatccttttgccctcactctctttgaagatatcttgtactggactgattggagtacacactctattttggcttgtaataagtacacaggagagggcttgcgcgagatacacagtgatatcttctctccaatggacattcacgcattcagccagcaacggcaacctaacgctaccaatccatgcggaatcgataatgggggttgctctcacctgtgtttaatgtctccagtgaagccattttatcagtgcgcctgccctactggggtgaagcttctggaaaatggaaagacttgcaaggatggtgccaccgaactgctgctgttagcccgccggacagaccttcgccgaatttctttggatacccctgatttcactgatattgttctccagctggaggatattaggcacgccattgctattgactatgacccagttgagggttacatttactggacagatgatgaagtccgtgccatccgacgctccttcatagacggatccgggagccaattcgtggtgacggcccagattgcccatcccgatggcattgccgttgactgggtggctcgcaacctgtactggacagatacaggaaccgaccgcatcgaagtaacaaggttaaacggcactatgcgtaagatcctaatctccgaagacttggaagagccgagagcgattgtgctcgatcccatggtggggtatatgtattggactgactggggggaaatccccaaaattgaacgagcagctctggatgggtcagacagggtagtcctggtcaacacctcacttggctggccaaatggactagccctggactacgatgaaggaaaaatctactggggtgatgccaagacggataagatagaggtcatgaatacggatggaacaggccgaagggtccttgtggaagataagattccccatatcttcggtttcactctcctgggcgattacgtatattggacagattggcagagacggtcaatcgagcgggtgcacaagagatcagctgaacgtgaagtgatcatagatcaactgccagacctgatgggcctcaaggccacgaacgtgcaccgggtgatcgggtcaaatccctgcgcagaagaaaatggaggttgtagccacctgtgtttgtatcggccacaaggattgcgatgtgcttgtcccatcggatttgagctgattagcgatatgaagacgtgcattgtcccggaagcgtttctgctgttttctcggagggccgatattcgcaggattagtctagagaccaataacaataacgttgctattcccctgacgggggttaaagaggcttctgcccttgactttgatgttactgacaaccgtatatactggactgatataagcctgaagacgatcagtcgggcttttatgaatggttcggccttggaacatgttgtggagttcgggctggattatccagaagggatggccgttgactggctgggaaagaacctatactgggctgatacaggcaccaaccggatcgaggtgtcgaagctcgacggacaacataggcaggtgctggtttggaaagacctggactcccccagagcactcgctttggaccccgccgagggctttatgtactggactgaatggggcggcaagcctaaaatagacagggctgccatggatggcagcgaacgcaccacactggtcccgaatgtgggccgggctaatgggttaacgattgactacgctaagagacgcctgtactggacggatttggatactaatttaatcgagagtagtaatatgctaggcttgaaccgggaagtgattgccgatgatctcccacatccttttggcctcacccagtaccaggactacatctattggacagactggtctagacggtcgattgaacgggctaataagaccagtggacagaatcggacaatcatccagggccatctcgattatgtgatggacatcttagtcttccacagctcaaggcagtccggctggaacgaatgcgcgtcttccaacgggcactgttcacatttgtgtctcgccgttccagtgggcggctttgtgtgtggatgtccggcacattactccctgaacgcagataatcgaacatgttctgccccaaccactttcctgctgttcagccagaagagcgccattaaccggatggtgattgatgaacaacagtcaccagatatcatcctcccgattcattccctacgcaacgtgagagccatcgattatgaccccctggataagcagttgtactggattgattctcgccagaatatgatccgcaaagcccaggaggacggcagccaaggattcaccgttgtggtttcaagtgtgccctcacagaaccttgagattcagccttacgatctctccatcgacatctatagtagatacatatactggacctgtgaagccaccaacgtgattaatgttacaagactggacggaaggtctgtaggcgtagtcctgaagggcgagcaggaccgtccacgtgcggtggttgtgaacccagagaagggttatatgtactttaccaacttgcaggagagaagtcccaaaatagagcgcgccgctctcgacggcaccgaaagggaggtcctgttcttctcaggactcagcaagcctattgctctggctcttgactctcgtttaggcaaattgttttgggctgacagtgacctgcgtcgcatcgagagctcggatctgagtggtgcgaatcgcattgtgctggaagactctaatatcctccagcccgtggggcttactgtctttgagaactggttatactggattgacaaacagcagcagatgatagaaaaaattgatatgaccggaagagagggaagaactaaggttcaggcccgcatagcccagctatcggacatccacgctgtcaaagaactgaacctccaggagtatcgccaacatccgtgcgcccaggacaatggtggctgtagccatatctgtctggtcaaaggcgacggtactactcgttgcagttgccctatgcacttggtgttgttgcaggacgaactttcctgcggcgaaccacctacttgttctccacagcagttcacgtgttttaccggcgagatcgactgcatcccagtggcttggcgatgcgatggttttactgagtgcgaagaccactctgacgagttgaattgtcctgtctgtagcgagagccagttccaatgtgcctctggccagtgcattgatggcgccttacggtgcaatggtgatgccaattgccaggataagagcgacgagaagaactgtgaggtgctctgcctcattgaccaattcaggtgcgcaaacggccagtgcatcggaaagcataaaaagtgtgaccacaatgtagattgttctgacaaatcggacgagctggattgttatccaaccgaggaaccagccccacaggctaccaacacagtcggctccgtcatcggggtgatcgtgaccatcttcgtgtccgggactgtgtacttcatctgccagaggatgctctgccccaggatgaagggcgatggcgaaactatgactaacgactacgtcgtgcacgggccagcctccgtgcctctcggttatgtccctcatccctcgagcctctccggtagtctccctggtatgtctcgagggaaatcaatgatctccagcttgagcatcatgggcgggtcatccgggccgccctacgatcgcgctcacgttactggcgcctctagctcatcctctagctccaccaaggggacctacttccccgccatcttgaatccgccgccttccccggccactgagaggtctcactatacaatggagtttggctacagttccaactcaccttcaacgcacagatcttattcatacaggccttattcttatcgccactttgcacctccaacgactccatgcagcacagatgtttgtgattctgactacgcaccttctcggcggatgacgtcagtggccacagcaaaagggtacacctcagacctgaactacgactcagagccagtgccgcccccgccaacccccagaagccagtacctgtcagcggaggaaaattacgaatcatgtccgcctagcccatataccgaacgcagctacagtcatcatttgtaccccccacctcctagcccctgtacagactcctcttag

SEQ ID NO: 127565 - DNA, 4437 bp, Artificial Sequence
  derived and/or modified sequence
taactcgaccagccaagagcaattgcactcgacccatcctcagggtttatgtactggactgactggggggaggtgcctaagatcgagagagctgggatggacgggtcaagccgatttatcattattaactccgaaatctactggcccaacggcctgactctggactacgaggaacagaagttgtactgggcagatgcgaagctgaatttcatacacaagagcaacttggacgggaccaaccgtcaggctgttgtgaagggatctttgccgcatcccttcgccctgacactgtttgaagatatcttgtattggacagactggtccactcactctattctcgcctgcaataagtacactggagaggggctgagagaaattcactccgacatcttttcaccaatggacattcatgccttctctcaacagcggcagccgaacgccacgaacccgtgcggaatcgataacggcggatgctcacacctgtgcctgatgtctcctgttaaacctttctatcagtgcgcctgccctacaggggttaaactgcttgagaacggaaaaacatgtaaggacggagctaccgagttgctgctgctagcccgcagaactgacttgcgcaggatcagccttgatacccccgatttcactgatatcgtgctccagctcgaagacattcgtcacgccatcgcgatagattatgatccagtggagggatacatctactggacagacgacgaggtccgggcaatccgccgttcctttatagacggctctggctcacagtttgtggtcacagcacaaattgcgcatcctgacgggattgcagtggattgggtcgcccggaacctgtactggaccgataccggcactgatcgcatcgaagttacgagactgaacgggactatgcgaaaaatccttatcagcgaggacctcgaggagccacgcgccatcgtgctagatccaatggtgggttacatgtactggactgattggggggaaatccctaagattgagcgcgctgcattggacggatccgacagggttgtgctcgtcaacactagcttgggttggcccaatggcctggctctcgattacgatgaaggaaagatttactggggggatgccaaaacggataaaatcgaagtgatgaacaccgatggtacaggaagaagggtccttgtggaggataagattccacacatctttggatttacgttactcggagactacgtatactggaccgactggcagcgccgatccatcgaaagggtccataaacgaagcgcagaacgagaggtcatcattgaccagttaccggatctgatgggcctgaaagccacaaacgtgcaccgggtcatcggctccaatccttgcgctgaagagaatggtggatgctctcacctctgcctgtaccggccacaaggcctgagatgcgcttgtcctattggcttcgagttgatttctgatatgaagacgtgtattgttccagaggctttcctcttgttttccagacgggctgacatccggagaatctccttggaaactaacaataacaatgtggcgatacctctcacaggtgtgaaagaggcctctgccttggatttcgacgtgaccgataatcggatttattggaccgatatttcactcaagacaatcagccgcgcgtttatgaatggctctgccctggagcacgtggtggaattcggcttggactatccagagggcatggccgtcgactggctcggcaagaacctgtactgggcggacaccggaacaaacagaattgaggtgtctaaactcgatgggcagcatcgccaggttcttgtttggaaagaccttgactccccacgggcactggcccttgaccctgcagaaggatttatgtactggactgagtgggggggcaaaccgaagatcgatagggctgccatggatgggtctgagaggacgacactggtccctaacgttggccgcgccaacggactaacaatcgattatgcaaaacgaagactctattggacggacttggataccaatctcatcgaatcctctaatatgctggggctcaaccgggaggtgatcgcagacgatttgccacacccgtttgggctcactcagtaccaggactatatttattggactgattggagtcgtcgaagtattgagagggcgaataaaacatcgggccaaaatagaactatcattcagggccatttggactatgtgatggatatcctcgtgtttcactcctcccgtcagtccggttggaacgagtgtgcaagcagcaacggtcactgctcccatctatgtctggctgtacctgtcggaggtttcgtgtgcgggtgtccagctcattactcactgaatgcagacaatcggacctgctctgcccccactacattcctgttgtttagtcaaaaatcggctattaaccggatggtgatcgacgagcagcagtctcccgatatcatcctgcccattcattctctgcgaaacgttagagctatcgattacgatcctctggataaacagttgtattggatagatagcaggcagaacatgatccggaaggctcaagaggatggatctcagggattcactgtggtagtgtcttccgtgccctcacaaaacctggagatacagccgtacgacctgagcatcgacatttactctcgctatatctattggacttgcgaggccactaacgtgattaacgtgacccgccttgatggtagatctgtgggtgtggttctaaagggcgaacaggatcgcccaagagctgttgtggttaacccagagaagggctatatgtattttaccaatctccaggagcggtccccaaaaattgaacgcgctgcactcgatggaacagaaagggaggtcctcttttttagcgggctctccaagcccatagctcttgcccttgacagccgtctcgggaagctcttctgggccgactcagacctccggcggatcgaaagctctgatcttagtggtgcgaataggattgttctggaagattctaacatcttgcaacctgtcggcctcacagtgttcgagaattggctgtactggatcgacaagcagcaacagatgattgagaagatcgatatgaccggacgggaggggcggactaaggtgcaggccaggatcgctcagctctcagacatccacgccgtgaaagaactaaacctacaggagtacaggcagcatccctgtgcacaagataacgggggttgtagtcatatttgtctagttaagggggacggcacaactcggtgctcttgtccaatgcacttagtcctcctgcaagacgagctttcatgcggagagccacccacctgttccccacagcagtttacatgtttcactggtgagatagactgtattcctgtggcctggaggtgtgacggattcaccgagtgcgaggaccacagtgatgaacttaattgccccgtctgcagtgaatcacagttccagtgtgcctcaggccagtgcatagatggtgcacttcgctgtaacggcgacgctaattgtcaggataagtcagatgagaaaaactgcgaagtgctgtgcttaatcgaccaattcaggtgcgcgaatggccagtgcattggcaaacacaagaaatgtgatcacaacgtggactgcagcgacaaatccgacgaactggactgttacccaacagaggaaccagccccacaggcaaccaacaccgtcggtagcgtgattggggtcattgtcactatttttgtatccgggactgtttatttcatatgtcaacgtatgctatgcccacgcatgaagggagatggcgagactatgactaacgactacgtcgtgcacggacccgcctcagtccctctcggctatgtgcctcaccctagctcactctctggatcactgccgggcatgtccaggggtaagtcaatgatatcatccttaagcatcatgggaggatcctcaggccccccatacgacagagcccacgttactggcgccagtagctcttcatccagttctacgaaagggacttacttccctgctattctaaacccacctcctagtcctgccacggaaagatcacattacactatggagtttggctacagctcaaactcccctagcacccaccggtcatactcatacagaccatattcatacaggcacttcgccccacccacaacgccatgttcaactgacgtctgtgattcggattacgctccttctcgccgcatgaccagtgttgcgaccgccaagggctacacctcagacttaaattatgactctgaacccgtccccccaccgcctacgccccgcagccagtatctgtctgcggaagagaattacgaaagctgcccaccatctccctatactgaaagatcttactctcaccacctgtaccccccacccccctccccgtgtacagactcctcctag

SEQ ID NO: 127566 - DNA, 4842 bp, Artificial Sequence
  derived and/or modified sequence
atgggcgctgtgctgcggagcctgctggcctgcagcttctgtgtgctgctgcgggccgcccccctgctgctgtatgccaacagaagagacctgcggctggtggatgccaccaacgggaaggaaaatgccaccatcgtggtgggcggcctggaggatgctgctgctgtggactttgtgttcagccacggcctcatctactggagcgatgtgtctgaggaggccatcaagaggacagagttcaacaagacagaatctgtgcagaatgtggtggtgtctggcctgctgagcccagatggcctggcctgtgactggctgggggagaagctgtactggacagacagcgagaccaacagaattgaggtgagcaacctggatggcagcctgaggaaggtgctcttctggcaggagctggaccagccccgggccatcgccctggaccccagcagcggcttcatgtactggacagactggggcgaggtgcccaagattgagcgggccggcatggatggcagcagccgcttcatcatcatcaacagcgagatctactggcccaacggcctgaccctggactatgaggagcagaagctgtactgggcagatgccaagctgaacttcatccacaagagcaacctggatggcaccaaccggcaggccgtggtgaagggcagcctgccccacccctttgccctgaccctgtttgaggacatcctgtactggacagactggagcacccacagcatcctggcctgcaacaagtacaccggggagggcctgcgggagatccacagcgacatcttcagccccatggacatccacgccttcagccagcagaggcagcccaatgccaccaacccctgtggcatcgacaatggaggctgcagccacctgtgcctgatgagccctgtgaagcccttctaccagtgtgcctgccccaccggggtgaagctgctggagaatggcaagacctgcaaggatggagccacagagctgctgctgctggccaggagaacagacctgcggcgcatcagcctggacaccccagacttcacagacatcgtgctgcagctggaggacatcagacatgccatcgccattgattatgaccctgtggagggctacatctactggacagatgatgaggtgcgggccatcagaagaagcttcattgatggcagcggcagccagtttgtggtgacagcccagatcgcccacccagatggcattgctgtggactgggtggccaggaacctgtactggacagacaccggcacagacagaattgaggtgacccggctgaatggcaccatgaggaagatcctgatcagcgaggacctggaggagccccgggccatcgtgctggaccccatggtgggctacatgtactggacagactggggcgagatccccaagattgagcgggccgccctggatggcagtgacagagtggtgctggtgaacaccagcctgggctggcccaacggcctggccctggactatgatgagggcaagatctactggggagatgccaagacagacaagattgaggtgatgaacacagatggcaccggccggcgggtgctggtggaggacaagatcccccacatcttcggcttcaccctgctgggggactatgtgtactggacagactggcagaggaggagcattgagcgggtgcacaagaggtctgctgagcgggaggtgatcatcgaccagctgcctgacctgatgggcctgaaggccaccaacgtgcaccgggtgattggcagcaacccctgtgccgaggagaatggaggctgcagccacctgtgcctgtaccggccccagggcctgcgctgtgcctgccccatcggctttgagctgatcagtgacatgaagacctgcatcgtgcctgaggccttcctgctcttcagccggcgggctgacatccgccgcatcagcctggagaccaacaacaacaacgtggccatccccctgactggagtgaaggaggccagcgccctggactttgatgtgacagacaaccgcatctactggacagacatcagcctgaagaccatcagccgggccttcatgaatggcagcgccctggagcacgtggtggagtttggcctggactacccagagggcatggctgtggactggctgggcaagaacctgtactgggccgacaccggcaccaacagaattgaggtgtccaagctggatggccagcaccggcaggtgctggtgtggaaggacctggacagcccccgggccctggccctggaccctgctgagggcttcatgtactggacagagtggggcggcaagcccaagattgaccgggccgccatggatggcagcgagaggaccaccctggtgcccaacgtgggccgggccaacggcctgaccatcgactatgccaagagaagactctactggacagacctggacaccaacctgattgagagcagcaacatgctgggcctgaaccgggaggtgattgctgatgacctgccccaccccttcggcctgacccagtaccaggactacatctactggacagactggagccgccgcagcattgagcgggccaacaagaccagcggccagaacagaaccatcatccagggccacctggactatgtgatggacatcctggtgttccacagcagccggcagagcggctggaatgaatgtgccagcagcaatggccactgcagccacctgtgcctggccgtgcctgtgggcggctttgtgtgtggctgcccagcccactacagcctgaatgctgacaacagaacctgcagcgcccccaccaccttcctgctcttcagccagaagagcgccatcaacaggatggtgattgatgagcagcagagcccagacatcatcctgcccatccacagcctgagaaatgtgcgggccatcgactatgaccccctggacaagcagctgtactggattgacagccggcagaacatgatcaggaaggcccaggaggatggcagccagggcttcaccgtggtggtgtcctctgtgcccagccagaacctggagatccagccctatgacctgagcattgacatctacagccgctacatctactggacctgtgaggccaccaacgtcatcaacgtgacccggctggatggccgctctgtgggcgtggtgctgaagggggagcaggaccggcccagggctgtggtggtgaaccctgagaagggctacatgtacttcaccaacctgcaggagaggagccccaagattgagcgggccgccctggatggaacagagcgggaggtgctcttcttcagcggcctgagcaagcccatcgccctggccctggacagccggctgggcaagctgttctgggccgacagcgacctgcggcgcatcgagagcagtgacctgagcggggccaacagaattgtgctggaggacagcaacatcctgcagcctgtgggcctgactgtgtttgagaactggctgtactggattgacaagcagcagcagatgattgagaagattgacatgacaggccgggagggccgcaccaaggtgcaggccagaattgcccagctgagtgacatccatgctgtgaaggagctgaacctgcaggagtaccggcagcacccctgtgcccaggacaatggaggctgcagccacatctgcctggtgaagggagatggcaccacccgctgcagctgccccatgcacctggtgctgctgcaggatgagctgagctgtggggagccccccacctgcagcccccagcagttcacctgcttcaccggggagattgactgcatccctgtggcctggaggtgtgatggcttcacagaatgtgaggaccacagtgatgagctgaactgccctgtgtgcagcgagagccagttccagtgtgccagcggccagtgcattgatggagccctgcgctgcaatggagatgccaactgccaggacaagagtgatgagaagaactgtgaggtgctgtgcctgattgaccagttccgctgtgccaacggccagtgcatcggcaagcacaagaagtgtgaccacaacgtggactgcagcgacaagagtgatgagctggactgctaccccacagaggagcccgccccccaggccaccaacacagtgggcagcgtcatcggcgtgattgtgaccatctttgtgtctggaacagtgtacttcatctgccagaggatgctgtgccccaggatgaagggagatggagagaccatgaccaatgactatgtggtgcacggccctgcctctgtgcccctgggctacgtgccccaccccagcagcctgagcggcagcctgcccggcatgagccggggcaagtccatgatcagcagcctgagcatcatgggcggcagcagcggccccccctatgaccgggcccacgtgactggagccagcagcagcagcagcagcagcaccaagggcacctacttccctgccatcctgaaccccccacccagccctgccacagagaggagccactacaccatggagtttggctacagcagcaacagccccagcacccacaggagctacagctaccggccctacagctaccgccactttgccccacccaccaccccctgcagcacagatgtgtgtgacagcgactatgcccccagcaggaggatgacctctgtggccacagccaagggctacaccagtgacctgaactatgacagcgagcctgtgcccccaccacccacccccaggagccagtacctgtctgctgaggagaactatgagagctgcccccccagcccctacacagagaggagctacagccaccacctgtacccacctccacccagcccctgcacagacagcagctag

SEQ ID NO: 127567 - DNA, 4437 bp, Artificial Sequence
  derived and/or modified sequence
tgactggaccagccccgggccatcgccctggaccccagcagcggcttcatgtactggacagactggggcgaggtgcccaagattgaaagagctggcatggatggcagcagccgcttcatcatcatcaacagcgagatctactggcccaacggcctgaccctggactatgaggagcagaagctgtactgggcagatgccaagctgaacttcatccacaagagcaacctggatggcaccaaccggcaggccgtggtgaagggcagcctgccccacccctttgccctgaccctgtttgaggacatcctgtactggacagactggagcacccacagcatcctggcctgcaacaagtacacaggagagggcctgcgggagatccacagcgacatcttcagccccatggacatccacgccttcagccagcagaggcagcccaatgccaccaacccctgtggcatcgacaatggaggctgcagccacctgtgcctgatgagccctgtgaagcccttctaccagtgtgcctgccccactggagtgaagctgctggagaatggcaagacctgcaaggatggagccacagagctgctgctgctggcccggaggacagacctgcggcgcatcagcctggacaccccagacttcacagacatcgtgctgcagctggaggacatcagacatgccatcgccatcgactatgaccctgtggagggctacatctactggacagatgatgaggtgcgggccatccgccgctccttcattgatggcagcggcagccagtttgtggtgacagcccagatcgcccacccagatggcattgctgtggactgggtggccaggaacctgtactggacagacacaggaacagaccgcatcgaggtgacccggctgaatggcaccatgaggaagatcctgatcagcgaggacctggaggagccccgggccatcgtgctggaccccatggtgggctacatgtactggacagactggggcgagatccccaagattgaaagagctgccctggatggcagtgacagagtggtgctggtgaacaccagcctgggctggcccaacggcctggccctggactatgatgagggcaagatctactggggagatgccaagacagacaagattgaggtgatgaacacagatggcactggaagaagagtgctggtggaggacaagatcccccacatcttcggcttcaccctgctgggggactatgtgtactggacagactggcagaggaggagcattgaaagagtgcacaagaggtctgctgagcgggaggtgatcatcgaccagctgcctgacctgatgggcctgaaggccaccaacgtgcacagggtcatcggcagcaacccctgtgccgaggagaatggaggctgcagccacctgtgcctgtaccggccccagggcctgcgctgtgcctgccccatcggctttgagctgatcagtgacatgaagacctgcatcgtgcctgaggccttcctgctcttcagcagaagagctgacatccgccgcatcagcctggagaccaacaacaacaacgtggccatccccctgactggagtgaaggaggccagcgccctggactttgatgtgacagacaaccgcatctactggacagacatcagcctgaagaccatcagccgggccttcatgaatggaagtgccctggagcacgtggtggagtttggcctggactacccagagggcatggctgtggactggctgggcaagaacctgtactgggccgacaccggcaccaaccgcatcgaggtgtccaagctggatggccagcaccggcaggtgctggtgtggaaggacctggacagcccccgggccctggccctggaccctgctgagggcttcatgtactggacagagtggggcggcaagcccaagattgacagagctgccatggatggcagcgagaggaccaccctggtgcccaacgtgggccgggccaacggcctgaccattgattatgccaagaggcggctgtactggacagacctggacaccaacctgattgagagcagcaacatgctgggcctgaaccgggaggtgattgctgatgacctgccccaccccttcggcctgacccagtaccaggactacatctactggacagactggagcagaagaagcattgaaagagccaacaagaccagcggccagaacagaaccatcatccagggccacctggactatgtgatggacatcctggtgttccacagcagccggcagagcggctggaatgaatgtgccagcagcaatggccactgcagccacctgtgcctggccgtgcctgtgggcggctttgtgtgtggctgcccagcccactacagcctgaatgctgacaacagaacctgcagcgcccccaccaccttcctgctcttcagccagaagagcgccatcaacaggatggtgattgatgagcagcagagcccagacatcatcctgcccatccacagcctgagaaatgtgcgggccattgattatgaccccctggacaagcagctgtactggattgacagccggcagaacatgatcaggaaggcccaggaggatggcagccagggcttcaccgtggtggtgtcctctgtgcccagccagaacctggagatccagccctatgacctgagcattgacatctacagccgctacatctactggacctgtgaggccaccaacgtcatcaacgtgacccggctggatggccgctctgtgggcgtggtgctgaagggggagcaggaccggcccagggctgtggtggtgaaccctgagaagggctacatgtacttcaccaacctgcaggagaggagccccaagattgaaagagctgccctggatggaacagagcgggaggtgctcttcttcagcggcctgagcaagcccatcgccctggccctggacagccggctgggcaagctgttctgggccgacagcgacctgcggagaattgagagcagtgacctgagcggggccaaccgcatcgtgctggaggacagcaacatcctgcagcctgtgggcctgactgtgtttgagaactggctgtactggattgacaagcagcagcagatgattgagaagattgacatgacaggccgggagggccgcaccaaggtgcaggcccgcatcgcccagctgagtgacatccatgctgtgaaggagctgaacctgcaggagtaccggcagcacccctgtgcccaggacaatggaggctgcagccacatctgcctggtgaagggagatggcaccacccgctgcagctgccccatgcacctggtgctgctgcaggatgagctgagctgtggggagccccccacctgcagcccccagcagttcacctgcttcaccggggagattgactgcatccctgtggcctggaggtgtgatggcttcacagaatgtgaggaccacagtgatgagctgaactgccctgtgtgcagcgagagccagttccagtgtgccagcggccagtgcattgatggagccctgcgctgcaatggagatgccaactgccaggacaagagtgatgagaagaactgtgaggtgctgtgcctgattgaccagttccgctgtgccaacggccagtgcatcggcaagcacaagaagtgtgaccacaacgtggactgcagcgacaagagtgatgagctggactgctaccccacagaggagcccgccccccaggccaccaacacagtgggctctgtgattggagtcatcgtgaccatctttgtgtctggcaccgtgtacttcatctgccagaggatgctgtgccccaggatgaagggagatggagagaccatgaccaatgactatgtggtgcacggccctgcctctgtgcccctgggctacgtgccccaccccagcagcctgagcggcagcctgcccggcatgagccggggcaagtccatgatcagcagcctgagcatcatgggcggcagcagcggccccccctatgaccgggcccacgtgactggagccagcagcagcagcagcagcagcaccaagggcacctacttccctgccatcctgaaccccccacccagccctgccacagagaggagccactacaccatggagtttggctacagcagcaacagccccagcacccacaggagctacagctaccggccctacagctaccgccactttgccccacccaccaccccctgcagcacagatgtgtgtgacagcgactatgcccccagcaggaggatgacctctgtggccacagccaagggctacaccagtgacctgaactatgattctgagcctgtgcccccaccacccacccccaggagccagtacctgtctgcagaagaaaattatgagagctgcccccccagcccctacacagagaggagctacagccaccacctgtacccacctccacccagcccctgcacagacagcagctag

SEQ ID NO: 127568 - DNA, 10020 bp, Artificial Sequence
  derived and/or modified sequence
gcggccgccccggctcctcgcctcccccacttctggccacccctcgccggtgagagaagagaacgcgagaagggaagatgggggccgtcctgaggagcctcctggcctgcagcttctgtgtgctcctgagagcggcccctttgttgctttatgcaaacagacgggacttgcgattggttgatgctacaaatggcaaagagaatgctacgattgtagttggaggcttggaggatgcagctgcggtggactttgtgtttagtcatggcttgatatactggagtgatgtcagcgaagaagccattaaacgaacagaatttaacaaaactgagagtgtgcagaatgttgttgtttctggattattgtcccccgatgggctggcatgtgattggcttggagaaaaattgtactggacagattctgaaactaatcggattgaagtttctaatttagatggatctttacgaaaagttttattttggcaagagttggatcaacccagagctattgccttagatccttcaagtgggttcatgtactggacagactggggagaagtgccaaagatagaacgtgctggaatggatggttcaagtcgcttcattataataaacagtgaaatttactggccaaatggactgactttggattatgaagaacaaaagctttattgggcagatgcaaaacttaatttcatccacaaatcaaatctggatggaacaaatcggcaggcagtggttaaaggttcccttccacatccttttgccttgacgttatttgaggacatattgtactggactgactggagcacacactccattttggcttgcaacaagtatactggtgagggtctgcgtgaaatccattctgacatcttctctcccatggatatacatgccttcagccaacagaggcagccaaatgccacaaatccatgtggaattgacaatgggggttgttcccatttgtgtttgatgtctccagtcaagcctttttatcagtgtgcttgccccactggggtcaaactcctggagaatggaaaaacctgcaaagatggtgccacagaattattgcttttagctcgaaggacagacttgagacgcatttctttggatacaccagattttacagacattgttctgcagttagaagacatccgtcatgccattgccatagattacgatcctgtggaaggctacatctactggactgatgatgaagtgagggccatacgccgttcatttatagatggatctggcagtcagtttgtggtcactgctcaaattgcccatcctgatggtattgctgtggactgggttgcacgaaatctttattggacagacactggcactgatcgaatagaagtgacaaggctcaatgggaccatgaggaagatcttgatttcagaggacttagaggaaccccgggctattgtgttagatcccatggttgggtacatgtattggactgactggggagaaattccgaaaattgagcgagcagctctggatggttctgaccgtgtagtattggttaacacttctcttggttggccaaatggtttagccttggattatgatgaaggcaaaatatactggggagatgccaaaacagacaagattgaggttatgaatactgatggcactgggagacgagtactagtggaagacaaaattcctcacatatttggatttactttgttgggtgactatgtttactggactgactggcagaggcgtagcattgaaagagttcataaacgaagtgcagagagggaagtgatcatagatcagctgcctgacctcatgggcctaaaggctacaaatgttcatcgagtgattggttccaacccctgtgctgaggaaaacgggggatgtagccatctctgcctctatagacctcagggccttcgctgtgcttgccctattggctttgaactcatcagtgacatgaagacctgcattgtcccagaggctttccttttgttttcacggagagcagatatcagacgaatttctctggaaacaaacaataataatgtggctattccactcactggtgtcaaagaagcttctgctttggattttgatgtgacagacaaccgaatttattggactgatatatcactcaagaccatcagcagagcctttatgaatggcagtgcactggaacatgtggtagaattcggcttagattatccagaaggcatggcagtagactggcttgggaagaacttgtactgggcagacacaggaacgaatcgaattgaggtgtcaaagttggatgggcagcaccgacaagttttggtgtggaaagacctagatagtcccagagctctcgcgttggaccctgccgaaggatttatgtattggactgaatggggtggaaaacctaagatagacagagctgcaatggatggaagtgaacgtactaccttagttccaaatgtggggcgggcaaacggcctaactattgattatgctaaaaggaggctttattggacagacctggacaccaacttaatagaatcttcaaatatgcttgggctcaaccgtgaagttatagcagatgacttgcctcatccttttggcttaactcagtaccaagattatatctactggacggactggagccgacgcagcattgagcgtgccaacaaaaccagtggccaaaaccgcaccatcattcagggccatttggattatgtgatggacatcctcgtctttcactcatctcgacagtcagggtggaatgaatgtgcttccagcaatgggcactgctcccacctctgcttggctgtgccagttgggggttttgtttgtggatgccctgcccactactctcttaatgctgacaacaggacttgtagtgctcctacgactttcctgctcttcagtcaaaagagtgccatcaaccgcatggtgattgatgaacaacagagccccgacatcatccttcccatccacagccttcggaatgtccgggccattgactatgacccactggacaagcaactctattggattgactcacgacaaaacatgatccgaaaggcacaagaagatggcagccagggctttactgtggttgtgagctcagttccgagtcagaacctggaaatacaaccctatgacctcagcattgatatttacagccgctacatctactggacttgtgaggctaccaatgtcattaatgtgacaagattagatgggagatcagttggagtggtgctgaaaggcgagcaggacagacctcgagccgttgtggtaaacccagagaaagggtatatgtattttaccaatcttcaggaaaggtctcctaaaattgaacgggctgctttggatgggacagaacgggaggtcctctttttcagtggcttaagtaaaccaattgctttagcccttgatagcaggctgggcaagctcttttgggctgattcagatctccggcgaattgaaagcagtgatctctcaggtgctaaccggatagtattagaagactccaatatcttgcagcctgtgggacttactgtgtttgaaaactggctctattggattgataaacagcagcaaatgattgaaaaaattgacatgacaggtcgagagggtagaaccaaagtccaagctcgaattgcccagcttagtgacattcatgcagtaaaggagctgaaccttcaagaatacagacagcacccttgtgctcaggataatggtggctgttcacatatttgtcttgtaaagggggatggtactacaaggtgttcttgccccatgcacctggttctacttcaagatgagctatcatgtggagaacctccaacatgttctcctcagcagtttacttgtttcacgggggaaattgactgtatccctgtggcttggcggtgcgatgggtttactgaatgtgaagaccacagtgatgaactcaattgtcctgtatgctcagagtcccagttccagtgtgccagtgggcagtgtattgatggtgccctccgatgcaatggagatgcaaactgccaggacaaatcagatgagaagaactgtgaagtgctttgtttaattgatcagttccgctgtgccaatggtcagtgcattggaaagcacaagaagtgtgatcataatgtggattgcagtgacaagtcagatgaactggattgttatccgactgaagaaccagcaccacaggccaccaatacagttggttctgttattggcgtaattgtcaccatttttgtgtctggaactgtatactttatctgccagaggatgttgtgtccacgtatgaagggagatggggaaactatgactaatgactatgtagttcatggaccagcttctgtgcctcttggttatgtgccacacccaagttctttgtcaggatctcttccaggaatgtctcgaggtaaatcaatgatcagctccctcagtatcatggggggaagcagtggacccccctatgaccgagcccatgttacaggagcatcatcaagtagttcttcaagcaccaaaggcacttacttccctgcaattttgaaccctccaccatccccagccacagagcgatcacattacactatggaatttggatattcttcaaacagtccttccactcataggtcatacagctacaggccatatagctaccggcactttgcaccccccaccacaccctgcagcacagatgtttgtgacagtgactatgctcctagtcggagaatgacctcagtggcaacagccaagggctataccagtgacttgaactatgattcagaacctgtgcccccacctcccacaccccgaagccaatacttgtcagcagaggagaactatgaaagctgcccaccttctccatacacagagaggagctattctcatcacctctacccaccgccaccctctccctgtacagactcctcctgaggaggggccctcctcctctgactgcctccaacgtaaaaatgtaaatataaatttggttgagatctggagggggggagggagctattagagaaggatgaggcagaccatgtacagttaaaattataaaatggggtagggaatactggagatatttgtacagaagaaaaggatatttatatattttcttaaaacagcagatttgctgcttgtgccataaaagtttgtataaaaaaaatttgtactaaaagttttatttttgcaaactaaatacacaaagcatgccttaaacccagtgaagcaactgagtacaaaggaaacaggaataataaaggcatcactgaccaggaatatctgggctttattgataccaaaaataaaaaagaggaagaagaaaaattaagtccatctcagagcagcaaaccatagatacatggatgtagccagatagccttcagttaactaacatttgagggccaacaagtaagaaatgatgaaaggaaaaaaatgcaattaatactaaccttggacgaagggctttgttttctctaggaatccaacagtgctagtgaggaaagtagatatttctaaaaacccattctgggtgttgctgttgtaggagagatcagccctctggtaagatgccatgaagctgtgtgtgtgtgcaagtctctgtccctacctttagaatccatacctctgtcaaaatgaatttttttctctaggtatgtttaccttgctgcctcctccagcaacttggtaagtcattttgctaagataccatgatttttttaagctgaagcattgactaaatggaattttctaaattaaacttgattttaatatttcttctagctccattccccagtaggcttagctcttcaatttgactgctgtttttgcataatgatcaaaagttagacatattatttctcttcttccaagattgttttaatgctcattaaaatgtctttttacaacacatatagacaatgtttaagaattaaaaatttaaccattatgtttttgttgtaaatctcatatccttgcactactttcagcatatatcacagtacgaaatcatttatatatatatatatatatatatatatatatatatatatatatatatatatattttgtttgtttgtttgttttctgagtaaaacatttaaatatgttctggttagagacaatctatttaaaaagatttttttcttattaggattttccctatattaacagtttgtgatgttttcatgttctttagaccggtttttctcagaataatgtctacatacatacctcttctaatgtgtgacatgaatttaatatctttctgttacccactgtgaatgttaggctgttttcaaattatccacaaattattcttgtaatcacccaatatttttatgtgggtcctctcttacccattatggattaagatagtttaacaaatttaacaatgaggattaaatgagaaggcaaactgttaacttctcagctgtcagaatttgggtggaagggaataatggaagcctcttttgtgatctgcctgacctgctgtcatgtatggtactggggctgctacatcttgagctatcagggctgacctgtggaatgattctagcacttgctctgccaccttgccagaagttcgtttcctgctttttacacatgtgtagcacttctctgctaaaattgaatggttttaaactaatgtatttttagcttaagaggtgttggtcagttaattattgaattttttttttttcttttttaattctgtcttgccaaggcctctctgggtttcagggcccaagagaaaacagtggaagaaaggattcagaatttgggcaagggtgaagtaactgttcatgcaagttaaaaatacctaagtaaagtttttgaagataaaattgtggtttcagaataatgctgattgttggagactgtaagaatcaggtgcacttgattttgcatataagcaaatggtaaatctatcagaatcctaaaacagacaagcatgaactcttcccattgctggaactaagtgcccacagtgtcagacaaaatggacattgaacttggattctgtgatacacagggcacttgatgcttaaatgaagatggaaaggttagcaatacctgggtgtcagttagaatttgagaattctatatgtttacatatttaaatgtgcatcttgatctggtgggcttcccatgtggagacttgcactctaattaactaagaagaatattgccttgttggatctcagtccacgtgcttgcactgcgatggcaatggcctcttcttcaaaatactaatttgtgtgccaatttgtttaaaattatttgaaggcagttcagcctaatctcagtgttctctttctggggtagatgagatggattcttaatatttctgggagtactttttaatgagagaattgtcaaatttggaaagatttattgagccttaggttacatggacagttaagcttaagtaaactgtatattgattatcaaacacaagctgtaattggaaaagttgagaggaaaagcatgagatcacaaattagggggaaaaaagaaaagggatttttaaatttggtgtattaaattcattgtccaagggggaaaatgaataatgtttcattagattccttatatgcaaaagtatttattttgaacatgtgtcctaaaatatatgcactaactgatgtgattaaaattgtccaagaaataaacttgagcataacatactttgtgtgcaccacagtaagctattctgcattgaagtggtcttttataactaaggcctggactttgctccaacagagtcgtggtcttctgaatagtgacttaaggagttttgtttgcttaagtcagataatagcacattcacagggaaacaaagagagttggtggatagaattttctgactattaatttttcttccatgaaattttattatgcctttggcactttctgccactcttacagcatatcacaagatatctgtttagcagaagattatgtagttactttaattttaatataaaagtagcttgtgatacattaccaagagatctctgattctttagtaagtttgagaacacctattctacagagatgataggtacttagaaatgaagactttaaagtacattttaatctaatataggccagtaattgggggaaggggctttgagcagtacaattttaagatgattttgagggttgtatttctttatcatttaaaaatatcctaaagtcagtaatttatatgaaggaaactcattcattattgaaggtattaaaaatagccatcatctgtattaggtagcagttttggaggatcatctttttcttttgctataaagccctattaatgaagaatacttccagtagagttaatagctgtagcttacctagtgtgttaatgaagtgtgtttatttatgtgacttgataccagtagtcataatagagactgaagaggtatgcgttaagcacgcctacttctatgcagtaaacaggctgcagctgcctagattagattcttagaaatgtcatattttgaattgttttatttcttgtaggggaagctttgtcccacttcattcatttgcatgccataggaattacatattggttatcattacgtatctaacaagattcagaaacaaaaatcttggacttttcacatccgaaatatgtcagctcttaataaatgtgtggtgcttaagtctacatatggcatccatagttgatttagagtatggatatgagtgtgttgaccagttatcagtaggtggacaaatatttgggcatctacagatgagactatgcactaagtgtggactgagtcctaaagaagcttatagtcaggtgttgtttaaaacattatcagaattcttaaacccaaggaatttaattttatttggtatttcttaagcctaaaatgaaccaagagaaagatgattttagaaagtacttgtagtgaaagatgattttagaaagtacttgtagtgcatgtgtggcttctgacttttgggatggcaccattttataatagtttcaaaatttagcttttgaaattctcaacattttatggtagaagactttggacctcaagtataaaattatacgtttataatttttttaaaatttaaattataagtattgtgaattcacactctcaggctattgtctgacttgatctacgtctcataaagcctgtacctgagtggagtggaaggtggagtcttaggttaatcagttactgactctaccctcaccctctttcaattgaggtaaactttgctgtttttctttttcataaagcattctcaaattgttgagtttattgctgaaaaaaatctccatgactttacagatagaattacaaactaaatgatgtcttgtatttagaagcagagtacagacctaacgaactgttagattctccaccatcacttagggtttgcccagaagcaacaccagagaattacagacaacgcgcttttgctgaactgtccattttggtggttgtgtttttcagtcaaatataagcaggatgggcgatagagatatatttatatatagatacatattctatatatctaatgcctaaatatgggtattaaagggaaaatttttaaagtctgattaaatccaatatgacatgaaattaaatatatggattagtaaggaaaaatgttaaaaagtagagaggataccaagaagattaaactggactagccttatttgcaagtgaaggatctggtgctgctttcagatgtttatcttttatttttttcccttaagctttaatcttcgtcattgtcttaaagtcaactggtgtttcttgttcattgactttggtacgatggtgctttgcaaggatgtatttatgttataatggccaacatttggtcagcccttgtccacttattcacttccctccttttgtaaaataagtgctttaattataaactgtataaaaataccttgtataaaccccttttttgattattacaataaataagctgaattgtaacaaatgaaatttgatttttgtaataaaacagtggaaaagtaaaa

SEQ ID NO: 127569 - DNA, 7812 bp, Artificial Sequence
  derived and/or modified sequence
agttggatcaacccagagctattgccttagatccttcaagtgggttcatgtactggacagactggggagaagtgccaaagatagaacgtgctggaatggatggttcaagtcgcttcattataataaacagtgaaatttactggccaaatggactgactttggattatgaagaacaaaagctttattgggcagatgcaaaacttaatttcatccacaaatcaaatctggatggaacaaatcggcaggcagtggttaaaggttcccttccacatccttttgccttgacgttatttgaggacatattgtactggactgactggagcacacactccattttggcttgcaacaagtatactggtgagggtctgcgtgaaatccattctgacatcttctctcccatggatatacatgccttcagccaacagaggcagccaaatgccacaaatccatgtggaattgacaatgggggttgttcccatttgtgtttgatgtctccagtcaagcctttttatcagtgtgcttgccccactggggtcaaactcctggagaatggaaaaacctgcaaagatggtgccacagaattattgcttttagctcgaaggacagacttgagacgcatttctttggatacaccagattttacagacattgttctgcagttagaagacatccgtcatgccattgccatagattacgatcctgtggaaggctacatctactggactgatgatgaagtgagggccatacgccgttcatttatagatggatctggcagtcagtttgtggtcactgctcaaattgcccatcctgatggtattgctgtggactgggttgcacgaaatctttattggacagacactggcactgatcgaatagaagtgacaaggctcaatgggaccatgaggaagatcttgatttcagaggacttagaggaaccccgggctattgtgttagatcccatggttgggtacatgtattggactgactggggagaaattccgaaaattgagcgagcagctctggatggttctgaccgtgtagtattggttaacacttctcttggttggccaaatggtttagccttggattatgatgaaggcaaaatatactggggagatgccaaaacagacaagattgaggttatgaatactgatggcactgggagacgagtactagtggaagacaaaattcctcacatatttggatttactttgttgggtgactatgtttactggactgactggcagaggcgtagcattgaaagagttcataaacgaagtgcagagagggaagtgatcatagatcagctgcctgacctcatgggcctaaaggctacaaatgttcatcgagtgattggttccaacccctgtgctgaggaaaacgggggatgtagccatctctgcctctatagacctcagggccttcgctgtgcttgccctattggctttgaactcatcagtgacatgaagacctgcattgtcccagaggctttccttttgttttcacggagagcagatatcagacgaatttctctggaaacaaacaataataatgtggctattccactcactggtgtcaaagaagcttctgctttggattttgatgtgacagacaaccgaatttattggactgatatatcactcaagaccatcagcagagcctttatgaatggcagtgcactggaacatgtggtagaattcggcttagattatccagaaggcatggcagtagactggcttgggaagaacttgtactgggcagacacaggaacgaatcgaattgaggtgtcaaagttggatgggcagcaccgacaagttttggtgtggaaagacctagatagtcccagagctctcgcgttggaccctgccgaaggatttatgtattggactgaatggggtggaaaacctaagatagacagagctgcaatggatggaagtgaacgtactaccttagttccaaatgtggggcgggcaaacggcctaactattgattatgctaaaaggaggctttattggacagacctggacaccaacttaatagaatcttcaaatatgcttgggctcaaccgtgaagttatagcagatgacttgcctcatccttttggcttaactcagtaccaagattatatctactggacggactggagccgacgcagcattgagcgtgccaacaaaaccagtggccaaaaccgcaccatcattcagggccatttggattatgtgatggacatcctcgtctttcactcatctcgacagtcagggtggaatgaatgtgcttccagcaatgggcactgctcccacctctgcttggctgtgccagttgggggttttgtttgtggatgccctgcccactactctcttaatgctgacaacaggacttgtagtgctcctacgactttcctgctcttcagtcaaaagagtgccatcaaccgcatggtgattgatgaacaacagagccccgacatcatccttcccatccacagccttcggaatgtccgggccattgactatgacccactggacaagcaactctattggattgactcacgacaaaacatgatccgaaaggcacaagaagatggcagccagggctttactgtggttgtgagctcagttccgagtcagaacctggaaatacaaccctatgacctcagcattgatatttacagccgctacatctactggacttgtgaggctaccaatgtcattaatgtgacaagattagatgggagatcagttggagtggtgctgaaaggcgagcaggacagacctcgagccgttgtggtaaacccagagaaagggtatatgtattttaccaatcttcaggaaaggtctcctaaaattgaacgggctgctttggatgggacagaacgggaggtcctctttttcagtggcttaagtaaaccaattgctttagcccttgatagcaggctgggcaagctcttttgggctgattcagatctccggcgaattgaaagcagtgatctctcaggtgctaaccggatagtattagaagactccaatatcttgcagcctgtgggacttactgtgtttgaaaactggctctattggattgataaacagcagcaaatgattgaaaaaattgacatgacaggtcgagagggtagaaccaaagtccaagctcgaattgcccagcttagtgacattcatgcagtaaaggagctgaaccttcaagaatacagacagcacccttgtgctcaggataatggtggctgttcacatatttgtcttgtaaagggggatggtactacaaggtgttcttgccccatgcacctggttctacttcaagatgagctatcatgtggagaacctccaacatgttctcctcagcagtttacttgtttcacgggggaaattgactgtatccctgtggcttggcggtgcgatgggtttactgaatgtgaagaccacagtgatgaactcaattgtcctgtatgctcagagtcccagttccagtgtgccagtgggcagtgtattgatggtgccctccgatgcaatggagatgcaaactgccaggacaaatcagatgagaagaactgtgaagtgctttgtttaattgatcagttccgctgtgccaatggtcagtgcattggaaagcacaagaagtgtgatcataatgtggattgcagtgacaagtcagatgaactggattgttatccgactgaagaaccagcaccacaggccaccaatacagttggttctgttattggcgtaattgtcaccatttttgtgtctggaactgtatactttatctgccagaggatgttgtgtccacgtatgaagggagatggggaaactatgactaatgactatgtagttcatggaccagcttctgtgcctcttggttatgtgccacacccaagttctttgtcaggatctcttccaggaatgtctcgaggtaaatcaatgatcagctccctcagtatcatggggggaagcagtggacccccctatgaccgagcccatgttacaggagcatcatcaagtagttcttcaagcaccaaaggcacttacttccctgcaattttgaaccctccaccatccccagccacagagcgatcacattacactatggaatttggatattcttcaaacagtccttccactcataggtcatacagctacaggccatatagctaccggcactttgcaccccccaccacaccctgcagcacagatgtttgtgacagtgactatgctcctagtcggagaatgacctcagtggcaacagccaagggctataccagtgacttgaactatgattcagaacctgtgcccccacctcccacaccccgaagccaatacttgtcagcagaggagaactatgaaagctgcccaccttctccatacacagagaggagctattctcatcacctctacccaccgccaccctctccctgtacagactcctcctgaggaggggccctcctcctctgactgcctccaacgtaaaaatgtatgtttaccttgctgcctcctccagcaacttggcctctctgggtttcagggcccaagagaaaacagtggaagaaaggattcagaatttgggcaagggtgaagtaactgttcatgcaagttaaaaatacctaagtaaagtttttgaagataaaattgtggtttcagaataatgctgattgttggagactgtaagaatcaggtgcacttgattttgcatataagcaaatggtaaatctatcagaatcctaaaacagacaagcatgaactcttcccattgctggaactaagtgcccacagtgtcagacaaaatggacattgaacttggattctgtgatacacagggcacttgatgcttaaatgaagatggaaaggttagcaatacctgggtgtcagttagaatttgagaattctatatgtttacatatttaaatgtgcatcttgatctggtgggcttcccatgtggagacttgcactctaattaactaagaagaatattgccttgttggatctcagtccacgtgcttgcactgcgatggcaatggcctcttcttcaaaatactaatttgtgtgccaatttgtttaaaattatttgaaggcagttcagcctaatctcagtgttctctttctggggtagatgagatggattcttaatatttctgggagtactttttaatgagagaattgtcaaatttggaaagatttattgagccttaggttacatggacagttaagcttaagtaaactgtatattgattatcaaacacaagctgtaattggaaaagttgagaggaaaagcatgagatcacaaattagggggaaaaaagaaaagggatttttaaatttggtgtattaaattcattgtccaagggggaaaatgaataatgtttcattagattccttatatgcaaaagtatttattttgaacatgtgtcctaaaatatatgcactaactgatgtgattaaaattgtccaagaaataaacttgagcataacatactttgtgtgcaccacagtaagctattctgcattgaagtggtcttttataactaaggcctggactttgctccaacagagtcgtggtcttctgaatagtgacttaaggagttttgtttgcttaagtcagataatagcacattcacagggaaacaaagagagttggtggatagaattttctgactattaatttttcttccatgaaattttattatgcctttggcactttctgccactcttacagcatatcacaagatatctgtttagcagaagattatgtagttactttaattttaatataaaagtagcttgtgatacattaccaagagatctctgattctttagtaagtttgagaacacctattctacagagatgataggtacttagaaatgaagactttaaagtacattttaatctaatataggccagtaattgggggaaggggctttgagcagtacaattttaagatgattttgagggttgtatttctttatcatttaaaaatatcctaaagtcagtaatttatatgaaggaaactcattcattattgaaggtattaaaaatagccatcatctgtattaggtagcagttttggaggatcatctttttcttttgctataaagccctattaatgaagaatacttccagtagagttaatagctgtagcttacctagtgtgttaatgaagtgtgtttatttatgtgacttgataccagtagtcataatagagactgaagaggtatgcgttaagcacgcctacttctatgcagtaaacaggctgcagctgcctagattagattcttagaaatgtcatattttgaattgttttatttcttgtaggggaagctttgtcccacttcattcatttgcatgccataggaattacatattggttatcattacgtatctaacaagattcagaaacaaaaatcttggacttttcacatccgaaatatgtcagctcttaataaatgtgtggtgcttaagtctacatatggcatccatagttgatttagagtatggatatgagtgtgttgaccagttatcagtaggtggacaaatatttgggcatctacagatgagactatgcactaagtgtggactgagtcctaaagaagcttatagtcaggtgttgtttaaaacattatcagaattcttaaacccaaggaatttaattttatttggtatttcttaagcctaaaatgaaccaagagaaagatgattttagaaagtacttgtagtgaaagatgattttagaaagtacttgtagtgcatgtgtggcttctgacttttgggatggcaccattttataatagtttcaaaatttagcttttgaaattctcaacattttatggtagaagactttggacctcaagtataaaattatacgtttataatttttttaaaatttaaattataagtattgtgaattcacactctcaggctattgtctgacttgatctacgtctcataaagcctgtacctgagtggagtggaaggtggagtcttaggttaatcagttactgactctaccctcaccctctttcaattgaggtaaactttgctgtttttctttttcataaagcattctcaaattgttgagtttattgctgaaaaaaatctccatgactttacagatagaattacaaactaaatgatgtcttgtatttagaagcagagtacagacctaacgaactgttagattctccaccatcacttagggtttgcccagaagcaacaccagagaattacagacaacgcgcttttgctgaactgtccattttggtggttgtgtttttcagtcaaatataagcaggatgggcgatagagatatatttatatatagatacatattctatatatctaatgcctaaatatgggtattaaagggaaaatttttaaagtctgattaaatccaatatgacatgaaattaaatatatggattagtaaggaaaaatgttaaaaagtagagaggataccaagaagattaaactggactagccttatttgcaagtgaaggatctggtgctgctttcagatgtttatcttttatttttttcccttaagctttaatcttcgtcattgtcttaaagtcaactggtgtttcttgttcattgactttggtacgatggtgctttgcaaggatgtatttatgttataatggccaacatttggtcagcccttgtccacttattcacttccctccttttgtaaaataagtgctttaattataaactgtataaaaataccttgtataaaccccttttttgattattacaataaataagctgaattgtaacaaatgaaatttgatttttgtaataaaacagtggaaaagt

SEQ ID NO: 127570 - DNA, 4842 bp, Artificial Sequence
  derived and/or modified sequence
atgggcgccgtgctgcggagcctgctggcctgcagcttctgcgtgctcctgagagctgcacccctcctcctttacgccaatcgccgagacttgaggctcgttgatgcaaccaatgggaaggaaaacgcaaccattgtagtcggcggactcgaggatgcggctgctgtggatttcgtattctctcatggacttatttattggtcggacgtgagcgaggaggcaattaaaaggactgagttcaataaaacagagagtgtgcaaaatgtggttgtcagcggattgctttcaccggatggcctggcctgcgactggctgggggaaaagttatattggaccgattctgagaccaacagaatcgaggtcagtaatttagacggaagcctacgcaaggtgctgttctggcaggagcttgaccagcctagagcaatcgctctcgatccgtctagcggctttatgtactggaccgactggggggaagtgccaaagattgaacgggcgggtatggatgggtcatctaggttcattataataaactctgagatctactggcctaacggattgacattggattacgaggagcagaagctatactgggcggacgctaagttaaacttcatccataagtcaaacctggacggcacaaatagacaggccgtcgtcaagggcagcctgccccacccattcgccctcaccctctttgaagacattctgtattggacagattggtctacccattcaatcctggcttgtaataagtacacaggcgagggcctccgggaaatccactccgacattttctcgcccatggacatccacgcattttcccagcagcgtcagccaaatgccaccaatccttgcgggatcgacaatggcggttgtagccacctctgcctgatgtcccctgtcaaacctttttaccagtgcgcatgcccaaccggagtgaaactccttgagaatgggaaaacctgcaaggatggggccacggagctgttgctgctcgctcgccgcacagacttgcgacgtatttctcttgatacacctgactttacagacattgtgttgcaactggaggacataaggcacgcgatcgcaattgactacgaccccgttgagggctacatctattggactgatgacgaagttagggccatccggcggagctttatagacggcagcggatcacagttcgtggtcacagcccagatagcccaccccgatggtattgcagtggattgggttgcccggaatctgtactggaccgataccgggactgacaggattgaagtgacaaggttgaacggaactatgcggaagattttaatctctgaggatctggaggagccacgggctattgtgttagatccaatggtgggctacatgtattggacggactggggggaaattcctaaaattgaaagagctgcgttagatggctctgacagagtggtcttggtcaatacatcccttggatggccgaatggactggccctggattacgacgagggcaagatctattggggcgacgccaaaacagacaaaattgaagttatgaacaccgacgggaccggcagacgagtgctggtggaggacaaaatacctcacatttttggcttcactttactgggcgattacgtgtactggactgattggcagagacggtccatcgagcgcgtgcacaagcggtctgccgagcgggaagtcattatcgatcagctgccagatcttatgggattgaaagcaaccaacgtgcatcgggttatcggctccaatccctgtgccgaagagaatggaggctgtagccacctgtgcctgtacagaccacaggggctgagatgtgcgtgccccatcggtttcgaactgatttccgatatgaagacctgtattgtgccggaagctttcctcttattcagccgcagggccgacatcagacgtattagcctcgagacaaacaataacaacgtcgctattccgctcacaggagtgaaggaagccagcgccctcgatttcgacgttacagacaacaggatatactggaccgatattagcctcaagacaatctctcgtgcctttatgaacggcagtgcccttgagcacgtcgtggaatttggtctcgactaccctgagggcatggcagtcgactggctgggcaagaacctgtactgggcagatacgggcactaatcgcattgaagtctcaaaactcgacgggcagcatcgccaagtgctcgtgtggaaggacctcgactcaccccgtgccctggccctggatccagctgaaggcttcatgtactggaccgagtggggtgggaagcccaagattgatcgagcagctatggacggctccgaaagaacaactttggtccccaacgttggacgagcaaacggcttgacgatcgactacgcgaagcgaagactctactggaccgatctggatacgaaccttattgaaagctcaaatatgctgggtcttaatagggaagttatagccgacgacctccctcacccattcgggctgacacagtaccaggattatatctattggaccgattggagcagacgctctatagagagagcgaacaagacatcaggacagaaccgtaccatcatccagggacatctggactacgtgatggatattctggtttttcattctagtaggcagtccgggtggaacgagtgcgcctctagcaacggccactgttcccacctgtgtctcgctgttccagttggagggttcgtgtgtggctgtccagcacattattcacttaatgctgacaatagaacctgctctgcgcccactactttcctgctgttttcacagaaatctgctataaataggatggtgatcgatgagcagcagagcccagacataattctgcctatccactctttacgaaatgtgcgagctatagactatgacccgcttgacaaacagctatactggatagatagcaggcagaatatgatcaggaaggcccaggaggatggttcacaggggttcactgtggtggtttccagcgttccatcacagaacctcgagattcaaccgtacgacctctccatcgacatctactcccgctacatatactggacttgcgaggcgaccaacgttatcaatgtgacccgactggatggacgcagcgtgggggtggtgctaaaaggtgaacaggatcgacctagggcggtggtggtgaaccccgagaagggttatatgtattttaccaatttgcaggagagaagccctaaaatcgagagagccgccctcgacggcactgaacgtgaggtcctgttcttctcaggactgagtaagcccatcgccctggcactggactcacgccttggcaagcttttttgggccgattcagatctcagacggattgaaagtagtgatctttcaggagctaaccgtattgtgctggaggactctaacatcctacagccagtcggtcttaccgttttcgagaactggctctactggatcgataaacagcagcagatgatcgaaaagatagatatgacaggtcgagagggcagaaccaaagtgcaggcacggatagcccagttgagtgatattcatgcagttaaggaattgaacctgcaggaatatcggcagcatccatgcgctcaagacaacggcgggtgtagtcatatctgtctggtaaaaggtgatggaaccacccgctgtagctgtcctatgcacttggtgcttctgcaggacgagctaagttgtggggagccccccacgtgcagcccacaacagttcacctgcttcaccggagaaatcgactgcattcctgtagcgtggcgttgcgacggctttaccgaatgcgaggaccactccgatgaactgaattgtcctgtgtgtagcgagtcccagttccagtgcgcctccggccagtgtatagacggcgccctgcgatgtaatggcgacgccaattgccaggataagtccgatgagaaaaactgtgaggtcctctgtctgattgatcagttcagatgtgccaatggacagtgcatcgggaagcacaagaaatgtgaccataatgtggactgcagcgacaagtccgacgagctcgattgttaccctacagaagaaccagcaccccaggcgacaaatactgtggggagcgtgatcggagtgatcgtgactatattcgttagtggaacagtttactttatctgccagcgcatgttgtgtcctaggatgaaaggggacggggaaaccatgacgaacgattacgtcgtccacgggcctgccagcgtgcctttgggatacgtaccccacccctcctccctgtcaggaagcttacccgggatgtcccggggcaagagcatgatcagcagcctgagcatcatgggaggttctagcggccctccttatgaccgggcacatgtgactggcgcttcatccagttcatcctccagtacaaagggcacttattttccagctatactcaatccccctccgtcccccgctactgagagaagtcactatacaatggagttcggatacagctccaacagcccgagcacccatagatcctattcctaccggccatactcttaccgacatttcgctcccccaactacgccatgctctaccgacgtctgtgactccgactacgccccttctcgtaggatgacatccgtggcaactgctaagggatacacttccgacctgaactacgactctgaaccggtgcctccccccccaacgccgcgctcacagtacctcagcgcggaagagaactatgaatcctgccccccgagcccatatacagagaggagttattcacaccatttgtacccgcccccaccatcaccctgtactgattctagctag

SEQ ID NO: 127571 - DNA, 4437 bp, Artificial Sequence
  derived and/or modified sequence
tgactggaccagccccgggccatcgccctggaccccagcagcggctttatgtactggactgattggggagaggtgcccaagatagagagggctgggatggacggatcttcacggttcatcatcatcaattctgagatatattggcctaacggcctaacgctagactatgaggagcagaaattatactgggctgacgcgaaacttaattttatccacaagtcaaacctcgacggcaccaacagacaggccgtagtcaagggaagcctgccccatcctttcgcgcttactctgtttgaagacatactttactggactgactggagcacccactcaatccttgcttgcaataaatatactggcgaaggccttagggagatacactcagatattttctcaccaatggatatacacgccttttcccagcagaggcaacctaacgctaccaacccatgcgggattgacaacggggggtgctcccatctatgtttgatgagccccgtgaagcccttttaccagtgcgcctgtcccacaggagtcaagctgttagagaatgggaaaacttgcaaggatggagcaaccgaactccttctgctggctcggagaacagatcttcgaaggatttccctcgataccccagatttcacagacatcgtgctccagttggaagacattcgacatgccatcgcgatagactatgacccagtagaaggctacatctactggaccgatgatgaagtgcgggccattcggagatccttcatcgacgggtcgggctcccagtttgttgtgactgcccaaattgctcatcctgacggtattgcagtagattgggtggctagaaatctttactggacagacaccggtaccgaccgcatcgaggttacaaggttgaacggcaccatgcgaaaaatccttatcagcgaggaccttgaggagcctcgcgcaattgtgttggatccaatggttgggtacatgtattggacagattggggtgaaattccaaaaattgagcgtgctgccctggatggttccgatcgggtggtactcgtcaacaccagcctgggctggccgaacggcctggccctggactacgatgaaggtaagatttactggggcgatgctaagactgacaagattgaagtaatgaacacagacggcaccggccgaagggtgctggtggaagacaagatcccgcacatctttggtttcaccctgctgggcgattatgtttactggaccgattggcagcgccggagcattgagcgcgtgcacaaacgctccgctgaaagagaggtcatcatcgaccagctgcctgatctcatgggtctcaaagccactaacgtgcatcgcgtgatcggctcgaacccctgcgccgaggagaacggtgggtgctcacacctgtgtctgtatcggccccagggtctgagatgtgcatgtcccattgggttcgagctgattagcgacatgaaaacctgcatcgtccctgaggcatttctcctatttagccgccgcgcagatatacggcgtattagccttgagactaataataacaacgtggcgatacctctgacgggggtaaaagaggctagcgccctggactttgatgtgaccgataatcgaatttactggacagatataagcttgaagacaatctcccgcgcctttatgaatggaagcgctttggagcacgtggtggagttcggactcgactacccagaaggaatggccgtcgactggctcggcaaaaacctgtattgggccgatacgggaactaaccgtatcgaggtttcaaaacttgatggccaacacagacaggtgctggtttggaaggatctggattcccctcgcgctttggccttggaccctgcagagggcttcatgtactggacagaatggggtggcaagccaaaaatagaccgagcagctatggacgggtctgaacgaaccacacttgtaccgaacgtcggaagagcgaatggcctgactattgactacgccaaaagacggctgtattggacagatctggacaccaacctgatcgagtcgtccaatatgctgggtctgaaccgggaagtgattgccgatgacctacctcatccatttggcctgacacagtaccaggactacatctactggacggactggagcaggcggtctattgagagagctaataaaaccagcggtcaaaacaggaccatcattcaggggcacctcgactacgtgatggacatcctggtctttcactccagcagacaaagcgggtggaacgaatgcgcctcttcaaacgggcattgttctcacctttgccttgccgttcctgtcggaggctttgtgtgcgggtgcccggcccactattctcttaacgccgataaccgcacatgttcagcacccactaccttcctgttgttcagccaaaagagtgccatcaaccggatggtaatcgatgaacagcaaagtccagacatcatactgcccatccactctctgcggaacgtcagagctatcgattatgacccactggacaaacaattgtactggatcgatagtagacagaatatgatacggaaggcccaggaagacgggtcccaaggcttcaccgtcgtggtgtcctctgtgccctcccaaaacttggaaatccagccctacgatctgagcatcgacatatactctcgctatatctactggacttgtgaagcaaccaatgtcattaacgtgacaagactcgacggtaggagcgtgggggtggttctgaaaggcgagcaggataggccacgggctgtggtagtgaatccagaaaaaggttacatgtactttacaaatctgcaggaacgtagcccgaagatagaaagagcagcactggatggcaccgaacgggaagtattgttcttctctgggttaagtaaacccatcgctttggcactggatagccgtctgggaaagttattctgggctgattctgaccttaggaggatagaatcctcagatctgtcaggggcaaacaggattgtcctggaggattctaacattttgcagcccgtggggctgactgtatttgagaattggctttactggatcgataaacagcaacagatgatcgaaaagattgacatgactggccgcgagggcaggaccaaagtgcaagcacggatcgcacagttgtcagacatccacgccgtgaaggaattaaaccttcaagagtaccgacaacacccatgcgcccaagacaacggaggttgcagccatatctgtctcgtgaagggagacgggacaaccaggtgcagttgccccatgcacctcgtcctgctgcaggacgagctctcatgtggtgagcctcccacttgcagtccacagcagttcacgtgctttaccggcgagatcgattgcattccagttgcctggcggtgtgacggttttaccgagtgtgaagatcattcggatgagcttaattgtcccgtctgctccgagagccagtttcagtgcgcaagcggacagtgcatagatggggcgttgcgttgcaacggagacgcaaactgccaggacaaatctgatgagaagaattgcgaggtgttatgcctgatagaccagtttcgttgtgccaacggccagtgcatcggcaagcataaaaaatgtgatcacaatgttgattgtagcgataaaagtgacgagctggattgctacccaaccgaagagcctgccccacaagcaaccaacactgttggttctgtaattggcgtgatagttaccatcttcgtctcggggaccgtttacttcatatgtcagcgcatgctgtgccctaggatgaagggagatggcgagaccatgaccaacgactacgtggtgcacgggcctgcctccgtccccctcggatacgtgccacatccctcaagcctgtcaggaagcctcccaggaatgagcaggggaaagtcaatgatctctagcctctctataatgggcgggtcctcaggaccaccctatgaccgggcccatgtgaccggggcaagtagttcaagttcttccagcaccaaaggaacatatttccctgccatcctcaaccccccaccaagccccgccacggaacggagccactacaccatggaatttgggtacagctcaaactccccgtccactcataggtcatatagttataggccttattcatacaggcattttgcccctccgaccaccccctgctctacagacgtatgtgatagcgactatgctccctctagaaggatgacgagtgtcgccactgcaaaagggtatacctctgatttaaactacgatagcgagcccgttcctcccccccctactccacggtcccagtacctgagcgctgaagagaactatgagagttgccctccatcaccgtacactgaaaggtcatactctcaccatctttatcccccgcctcccagtccatgtaccgatagcagctag

SEQ ID NO: 127572 - DNA, 4841 bp, Artificial Sequence
  derived and/or modified sequence
atgggagcggtgctgcggtcactgcttgcctgttcgttctgtgtgctcctgcgtgccgctcccctgctgttatacgcgaatcggcgagacttgcgtctcgtagatgccaccaacggaaaggaaaatgccacaatcgttgtgggtggcctggaagacgccgcagccgtggactttgtcttctcccacggcctcatctattggagtgatgtgtcagaggaggccattaagcgtacagagtttaataagaccgaatctgttcagaatgtggtggtgtccggactgttgagccctgatggattggcatgtgactggttaggcgaaaagctttattggaccgattcagagacgaatcggatagaagtgtccaacctggatggctccttgcggaaagtccttttctggcaggagctcgatcaaccacgagcaatcgctttagatcctagcagtggtttcatgtattggactgactggggcgaagtgccaaagatcgagagggctggtatggacggatctagtcggtttattatcatcaattcagagatctattggccaaatggacttacccttgattacgaagaacagaaactgtattgggccgatgcaaaactcaatttcattcacaagagtaacctggatggaactaaccgtcaggccgtcgttaaggggtcacttcctcacccatttgcgttaaccctgtttgaagacatactttattggaccgactggtccacccactctattctagcatgtaacaagtacaccggcgaaggcctgagagaaatccacagcgatatcttctcaccaatggatattcatgccttctctcagcagcgtcagccaaatgcaacaaacccttgcggaatcgacaatgggggttgttcccacctatgcctgatgtctccagtgaaacccttctaccagtgtgcttgcccaacgggagttaaactgttagagaacggaaagacatgtaaggacggcgcaaccgagctgctcctgctcgccaggagaactgacctgcgccgaatctccctggacactcctgactttaccgatatcgtgctgcagttagaagacatccgccacgcgattgctattgattacgacccggtggagggatacatttattggaccgacgatgaggtgagagcaattcggaggagcttcatagacggatcgggctctcaattcgtggtaaccgcccagattgcccatcccgacgggatcgcggttgactgggtggccaggaacctgtattggaccgataccggcactgataggatcgaagttacaagattgaatggcactatgagaaagatcctgatcagtgaggacttagaggagcctcgggctatcgtacttgatccgatggtggggtacatgtattggactgattggggggagatccctaagatcgaaagggcggctctcgacggttctgatagggtcgttctggtgaatacctccctggggtggcccaatgggctcgcgctcgactacgacgaaggaaaaatctactggggcgacgcaaaaaccgataaaatcgaggtcatgaataccgacggaactgggaggcgggttttggtcgaggacaaaatacctcatatattcgggtttaccctgctgggagactacgtgtactggaccgactggcagaggcggtccattgagcgagtgcataaaagatcagcggaacgcgaggtcataatagaccaactaccggatctcatgggcttgaaagctactaacgtccatcgcgtgatcggtagcaacccctgtgccgaggaaaacgggggatgttctcacctgtgtctgtacaggcctcagggactgaggtgcgcatgtccaatcggatttgaactcataagtgacatgaaaacatgcatcgtgccagaagcctttttactgtttagccgacgggctgacataagaagaatcagtctcgagacaaacaataacaacgtggctataccgttgacaggagtcaaggaggcctccgctctggatttcgacgttaccgacaacagaatttactggacagacattagcctgaaaactattagcagagcttttatgaacggaagtgccttagagcatgtagttgaatttggcctcgactaccccgagggcatggcggtggactggttgggcaagaacttgtactgggcggatacaggcacgaaccggatagaagtcagtaagctggatggacagcacaggcaagtcctcgtctggaaagaccttgactccccgagggctcttgccctagaccccgcagaaggattcatgtactggacagaatggggcggaaaaccgaagatcgatcgggcagctatggatggcagtgaaagaactaccctggtgcccaacgtcgggagggctaatggcctgacaatagattatgcaaagaggaggctgtattggactgacttagacactaatctcatagaaagctccaatatgctggggttgaatcgggaagttatcgcggacgacctgccacatccatttggactgacgcaatatcaggactacatctattggactgactggtcgcgcagaagtatagagcgggcaaacaagactagtggacagaacaggaccattatccagggtcatctggattatgtgatggacattctggtcttccactcttctcgtcaaagtggatggaatgagtgcgcctcctccaatggacactgttcccatttgtgcctggccgtgcccgtgggaggtttcgtctgcggctgccccgctcactactcactaaatgctgacaacagaacatgtagtgctcctacaacctttttgctgttcagccagaagtccgccattaatcgtatggtgatagatgagcagcagtcgcctgacataattctgcccatccattccctccgcaatgtgcgcgctatcgactacgaccccctggataagcagctctactggattgactcaagacaaaatatgatccggaaagctcaggaggatggaagtcagggtttcacagtggtggtctccagtgtacccagccagaatcttgaaatacaaccctacgacctgtccatcgacatctatagccgctacatttattggacatgcgaagctacaaacgtaataaatgtcacccgattagacggtaggagcgtcggcgtagttctcaaaggcgagcaggatcgtcccagggcagtggtagtcaaccctgaaaaagggtatatgtatttcaccaatctgcaggagcgttcgccgaagattgaaagggccgcactagatggcacagagcgggaagtgctgttttttagtggcctgagtaagccaattgcactggcgttggactctagactcggtaagctgttctgggctgattcagacctgcgacgcattgaatcctctgacctgagcggtgccaaccgcattgtgctggaagattccaacattcttcaacctgtgggactgaccgtatttgaaaactggttgtactggatcgacaagcagcagcaaatgattgaaaagattgatatgaccggcagagaggggcgaaccaaggtccaggcacgaatcgctcagctgtccgacatacacgctgttaaggagcttaacctccaggaataccgacaacacccctgtgctcaggataatggaggatgctcccacatctgccttgtaaaaggggatggaaccacaaggtgcagctgcccgatgcacctggtcctgcttcaggacgagttgtcctgtggagagccacccacatgctcacctcagcagttcacttgctttactggcgaaatcgattgtatccctgtggcatggcggtgtgacggttttactgaatgtgaagatcacagcgacgaattaaattgccccgtgtgtagcgagtctcagtttcagtgcgctagcggccagtgtattgatggtgccctgcgttgtaacggcgatgcaaattgtcaggacaaatctgacgagaagaactgcgaagtgctgtgtctgatcgatcagtttcgatgtgccaatggacaatgcatcggcaagcacaagaagtgcgatcataacgttgattgctcggataaaagcgatgaactcgactgctatcctactgaagagcctgcccctcaggccactaacacagtgggatccgtcatcggtgttattgttacgatcttcgtcagtgggacggtgtactttatttgccagaggatgttgtgtccacgaatgaagggggacggcgagactatgacaaacgactacgtcgtacacggcccagcatctgtgcctttgggctatgtgcctcatccctcctccctgtctggctcactgcccggaatgtcccgaggaaagtccatgataagcagcctcagtatcatggggggaagtagtggacccccatatgatagggcccatgttacaggcgcaagtagctcttccagctcctctaccaaaggcacttatttcccagccattctgaatccccctccaagcccagctactgagaggtcccactacaccatggagttcggttactccagcaatagtccatctacacatcgcagctactcctataggccatacagctatcgccactttgctccccctacaacgccctgtagcacggatgtatgcgattctgattatgctccgtcacggcgtatgacttcagtggcaaccgcaaaaggctacacatctgatctgaactacgactccgagcctgttcctcctcctccgacacctaggagccagtatctgagtgccgaagagaattacgaaagctgcccaccaagcccatacaccgagaggtcatacagtcaccacttgtaccccccacctccctctccatgcacggatagtagtta

SEQ ID NO: 127573 - DNA, 4437 bp, Artificial Sequence
  derived and/or modified sequence
taattggaccagccaagggcaatcgcgctggatccgtcatccggctttatgtactggacggactggggagaggtccctaagattgaacgcgctggcatggacgggtcttctaggtttattatcatcaacagtgagatctactggcccaacgggctgacgctggactacgaggagcagaagctgtactgggccgatgctaaattaaattttatacataagagtaacctggatggaacaaaccgccaagctgtggtgaaaggcagtctcccccatccctttgccttaaccttattcgaggatatcctttactggaccgattggtctacccatagtattctggcctgtaacaagtacactggggagggcttgcgggaaatacactctgacatcttcagccccatggacatccacgcattttcacagcagcgtcagcccaacgccacaaacccctgtggaatcgacaatgggggttgtagtcacctgtgcctcatgtcaccggtgaaacctttctatcaatgcgcctgtcccacaggcgtgaagttgctggaaaacggaaagacgtgcaaggatggagccacggaactgcttcttttggccagaagaactgatctgaggcgaataagtttggatacccctgatttcactgacattgtgttacagctggaggacatcagacacgcaatagctatcgattacgatcccgtcgagggctatatatattggacggatgatgaagtcagggccataagacgatctttcattgatggtagtggaagtcaatttgtggtcaccgcccaaatcgcccacccggacggaatcgccgtggattgggtggcgagaaacctgtattggactgatacaggaaccgataggatagaggtcactcggctaaacgggaccatgcggaaaattctaatcagcgaggaccttgaggaaccccgtgccatcgtgctggaccctatggtgggatatatgtactggactgattggggagagattcccaagatagagcgagctgctcttgatgggtctgatagagttgtactcgtcaatacaagtctcggctggcctaacggtctcgcactcgactatgatgagggcaaaatctactggggggacgcaaaaacggataagatcgaggtcatgaacactgatggcacgggtaggagggtgctggtagaagataaaatcccacacatctttgggtttacccttttgggtgattatgtctattggactgactggcagaggaggagcatcgagcgagtgcataagagatctgcagagcgcgaagtgatcattgatcaacttcctgatttaatgggactgaaggctacgaatgtacatcgcgtgatcggctccaacccttgcgctgaagagaacggcggatgtagccacctgtgcctttatagaccacaaggcttaaggtgcgcatgtcccatcgggttcgagctgatctctgatatgaagacatgcatagtaccagaggcttttctcctattctcacgacgggcagatatccgtcgcatatctctagaaactaacaacaataacgttgccatccccctgacaggggttaaggaagcaagcgctttggatttcgatgtgacagacaaccgtatatactggactgatattagtcttaaaacaatttctagagccttcatgaacgggtctgccctcgaacatgttgtcgagttcggcctggactacccagaaggcatggcggtggattggctgggaaagaatctctattgggccgataccggaactaataggattgaggtgagtaaactcgacgggcagcatagacaggtgctagtttggaaagatttggacagcccacgggcattggctcttgatcctgccgagggctttatgtactggaccgaatggggaggcaaacccaagatcgaccgagccgcaatggatggctccgaaaggacgacactggtgcccaacgtggggcgtgccaacggattgacaatcgactatgccaagcgtcgtctgtactggacagacctggacacaaacctcatcgagtcctccaatatgttggggctgaaccgagaagtgatcgccgacgatctgccgcatccatttgggttgacacagtaccaggattatatctattggactgattggtcccgcagaagcatcgaacgagcaaacaagacctccgggcagaatcggaccattatccaaggccaccttgattatgtgatggatatcttggtctttcactcctccagacagagtggctggaatgagtgtgcctcaagcaacggtcactgcagtcatctgtgcctggctgtgcctgttgggggattcgtgtgcggatgtcctgcacactacagtctgaatgccgataacagaacctgcagtgctccaaccaccttccttctgttcagccaaaagtctgccattaatcgaatggtaattgacgaacagcagtcgccagacattattctccccatacacagtctgaggaatgtgagagccattgattacgaccccctggacaagcagctgtactggatcgacagtagacagaacatgattcggaaggcgcaggaggatgggtctcagggatttacggtggtcgtctcttccgtgcccagccaaaaccttgagattcagccctatgatctgtctattgacatctattcacgctatatctactggacctgcgaagccacaaatgttattaatgttacccgtctggatggaagaagcgtgggggtagttttaaagggtgagcaggacagaccacgggctgtggtggtaaaccctgagaagggctatatgtactttaccaatttgcaggagcgaagcccaaagatcgagagagccgcactcgacggaacagagagagaagtgttattcttctccgggctgtctaagcctatcgcgttagccctggattccagactcgggaagctgttttgggccgactccgacctgcgacgcatcgaatcaagtgacctgtccggggctaaccgtatcgtccttgaagactccaacatcctacagcccgtgggactgacagtgtttgaaaattggttgtactggatcgacaagcagcaacagatgattgagaaaatagacatgacagggcgagaaggcaggacaaaagtgcaagcaagaatcgcccaactgtcagacattcatgccgtgaaggagttgaaccttcaggagtaccgacaacatccttgcgctcaggacaatgggggatgttctcacatctgtctggtcaagggcgatggcactactcgctgttcttgtcccatgcatctggtgctgttgcaggacgaactgagctgtggagaacccccaacttgcagccctcagcagtttacatgttttacgggggagattgactgcatccccgtggcttggcggtgtgacggattcacggaatgtgaagatcattccgacgagctgaactgtccagtttgctccgagtcacaattccagtgcgcgtccggacaatgcattgatggcgcactgcgttgcaatggtgatgcaaattgtcaggataaatctgacgagaaaaattgtgaggtactgtgcctgattgaccagttccgctgtgccaatggccagtgtataggtaaacataagaaatgcgaccacaatgttgactgtagcgacaagtccgatgagctggactgttacccaacagaggagccggctcctcaggccacaaacacagttggctccgtcatcggcgtcatcgtcactatcttcgtttccggaacggtctatttcatatgccaacgaatgctgtgccccaggatgaagggagacggtgaaacaatgactaatgactacgtggtccacgggcctgcttcagtgcccctcgggtacgtcccacatccaagctccctgagtggctcgctgcctggaatgagccgtggcaagtctatgatctctagcctatcaattatggggggaagtagtggaccaccctatgaccgggcacatgttacgggggcatcatcctcctcatcctctagtactaagggtacatacttccccgcaattctcaacccacctccctctcctgccactgagagatcccactacactatggagttcggctatagcagtaatagccctagcacgcacaggagttacagctaccgcccttatagctaccgccactttgccccaccaaccacgccgtgcagcaccgacgtctgcgacagcgactacgccccaagcaggagaatgacgagcgtcgccaccgcaaagggttatacatctgatctgaattacgactcagaaccggttccaccacctccaaccccaaggtcacaatacctcagcgccgaagagaactacgagtcttgcccaccaagtccatatacagaaaggtcttactcccatcacctgtaccctccgcctccgagtccctgcaccgactcatcctag

SEQ ID NO: 127574 - DNA, 4842 bp, Artificial Sequence
  derived and/or modified sequence
atgggcgccgtgctgagaagcctgctggcctgcagcttctgcgtgctgctgagagccgcccccctgctgctgtacgccaacagaagagacctgagactggtggacgccaccaacggcaaggagaacgccaccatcgtggtgggcggcctggaggacgccgccgccgtggacttcgtgttcagccacggcctgatctactggagcgacgtgagcgaggaggccatcaagagaaccgagttcaacaagaccgagagcgtgcagaacgtggtggtgagcggcctgctgagccccgacggcctggcctgcgactggctgggcgagaagctgtactggaccgacagcgagaccaacagaatcgaggtgagcaacctggacggcagcctgagaaaggtgctgttctggcaggagctggaccagcccagagccatcgccctggaccccagcagcggcttcatgtactggaccgactggggcgaggtgcccaagatcgagagagccggcatggacggcagcagcagattcatcatcatcaacagcgagatctactggcccaacggcctgaccctggactacgaggagcagaagctgtactgggccgacgccaagctgaacttcatccacaagagcaacctggacggcaccaacagacaggccgtggtgaagggcagcctgccccaccccttcgccctgaccctgttcgaggacatcctgtactggaccgactggagcacccacagcatcctggcctgcaacaagtacaccggcgagggcctgagagagatccacagcgacatcttcagccccatggacatccacgccttcagccagcagagacagcccaacgccaccaacccctgcggcatcgacaacggcggctgcagccacctgtgcctgatgagccccgtgaagcccttctaccagtgcgcctgccccaccggcgtgaagctgctggagaacggcaagacctgcaaggacggcgccaccgagctgctgctgctggccagaagaaccgacctgagaagaatcagcctggacacccccgacttcaccgacatcgtgctgcagctggaggacatcagacacgccatcgccatcgactacgaccccgtggagggctacatctactggaccgacgacgaggtgagagccatcagaagaagcttcatcgacggcagcggcagccagttcgtggtgaccgcccagatcgcccaccccgacggcatcgccgtggactgggtggccagaaacctgtactggaccgacaccggcaccgacagaatcgaggtgaccagactgaacggcaccatgagaaagatcctgatcagcgaggacctggaggagcccagagccatcgtgctggaccccatggtgggctacatgtactggaccgactggggcgagatccccaagatcgagagagccgccctggacggcagcgacagagtggtgctggtgaacaccagcctgggctggcccaacggcctggccctggactacgacgagggcaagatctactggggcgacgccaagaccgacaagatcgaggtgatgaacaccgacggcaccggcagaagagtgctggtggaggacaagatcccccacatcttcggcttcaccctgctgggcgactacgtgtactggaccgactggcagagaagaagcatcgagagagtgcacaagagaagcgccgagagagaggtgatcatcgaccagctgcccgacctgatgggcctgaaggccaccaacgtgcacagagtgatcggcagcaacccctgcgccgaggagaacggcggctgcagccacctgtgcctgtacagaccccagggcctgagatgcgcctgccccatcggcttcgagctgatcagcgacatgaagacctgcatcgtgcccgaggccttcctgctgttcagcagaagagccgacatcagaagaatcagcctggagaccaacaacaacaacgtggccatccccctgaccggcgtgaaggaggccagcgccctggacttcgacgtgaccgacaacagaatctactggaccgacatcagcctgaagaccatcagcagagccttcatgaacggcagcgccctggagcacgtggtggagttcggcctggactaccccgagggcatggccgtggactggctgggcaagaacctgtactgggccgacaccggcaccaacagaatcgaggtgagcaagctggacggccagcacagacaggtgctggtgtggaaggacctggacagccccagagccctggccctggaccccgccgagggcttcatgtactggaccgagtggggcggcaagcccaagatcgacagagccgccatggacggcagcgagagaaccaccctggtgcccaacgtgggcagagccaacggcctgaccatcgactacgccaagagaagactgtactggaccgacctggacaccaacctgatcgagagcagcaacatgctgggcctgaacagagaggtgatcgccgacgacctgccccaccccttcggcctgacccagtaccaggactacatctactggaccgactggagcagaagaagcatcgagagagccaacaagaccagcggccagaacagaaccatcatccagggccacctggactacgtgatggacatcctggtgttccacagcagcagacagagcggctggaacgagtgcgccagcagcaacggccactgcagccacctgtgcctggccgtgcccgtgggcggcttcgtgtgcggctgccccgcccactacagcctgaacgccgacaacagaacctgcagcgcccccaccaccttcctgctgttcagccagaagagcgccatcaacagaatggtgatcgacgagcagcagagccccgacatcatcctgcccatccacagcctgagaaacgtgagagccatcgactacgaccccctggacaagcagctgtactggatcgacagcagacagaacatgatcagaaaggcccaggaggacggcagccagggcttcaccgtggtggtgagcagcgtgcccagccagaacctggagatccagccctacgacctgagcatcgacatctacagcagatacatctactggacctgcgaggccaccaacgtgatcaacgtgaccagactggacggcagaagcgtgggcgtggtgctgaagggcgagcaggacagacccagagccgtggtggtgaaccccgagaagggctacatgtacttcaccaacctgcaggagagaagccccaagatcgagagagccgccctggacggcaccgagagagaggtgctgttcttcagcggcctgagcaagcccatcgccctggccctggacagcagactgggcaagctgttctgggccgacagcgacctgagaagaatcgagagcagcgacctgagcggcgccaacagaatcgtgctggaggacagcaacatcctgcagcccgtgggcctgaccgtgttcgagaactggctgtactggatcgacaagcagcagcagatgatcgagaagatcgacatgaccggcagagagggcagaaccaaggtgcaggccagaatcgcccagctgagcgacatccacgccgtgaaggagctgaacctgcaggagtacagacagcacccctgcgcccaggacaacggcggctgcagccacatctgcctggtgaagggcgacggcaccaccagatgcagctgccccatgcacctggtgctgctgcaggacgagctgagctgcggcgagccccccacctgcagcccccagcagttcacctgcttcaccggcgagatcgactgcatccccgtggcctggagatgcgacggcttcaccgagtgcgaggaccacagcgacgagctgaactgccccgtgtgcagcgagagccagttccagtgcgccagcggccagtgcatcgacggcgccctgagatgcaacggcgacgccaactgccaggacaagagcgacgagaagaactgcgaggtgctgtgcctgatcgaccagttcagatgcgccaacggccagtgcatcggcaagcacaagaagtgcgaccacaacgtggactgcagcgacaagagcgacgagctggactgctaccccaccgaggagcccgccccccaggccaccaacaccgtgggcagcgtgatcggcgtgatcgtgaccatcttcgtgagcggcaccgtgtacttcatctgccagagaatgctgtgccccagaatgaagggcgacggcgagaccatgaccaacgactacgtggtgcacggccccgccagcgtgcccctgggctacgtgccccaccccagcagcctgagcggcagcctgcccggcatgagcagaggcaagagcatgatcagcagcctgagcatcatgggcggcagcagcggccccccctacgacagagcccacgtgaccggcgccagcagcagcagcagcagcagcaccaagggcacctacttccccgccatcctgaaccccccccccagccccgccaccgagagaagccactacaccatggagttcggctacagcagcaacagccccagcacccacagaagctacagctacagaccctacagctacagacacttcgccccccccaccaccccctgcagcaccgacgtgtgcgacagcgactacgcccccagcagaagaatgaccagcgtggccaccgccaagggctacaccagcgacctgaactacgacagcgagcccgtgccccccccccccacccccagaagccagtacctgagcgccgaggagaactacgagagctgcccccccagcccctacaccgagagaagctacagccaccacctgtacccccccccccccagcccctgcaccgacagcagctag

SEQ ID NO: 127575 - DNA, 4437 bp, Artificial Sequence
  derived and/or modified sequence
tgactggaccagcccagagccatcgccctggaccccagcagcggcttcatgtactggaccgactggggcgaggtgcccaagatcgagagagccggcatggacggcagcagcagattcatcatcatcaacagcgagatctactggcccaacggcctgaccctggactacgaggagcagaagctgtactgggccgacgccaagctgaacttcatccacaagagcaacctggacggcaccaacagacaggccgtggtgaagggcagcctgccccaccccttcgccctgaccctgttcgaggacatcctgtactggaccgactggagcacccacagcatcctggcctgcaacaagtacaccggcgagggcctgagagagatccacagcgacatcttcagccccatggacatccacgccttcagccagcagagacagcccaacgccaccaacccctgcggcatcgacaacggcggctgcagccacctgtgcctgatgagccccgtgaagcccttctaccagtgcgcctgccccaccggcgtgaagctgctggagaacggcaagacctgcaaggacggcgccaccgagctgctgctgctggccagaagaaccgacctgagaagaatcagcctggacacccccgacttcaccgacatcgtgctgcagctggaggacatcagacacgccatcgccatcgactacgaccccgtggagggctacatctactggaccgacgacgaggtgagagccatcagaagaagcttcatcgacggcagcggcagccagttcgtggtgaccgcccagatcgcccaccccgacggcatcgccgtggactgggtggccagaaacctgtactggaccgacaccggcaccgacagaatcgaggtgaccagactgaacggcaccatgagaaagatcctgatcagcgaggacctggaggagcccagagccatcgtgctggaccccatggtgggctacatgtactggaccgactggggcgagatccccaagatcgagagagccgccctggacggcagcgacagagtggtgctggtgaacaccagcctgggctggcccaacggcctggccctggactacgacgagggcaagatctactggggcgacgccaagaccgacaagatcgaggtgatgaacaccgacggcaccggcagaagagtgctggtggaggacaagatcccccacatcttcggcttcaccctgctgggcgactacgtgtactggaccgactggcagagaagaagcatcgagagagtgcacaagagaagcgccgagagagaggtgatcatcgaccagctgcccgacctgatgggcctgaaggccaccaacgtgcacagagtgatcggcagcaacccctgcgccgaggagaacggcggctgcagccacctgtgcctgtacagaccccagggcctgagatgcgcctgccccatcggcttcgagctgatcagcgacatgaagacctgcatcgtgcccgaggccttcctgctgttcagcagaagagccgacatcagaagaatcagcctggagaccaacaacaacaacgtggccatccccctgaccggcgtgaaggaggccagcgccctggacttcgacgtgaccgacaacagaatctactggaccgacatcagcctgaagaccatcagcagagccttcatgaacggcagcgccctggagcacgtggtggagttcggcctggactaccccgagggcatggccgtggactggctgggcaagaacctgtactgggccgacaccggcaccaacagaatcgaggtgagcaagctggacggccagcacagacaggtgctggtgtggaaggacctggacagccccagagccctggccctggaccccgccgagggcttcatgtactggaccgagtggggcggcaagcccaagatcgacagagccgccatggacggcagcgagagaaccaccctggtgcccaacgtgggcagagccaacggcctgaccatcgactacgccaagagaagactgtactggaccgacctggacaccaacctgatcgagagcagcaacatgctgggcctgaacagagaggtgatcgccgacgacctgccccaccccttcggcctgacccagtaccaggactacatctactggaccgactggagcagaagaagcatcgagagagccaacaagaccagcggccagaacagaaccatcatccagggccacctggactacgtgatggacatcctggtgttccacagcagcagacagagcggctggaacgagtgcgccagcagcaacggccactgcagccacctgtgcctggccgtgcccgtgggcggcttcgtgtgcggctgccccgcccactacagcctgaacgccgacaacagaacctgcagcgcccccaccaccttcctgctgttcagccagaagagcgccatcaacagaatggtgatcgacgagcagcagagccccgacatcatcctgcccatccacagcctgagaaacgtgagagccatcgactacgaccccctggacaagcagctgtactggatcgacagcagacagaacatgatcagaaaggcccaggaggacggcagccagggcttcaccgtggtggtgagcagcgtgcccagccagaacctggagatccagccctacgacctgagcatcgacatctacagcagatacatctactggacctgcgaggccaccaacgtgatcaacgtgaccagactggacggcagaagcgtgggcgtggtgctgaagggcgagcaggacagacccagagccgtggtggtgaaccccgagaagggctacatgtacttcaccaacctgcaggagagaagccccaagatcgagagagccgccctggacggcaccgagagagaggtgctgttcttcagcggcctgagcaagcccatcgccctggccctggacagcagactgggcaagctgttctgggccgacagcgacctgagaagaatcgagagcagcgacctgagcggcgccaacagaatcgtgctggaggacagcaacatcctgcagcccgtgggcctgaccgtgttcgagaactggctgtactggatcgacaagcagcagcagatgatcgagaagatcgacatgaccggcagagagggcagaaccaaggtgcaggccagaatcgcccagctgagcgacatccacgccgtgaaggagctgaacctgcaggagtacagacagcacccctgcgcccaggacaacggcggctgcagccacatctgcctggtgaagggcgacggcaccaccagatgcagctgccccatgcacctggtgctgctgcaggacgagctgagctgcggcgagccccccacctgcagcccccagcagttcacctgcttcaccggcgagatcgactgcatccccgtggcctggagatgcgacggcttcaccgagtgcgaggaccacagcgacgagctgaactgccccgtgtgcagcgagagccagttccagtgcgccagcggccagtgcatcgacggcgccctgagatgcaacggcgacgccaactgccaggacaagagcgacgagaagaactgcgaggtgctgtgcctgatcgaccagttcagatgcgccaacggccagtgcatcggcaagcacaagaagtgcgaccacaacgtggactgcagcgacaagagcgacgagctggactgctaccccaccgaggagcccgccccccaggccaccaacaccgtgggcagcgtgatcggcgtgatcgtgaccatcttcgtgagcggcaccgtgtacttcatctgccagagaatgctgtgccccagaatgaagggcgacggcgagaccatgaccaacgactacgtggtgcacggccccgccagcgtgcccctgggctacgtgccccaccccagcagcctgagcggcagcctgcccggcatgagcagaggcaagagcatgatcagcagcctgagcatcatgggcggcagcagcggccccccctacgacagagcccacgtgaccggcgccagcagcagcagcagcagcagcaccaagggcacctacttccccgccatcctgaaccccccccccagccccgccaccgagagaagccactacaccatggagttcggctacagcagcaacagccccagcacccacagaagctacagctacagaccctacagctacagacacttcgccccccccaccaccccctgcagcaccgacgtgtgcgacagcgactacgcccccagcagaagaatgaccagcgtggccaccgccaagggctacaccagcgacctgaactacgacagcgagcccgtgccccccccccccacccccagaagccagtacctgagcgccgaggagaactacgagagctgcccccccagcccctacaccgagagaagctacagccaccacctgtacccccccccccccagcccctgcaccgacagcagctag

SEQ ID NO: 127576 - protein, 357 aa, Artificial Sequence
  derived and/or modified sequence
MAPRRVRSFLRGLPALLLLLLFLGPWPAASHGGKYSREKNQPKPSPKRESGEEFRMEKLNQLWEKAQRLHLPPVRLAELHADLKIQERDELAWKKLKLDGLDEDGEKEARLIRNLNVILAKYGLDGKKDARQVTSNSLSGTQEDGLDDPRLEKLWHKAKTSGKFSGEELDKLWREFLHHKEKVHEYNVLLETLSRTEEIHENVISPSDLSDIKGSVLHSRHTELKEKLRSINQGLDRLRRVSHQGYSTEAEFEEPRVIDLWDLAQSANLTDKELEAFREELKHFEAKIEKHNHYQKQLEIAHEKLRHAESVGDGERVSRSREKHALLEGRTKELGYTVKKHLQDLSGRISRARHNEL

SEQ ID NO: 127577 - DNA, 1074 bp, Artificial Sequence
  derived and/or modified sequence
atggcccccagacgcgtgcggtctttcctacggggtctgcctgctctattgctattactgctttttcttggcccctggcctgctgctagccacggcggtaagtacagcagagaaaagaaccagcccaagccaagccctaagcgcgagtctggtgaagaatttagaatggagaagttgaatcagctatgggagaaagctcagcgattgcatctccctccagtacgactcgcggagctgcacgccgacctgaagatccaagaaagagacgaactcgcctggaagaaattaaaattggacggattggatgaggacggcgagaaagaggccagactaatccgcaatctcaacgttattctcgctaaatatggattggacgggaaaaaggacgcaaggcaggtgacgtcaaatagccttagcggtactcaggaggatggcctcgacgatccccgcctggagaagctgtggcataaggcaaagacctcgggcaagttctctggggaagaattggataaattgtggcgcgagttcttacaccacaaagaaaaggtgcacgaatacaacgtgctcctcgagacgctgagtcgtaccgaggagatccacgaaaacgtgatctctccatctgatttatcagacattaaagggagtgttctgcactctaggcacacggagctcaaggaaaagctaagatcaattaatcaaggcttagaccgactgcggcgggtctcacatcagggctatagtacggaggctgagttcgaggaaccacgagtgattgatttgtgggacctcgctcagagcgccaacctgacagacaaggagctagaggctttcagggaggagttgaaacacttcgaagccaaaatcgagaagcacaaccattatcagaagcagctggaaatcgcacacgagaaactgcggcacgccgagagtgttggagatggggaaagagtgtcccgtagccgggaaaagcacgctctcttggagggtcggactaaggaactcgggtacactgtgaagaagcatttgcaggaccttagcggcaggatcagccgcgccagacacaatgaactgtag

SEQ ID NO: 127578 - DNA, 1074 bp, Artificial Sequence
  derived and/or modified sequence
atggccccccggcgggtgcgctccttcctgcggggcctgcctgccctgctgctgctgctgctcttcctgggcccctggccagctgccagccatggaggcaagtacagccgggagaagaaccagcccaagcccagccccaagcgggagagcggggaggagttcaggatggagaagctgaaccagctgtgggagaaggcccagaggctgcacctgccccctgtgcggctggccgagctgcatgctgacctgaagatccaggagagagatgagctggcctggaagaagctgaagctggatggcctggatgaagatggagagaaggaggcccggctcatccggaacctgaatgtcatcctggccaagtatggcctggatggcaagaaggatgcccggcaggtgaccagcaacagcctgagcggcacccaggaggatggcctggatgacccccggctggagaagctgtggcacaaggccaagaccagcggcaagttctctggagaggagctggacaagctgtggagggagttcctgcaccacaaggagaaggtgcatgagtacaacgtgctgctggagaccctgagcaggacagaggagatccatgaaaatgtcatcagccccagcgacctgagtgacatcaagggctctgtgctgcacagccgccacacagagctgaaggagaagctgcggagcatcaaccagggcctggaccggctgcggcgggtgagccaccagggctacagcacagaggccgagtttgaggagcccagggtcatcgacctgtgggacctggcccagagcgccaacctgacagacaaggagctggaggccttccgggaggagctgaagcactttgaggccaagattgagaagcacaaccactaccagaagcagctggagatcgcccacgagaagctgcggcatgctgagagcgtgggagatggagagcgggtgagccgcagccgggagaagcacgccctgctggagggccgcaccaaggagctgggctacacagtgaagaagcacctgcaggacctgagcggccgcatcagccgggcccggcacaatgagctgtag

SEQ ID NO: 127579 - DNA, 7819 bp, Artificial Sequence
  derived and/or modified sequence
gctggagtccgccggcggcctcgccgctgccggccgctcacggaggaactacaattcccaggagaccgcgcggtgggtgggggcggggtagtgggcggggcatcggcaggctaggttttctccgcgcagcgccagtcgcagaggaagatggcgccgcggagggtcaggtcgtttctgcgcgggctcccggcgctgctactgctgctgctcttcctcgggccctggcccgctgcgagccacggcggcaagtactcgcgggagaagaaccagcccaagccgtccccgaaacgcgagtccggagaggagttccgcatggagaagttgaaccagctgtgggagaaggcccagcgactgcatcttcctcccgtgaggctggccgagctccacgctgatctgaagatacaggagagggacgaactcgcctggaagaaactaaagcttgacggcttggacgaagatggggagaaggaagcgagactcatacgcaacctcaatgtcatcttggccaagtatggtctggacggaaagaaggacgctcggcaggtgaccagcaactccctcagtggcacccaggaagacgggctggatgaccccaggctggaaaagctgtggcacaaggcgaagacctctgggaaattctccggcgaagaactggacaagctctggcgggagttcctgcatcacaaagagaaagttcacgagtacaacgtcctgctggagaccctgagcaggaccgaagaaatccacgagaacgtcattagcccctcggacctgagcgacatcaagggcagcgtcctgcacagcaggcacacggagctgaaggagaagctgcgcagcatcaaccagggcctggaccgcctgcgcagggtcagccaccagggctacagcactgaggctgagttcgaggagcccagggtgattgacctgtgggacctggcgcagtccgccaacctcacggacaaggagctggaggcgttccgggaggagctcaagcacttcgaagccaaaatcgagaagcacaaccactaccagaagcagctggagattgcgcacgagaagctgaggcacgcagagagcgtgggcgacggcgagcgtgtgagccgcagccgcgagaagcacgccctgctggaggggcggaccaaggagctgggctacacggtgaagaagcatctgcaggacctgtccggcaggatctccagagctcggcacaacgaactctgaaggcattggggagcccagcccggcagggaagaggccagcgtgaaggacctgggctcttggccgtggcatttccgtggacagcccgccgtcagggtggctggggctggcacgggtgtcgaggcaggaaggattgtttctggtgactgcagccgctgccgtcgcgacacagggcttggtggtggtagcatttgggtctgagatcggcccagctctgactgaaggggcttggcttccactcagcatcagcgtggcagtcaccaccccagtgaggacctcgatgtccagctgctgtcaggtctgatagtcctctgctaaaacaacacgatttacataaaaaatcttacacatctgccaccggaaataccatgcacagagtccttaaaaaatagagtgcagtatttaaaccacccgcttgttggctggtcactaagtgtcctggtggctggggccggagccagtgctcttgaagggatcgcgtcatagccagcttcccctctgggccctgtgggtctttgcagccaacctccttttcccgtgagacggcccggcctgatttaaagccaagagcgcttgagttgagtttgaggggaagatgtggagcgtgtggttctgtggacagtcagagactgtggcctgggggcagcgtctttcaactctcacctctgcagctcagggacctcgggagacctcaccaaacctgcagggcctccgtgtccctaagtgtgctgtgtaaatgccccatctcatgggggagagacagccacggaggccttcctctgaccatagctgatggactggcggttgctcaggtccggctccgagaatgttcctgtgtctgagcctggaagaggctcgggtctggctccaggcgtggttcccttcccgtgtctgagcctggaagaggctcgggtccggctccgagcgtggttcccttcccgtgtctgagcctggaagaggctcgggtccggctccgagcgtggttcccttcccgtgtctgagcctggaagaggctcgggtccggctccgagcgtggttcccttcccgtgtctgagcctggaagaggctcgggtccggctccgagcgtggttcccttcccgtgtctgagcctggaagaggctcgggtccggctctgggcgtggttcccttcccgtgtctgagcctggaagaggctcgggtccggctctgggcgtggttcccgtgtctgagcctggaagaggctcgggtccgggtccagctccgagcgtggttcccgtgtttgaacctggaagaggctccaccaggcgtattgtgttttgactgcagctggatcttggcttgactgttgagatctgccaaacatccgctaagctatcatttctgagaaaggtcaaggctagaggcagcatgtcgggagttggcgcatcagggttggaagggccccagggtacagcatgtgggtgcctgttcctttgtggacttgtgtgtgtgtggctggtggggcggggggtggattctggttcttttttttcccattatcctgagagccttaaggtactcagtgtgttggtgagactcagccctgtcatctagcagaagtgtgttccttttcattgctgtatagtattccattgcatgactgtcctgtgctctgattttaatgcactttattgtgggtggatatttgagttgcttcctttctggggtaataacactcacttggaaatagctgtggtgaacactcgtgtgggggtgggggtgggggccaactctaggagcacctaatggatcttacgaagcgtgttgtccaagtatagagatgattccaaagtggttggactgtgtttctttctcccagctgggtggaaggagaacactagtggattgctgagacttggtgctcggtatttttaattatggacagcctggctggcgttttgtggtgtctaattgcggagtagcgtgtcttactgtataatggcctcttttgtatgtgggagaccatggtgttgaggggaggcagttacacaaaaaacccagataccgagtgttagttccatgggtgtggctggtcatggtgcgcactcacgaaggatgtaggtgatgccctccactccgcagagccagtcccacaggggtacccattctgactcctaccaccgcagctccctacctcccgcctgccatgggttccacgtgcatggctctgggcagtctgtgtctttgcgtgcgtctgtgtatgtctgcgtgtatctgcttacattcgctcagcatctgagattcacccaggcttttgcgtggatcagcggcagactcctgattgccgcgtggcggcctgttgtgtgggtgtgtgccgcgtgtgtatccagtccctactcaggagtgtacgtttccagtgtgggttgcagtcaggatccatttctcccttaactttcagattatttgctgcataggcttttttctcctaatttggcgcctttgtcagaaatcaactgacctacctgtgtgggtctgtttctgtttgtccttacgctcttgccattgccacactttagacaaggtcttgctctgtccctcaggctggagtgcagtagcgtgatctcagctcactgcacccttgacctcccatactccagcaatcccctcgcctcagtctcctgagtagtagctgcgaccacaggcgtgtgtcaccacacccggctgattttattttttttatttttattttttttgtagagacggggttttactatgttgcccaggcaggtcttgatctgggctcaagtgatgctcctgtctcagcctcccaaactactgggattacaggttgtaggtgtgagccatggtgcccggccgccacactgtcttggctacagttgggtttataataaaccctgaatcgaggtgatgtgcattttccaactcttctttttaaagattcttgtggctgtttatgtccttggtgtttccatatatgttttacaatcagtgtctcaatttctaccaaaaaaacatgccttctggaatttcaatagcaattcccttgaacgcatttttgaataccttttctgaatgtcttgaatacatgttgggaagaatcggtgtcttaacagtctccagtgtccacgcgttgactgccgtgtgtgactccagtcggcgtctcaacagtctccagtgtccacgcgttgactgccgtgtgtgactccagtcggcgtctcagcagtctccagtgtccacgcgttgactgccgtgtgtgactccagtcggcgtctcagcagtctccagtgtccacgcgttgactgccgtgtgtgactccagtcggcgtctcagcagtctccggtgtccacgcgttgactgccgtgtgtgactccagtcggcgtctcaacagtctccggtgtccacgcgttgactgccgtgtgtgactccagtcggcgtctcaacagtctccggtgtccacgcgttgactgccgtgtgtgactccagtcggcgtctcaacagtctccggtgtccacgcgttgactgccgtgtgtgactccagtcggcgtctcaacagtctccggtgtccacgcgttgactgccgtgtgtgactccagtcggcgtctcaacagtctccggtgtccacgcgttgactgccgtgtgtgactccagtcggcgtctcaacagtctccggtgtccacgcgttgactgccgtgtgtgactccagtcggcgtctcaacagtctccggtgtccacgcgttgactgccgtgtgtgactccagtcggcgtctcaacagtctccggtgtccatgcgttgactgccatgtatgactccaggtattgagttcatcttcaacttctcccaacaatgaactggagttttctgtgcatgtgtctggcatgttttcctttagatctagtcctaggtgttcgatatgctattgaggactgtgtatttttatttcatttgtcacctgtgcgtggtgctttaatcctgtgccctaaactcccgccttggccatggcggtgtttctgtggactcgtggggtttccgtgtgcacacgcgtgtcctctgtctgacagtggctttgcttccccttgtcagtctgtgcctcggcttctcactgcactggtgaggtgagccggcgctcgctaatcttattcccagtctcggtgaacatgggctcagtctctcccggctcagtgttgggtttgcactggtgcacttacaggcagaagagcttcctcatttgctgagggcttttcctgaatccgtgttgaatgtggtcagctgcctttcctgcacctagtgagatgctcatgaggtcacttccttaccgcattactgtagtgaattacgctgactttcatatgccaagatgacctggcatttccaggtaagtccctgtggccatggtgcattggccttttctctgcatggccagatgagatttgctcataccgggctaaggacctcctgtgtaggaatgctcttgagggacactgggcttggatgttcattgtcttgtcatgtgatgtgtctgtcatggtttgatattgcattaagtgggcctcctgaaacaagttctgccatagtttgtataggattggcattatttgtttcatagagatgtgatgggtgaggccatctatgcctgccattttctttttgcttaggtttttcattaagaacttgatttttaaaaatagacatgaggcctggcatggtggctcacgcttgtaatcccagcactttgggaggccaacgtggatggatcacctgaggtcaggagtttgagaccaacctagtcaacatggtgaaaccccgtctccattaaaaatataaaaattagcagggtgtggtggtgcatgcctgtaatcccagctactctggaggctgaggcaggagaatcacttgaactcaggaggtggaggttgcagtgagctgagatcacaccactgcactccagcctgggcaacagagcgaggctctgtctcaaaaaaaaagacatgaggcttttggattttctgtttcttcctttgtcatttttttaaagataggtttgtcgcagaatttcatctaagttatcaaaacaatttacataaatcattcacagtatcctctgtgcagtgatgtccattctcattcctgctctgggccatttgtgttttcttttccccctgatcagactagctaagagtttatcatttttacagatattttccccaaagaaacctacttttgggtccattgattttttttttctattgttttctttttcattgacttttgctcttttcttatgaatttcctttcttctacctattttgtgttcaatttgctgtccttgttttaggttcttttgatagaggcttagatcattgatgaagaatatgaaagaatgggataatacagttaaaaacttggtctacttatgcccattagagaaaacattcttaagcacgcatggaatcttttaaaaatggacgaggtactaggacccaaagcaaatgtcagtaattcgcagatgataatgtataaatatatgatatgtaggtaaataatacaaatcacattctttggccagagtgcaattgaggaggaaatcagtaacaaaaagacaattaaatccatttgattcttttgttttcgttttgtagtaacttgcacttccctggtgccagaggcatgacacctttttgtctgctcttggccatttgggtggcgtctttgggaagggcctacttaattcttttgcctatttaaaaaactgggtcttggaaatcttgtctttttttttgagtcaggatctttctcgcacaggcttggagtgcagtggtgcgatcatagctcactgcaacctcaaactcctgggctcaagcgagcctcccacctcggtcttctgagtagctgggactacaggcatgcatcactatgctctgctaatttaaagaaaaggttttttttatagagactgggtctcgctgtgttgcccaggctggtctcggagtcctggtctcaagtgattcacctgcctccacctcgcggagtgccaggattacaggtggcgggagccgccacacccagcctggtcttagcgttattcccaggtctaggtgtgagtccttcctcagatatgtgttgtgaataatttccgatcctctggcttgctattttactttcttaatggttatcttttggaaagcaaaggtttccagtttgatgaaatctaatttttattttttatttttccgttctagtggtctttctattttctcatcaaattgagactttggggaaactacacagcagcaaaccaggatatatcctcttaaaaacagctcgagccggccgggtgcggtggctcatgcctggaatcccagcactttgggaggtggaggtgggcggatcacgtgaggtcaggagtttgagaccagcctggccaacatggtgaaaccccatctctactaaaaataaaaaattagccaggcatggtggcaggcacctgtaatcccagctacttgggaggctgaggcaggagaatggcttgaacctgggaggcagaggttgcagtgagccgagatcgcgccattgcactccggcctggggacaagagcaagacttcgcctcaaaaaaaaaaaaaaa

SEQ ID NO: 127580 - DNA, 1074 bp, Artificial Sequence
  derived and/or modified sequence
atggccccccggcgggtgcggagcttcctgcggggcctgcccgcccttctgctgctcctcctatttctggggccatggcccgccgccagccacgggggaaaatacagccgcgagaagaaccagcctaagccgagccctaagcgagagagcggagaggagtttagaatggaaaagttaaaccagctgtgggaaaaggcccagcggctacatctgccgccagtgagattggcagaactgcacgccgatctgaaaatccaggaacgcgacgagctggcatggaagaagctaaaactagacggtctcgacgaggatggggagaaggaagcacgccttatccgaaacctcaatgtgatccttgccaagtacggattggatggaaaaaaagacgctcggcaggtgacatctaattctcttagcgggactcaggaggatggcctcgacgatcctagactggagaaattgtggcacaaggccaaaacttcaggcaaatttagcggtgaggagctcgacaagctgtggagggaattcctgcatcacaaagagaaagtacacgagtataatgtcttgctggaaaccttatccagaaccgaggagatacatgagaacgtcatctccccttcagatctctcagacattaagggcagcgtgctgcactcgagacatactgagcttaaagagaaacttagatcaatcaaccaaggattggaccgcctgcgaagagtgtcgcaccagggctatagcacagaggctgagttcgaggagcctagggttattgacctctgggatctcgctcaaagtgctaaccttacggacaaagagttggaggcttttcgagaggagctgaagcacttcgaagcgaaaatagaaaagcacaaccattaccagaagcagctcgagatcgcccacgaaaaacttaggcatgccgagagcgtgggtgatggcgaacgagtttcccggagccgggaaaaacatgcactcctcgaggggcgaaccaaggaattgggctacaccgtgaaaaagcatttgcaagacctatcgggacggataagcagggcccggcataacgagctctag

SEQ ID NO: 127581 - DNA, 1074 bp, Artificial Sequence
  derived and/or modified sequence
atggctccccgtcgcgtgcggagttttttaagggggctgcccgctctgctcctgcttctcctttttctggggccatggcccgctgcctcccatggcggaaaatacagccgagagaaaaaccagcctaagccttcaccaaagcgagaatctggagaggagtttcgcatggagaaactcaaccagctctgggagaaggcccaacggctccaccttccgcctgtgcggctggctgaattgcacgccgatttgaagatccaggaacgagatgagttagcctggaaaaaattgaaactcgacgggttagacgaggacggggagaaagaggcccgtctgatccggaatctgaacgtgatacttgccaaatatggcctggatggcaagaaggatgctaggcaagtaacttccaattctcttagcggcacccaggaagacggcctcgatgatccaagactcgaaaagctttggcataaggctaaaacatccggcaagttttcaggagaggaactcgataagctgtggagggaatttttacatcataaggagaaggttcacgagtacaacgtgcttctggagacgctcagcaggacagaagaaatccacgagaatgtgatttccccttctgacctgagcgacattaaagggtcagtgcttcatagccgacacaccgaactcaaagagaagttacgatctattaaccagggcctcgaccggctcagaagggtatcccaccagggatatagtactgaggcagagttcgaggaacctagggtaatcgatctgtgggacctggctcaatcagccaacttaaccgacaaagaactggaagcatttcgcgaggaacttaagcattttgaagccaaaattgagaagcacaaccactatcagaagcagttggagatcgctcacgagaagcttcggcatgccgaatccgtgggagacggggagagggttagtcgtagtcgagagaaacacgctctactggagggacgcactaaggagctgggttatactgtgaagaagcacctgcaggatctgagcggaaggatatcaagagcccgtcacaatgaactctag

SEQ ID NO: 127582 - DNA, 1074 bp, Artificial Sequence
  derived and/or modified sequence
atggcccccagaagagtgagaagcttcctgagaggcctgcccgccctgctgctgctgctgctgttcctgggcccctggcccgccgccagccacggcggcaagtacagcagagagaagaaccagcccaagcccagccccaagagagagagcggcgaggagttcagaatggagaagctgaaccagctgtgggagaaggcccagagactgcacctgccccccgtgagactggccgagctgcacgccgacctgaagatccaggagagagacgagctggcctggaagaagctgaagctggacggcctggacgaggacggcgagaaggaggccagactgatcagaaacctgaacgtgatcctggccaagtacggcctggacggcaagaaggacgccagacaggtgaccagcaacagcctgagcggcacccaggaggacggcctggacgaccccagactggagaagctgtggcacaaggccaagaccagcggcaagttcagcggcgaggagctggacaagctgtggagagagttcctgcaccacaaggagaaggtgcacgagtacaacgtgctgctggagaccctgagcagaaccgaggagatccacgagaacgtgatcagccccagcgacctgagcgacatcaagggcagcgtgctgcacagcagacacaccgagctgaaggagaagctgagaagcatcaaccagggcctggacagactgagaagagtgagccaccagggctacagcaccgaggccgagttcgaggagcccagagtgatcgacctgtgggacctggcccagagcgccaacctgaccgacaaggagctggaggccttcagagaggagctgaagcacttcgaggccaagatcgagaagcacaaccactaccagaagcagctggagatcgcccacgagaagctgagacacgccgagagcgtgggcgacggcgagagagtgagcagaagcagagagaagcacgccctgctggagggcagaaccaaggagctgggctacaccgtgaagaagcacctgcaggacctgagcggcagaatcagcagagccagacacaacgagctgtag

SEQ ID NO: 127583 - protein, 338 aa, Artificial Sequence
  derived and/or modified sequence
MVRRVQPDRKQLPLVLLRLLCLLPTGLPVRSVDFNRGTDNITVRQGDTAILRCVVEDKNSKVAWLNRSGIIFAGHDKWSLDPRVELEKRHSLEYSLRIQKVDVYDEGSYTCSVQTQHEPKTSQVYLIVQVPPKISNISSDVTVNEGSNVTLVCMANGRPEPVITWRHLTPTGREFEGEEEYLEILGITREQSGKYECKAANEVSSADVKQVKVTVNYPPTITESKSNEATTGRQASLKCEASAVPAPDFEWYRDDTRINSANGLEIKSTEGQSSLTVTNVTEEHYGNYTCVAANKLGVTNASLVLFRPGSVRGINGSISLAVPLWLLAASLLCLLSKC

SEQ ID NO: 127584 - DNA, 1017 bp, Artificial Sequence
  derived and/or modified sequence
atggttcgccgcgtgcagccggatcggaaacagcttcccctggtactcctgagattgctctgcctgctcccaaccggtctgccggttaggagcgtggatttcaacagggggacagacaatattactgtcaggcagggggacacggctattcttcgatgcgtcgtagaagataagaattcgaaagttgcctggctgaatcggtcaggaataattttcgcgggacacgataaatggtcccttgacccaagagtcgaattggagaaacggcacagcttagagtattcactgcgcattcagaaggtggatgtgtatgacgagggctcctatacatgttctgtccagactcaacatgagcccaaaacaagtcaagtctacctgattgtccaggtgcccccaaagattagcaacatctcctcagatgtcactgtaaatgaggggtcaaatgtgacactcgtttgcatggcgaatggccgccccgaaccagtcatcacgtggcggcatctgaccccaactggaagggagtttgaaggggaggaagagtacctggagatcctcggcatcacaagggagcagtccggaaaatatgaatgcaaggccgctaacgaggtgagttccgctgatgtcaagcaggttaaggttacagtcaattaccccccgaccatcaccgaatctaaaagcaacgaagcaacaacagggagacaagccagcttgaagtgcgaagcatccgctgtgcctgctcctgatttcgagtggtacagagacgacacacgcattaattccgcgaatggactggagatcaaatccacggaaggtcaatcctctctgactgtgacgaacgtcacggaggagcactacgggaactacacctgcgtcgccgcaaataaacttggagtgacgaatgcctctttggttctgtttaggcccggctctgtgcggggaataaacgggtcaatctcattagcagtccctctttggctgttagcagcctccctcctgtgtctactctccaaatgttag

SEQ ID NO: 127585 - DNA, 1017 bp, Artificial Sequence
  derived and/or modified sequence
atggtgagaagagtgcagcctgacaggaagcagctgcccctggtgctgctgcggctgctgtgcctgctgcccaccggcctgcctgtgcgctctgtggacttcaacagaggaacagacaacatcaccgtgcggcagggcgacacagccatcctgcgctgtgtggtggaggacaagaacagcaaggtggcctggctgaacagaagtggcatcatctttgctggccatgacaagtggagcctggacccccgggtggagctggagaagaggcacagcctggagtacagcctgcgcatccagaaggtggatgtgtatgatgagggcagctacacctgcagcgtgcagacccagcacgagcccaagaccagccaggtgtacctgattgtgcaggtgccccccaagatcagcaacatcagcagtgatgtgacagtgaatgaaggcagcaatgtgaccctggtgtgcatggccaacggccggcctgagcctgtgatcacctggaggcacctgacccccaccggccgggagtttgaaggagaggaggagtacctggagatcctgggcatcacccgggagcagagcggcaagtatgagtgcaaggccgccaatgaggtgtcctctgcagatgtgaagcaggtgaaggtgacagtgaactacccacccaccatcacagagagcaagagcaatgaggccaccaccggccggcaggccagcctgaagtgtgaggccagcgctgtgcctgccccagactttgagtggtacagagatgacacccgcatcaacagcgccaacggcctggagatcaagagcacagagggccagagcagcctgactgtgaccaacgtgacagaggagcactacggcaactacacctgtgtggccgccaacaagctgggcgtgaccaatgccagcctggtgctcttccggcccggctctgtgcggggcatcaatggcagcatcagcctggccgtgcccctgtggctgctggccgccagcctgctgtgcctgctgagcaaatgttag

SEQ ID NO: 127586 - DNA, 1740 bp, Artificial Sequence
  derived and/or modified sequence
ggggagagaggctctgggttgctgctgcttctgctgctgctgctgctgtgtggctgtttctgtacactcactggcaggcttggtgccggctccctcgcccgcccgcccgccagcctgggaaagtgggttacagagcgaaggagctcagctcagacactggcagaggagcatccagtcacagagagaccaaacaagaaccctttcctttggcttcctcttcagctcttccagagggcttgctatttgcactctctcttttgaaattgtgttgcttttacttttcacccttctgcttgggttttatgagggctttgttaagtcttagagggaaaagagactgagcgagggaaagagagaggcaaagtggaaaggaccataaactggcaaagcccgctctgcgctcgctgtggatgaaagccccgtgttggtgaagcctctcctcgcgagcagcgcgcacccctccagagcaccccgcggacccgcacctcggcgtggccaccatggtcaggagagttcagccggatcggaaacagttgccactggtcctactgagattgctctgccttcttcccacaggactgcctgttcgcagcgtggattttaaccgaggcacggacaacatcaccgtgaggcagggggacacagccatcctcaggtgcgttgtagaagacaagaactcaaaggtggcctggttgaaccgttctggcatcatttttgctggacatgacaagtggtctctggacccacgggttgagctggagaaacgccattctctggaatacagcctccgaatccagaaggtggatgtctatgatgagggttcctacacttgctcagttcagacacagcatgagcccaagacctcccaagtttacttgatcgtacaagtcccaccaaagatctccaatatctcctcggatgtcactgtgaatgagggcagcaacgtgactctggtctgcatggccaatggccgtcctgaacctgttatcacctggagacaccttacaccaactggaagggaatttgaaggagaagaagaatatctggagatccttggcatcaccagggagcagtcaggcaaatatgagtgcaaagctgccaacgaggtctcctcggcggatgtcaaacaagtcaaggtcactgtgaactatcctcccactatcacagaatccaagagcaatgaagccaccacaggacgacaagcttcactcaaatgtgaggcctcggcagtgcctgcacctgactttgagtggtaccgggatgacactaggataaatagtgccaatggccttgagattaagagcacggagggccagtcttccctgacggtgaccaacgtcactgaggagcactacggcaactacacctgtgtggctgccaacaagctgggggtcaccaatgccagcctagtccttttcagacctgggtcggtgagaggaataaatggatccatcagtctggccgtaccactgtggctgctggcagcatctctgctctgccttctcagcaaatgttaatagaataaaaatttaaaaataatttaaaaaacacacaaaaatgcgtcacacagaatacagagagagagagacagagagagagagagagagagagatgggggagaccgtttatttcacaactttgtgtgtttatacatgaagggggaaataagaaagtgaagaagaaaatacaacatttaaaacaattttacagtccatcattaaaaatttatgtatcattcag

SEQ ID NO: 127587 - DNA, 1017 bp, Artificial Sequence
  derived and/or modified sequence
atggtgcggcgggtgcagcccgaccggaagcagctgcccctggtgctcttgcggctcctgtgcctgctgcccacgggcttacccgtgagaagtgtggactttaatcgaggcaccgacaatattactgtcagacaaggtgacacagcaatcctgcgatgcgtggtcgaagataagaatagcaaggtagcctggcttaaccgcagcggcatcatcttcgctggccacgataagtggtccctggacccgcgggtggagctggagaagcgtcattctctggagtattcattgcgaatccagaaagtagacgtatatgatgaaggcagttacacttgttcagttcagactcaacacgagcctaagaccagccaggtctacttaattgtgcaggttcccccaaaaatctcaaacatcagttcagatgtcaccgtaaacgaagggtccaacgttacgttagtatgcatggccaatggcaggcccgaaccagtaatcacttggcggcacctcacacccaccggcagggagtttgaaggcgaagaggagtatctcgaaatcttagggattacccgagagcaatccggcaagtatgagtgcaaggcagccaacgaggtatcctcagccgacgttaagcaggttaaagtaactgtgaactacccacctactatcacggagtcaaaatcaaacgaggctaccacaggacgacaggcctccctgaagtgcgaggcttcagcagtgcctgcaccggattttgagtggtatagggacgatactcgtataaattccgccaacggtctggagataaagtccaccgagggacaaagctccctgacagtaacaaatgtgaccgaggagcactacggaaattacacctgtgtggccgcaaataaactcggggtcacgaatgcttctctggtcctgtttcgcccagggtccgttcggggaattaacggctctatttcgctggcggtgccactatggcttctggcagcctccctcctttgtctgctaagtaagtgctag

SEQ ID NO: 127588 - DNA, 1017 bp, Artificial Sequence
  derived and/or modified sequence
atggtccgcagagtgcagcctgataggaaacagctgcccttggtcttactgcggctgttatgccttctgcccactggtcttcccgtgcgttcagtagatttcaatcggggaaccgataacatcacagtgcggcaaggcgacactgcaatcctgcggtgtgtggtcgaggataaaaatagtaaagtcgcttggctaaacaggtcaggaattatattcgccggtcacgacaagtggtccctggacccccgtgtagaattagagaaacgccattccctggagtactcacttcggatacaaaaggtggacgtttacgatgaaggttcctacacctgttccgtgcagactcagcacgaacccaagacaagccaggtatatctcatagtgcaggttcctccgaagatttccaacatctcctccgacgttacagttaacgagggctccaatgtgacactggtatgcatggcgaatggccgaccggaaccagttattacctggaggcatcttacacctactgggcgtgaatttgagggtgaggaggagtatctggagattttggggatcaccagggaacagagcgggaaatacgagtgcaaagccgctaatgaagtgtccagtgccgacgtgaaacaggttaaggtcacggtgaactatccccctacgatcactgaatctaagtcaaacgaagccactacaggaaggcaggcatccctgaaatgcgaagcaagtgctgttcctgctccagactttgaatggtaccgagacgacacccgaatcaattcggctaatggactggaaataaaatctactgaaggccagtcaagcctgaccgttactaacgttaccgaggaacactacggtaattatacatgtgtcgcagcgaataagttgggcgtgacaaatgcaagcttagttttgttcaggcccggtagcgtacggggaataaacggctcaatcagtctggccgtccccttatggttacttgctgcctccttgttgtgcctgcttagcaagtgttag

SEQ ID NO: 127589 - DNA, 1017 bp, Artificial Sequence
  derived and/or modified sequence
atggtgagaagagtgcagcccgacagaaagcagctgcccctggtgctgctgagactgctgtgcctgctgcccaccggcctgcccgtgagaagcgtggacttcaacagaggcaccgacaacatcaccgtgagacagggcgacaccgccatcctgagatgcgtggtggaggacaagaacagcaaggtggcctggctgaacagaagcggcatcatcttcgccggccacgacaagtggagcctggaccccagagtggagctggagaagagacacagcctggagtacagcctgagaatccagaaggtggacgtgtacgacgagggcagctacacctgcagcgtgcagacccagcacgagcccaagaccagccaggtgtacctgatcgtgcaggtgccccccaagatcagcaacatcagcagcgacgtgaccgtgaacgagggcagcaacgtgaccctggtgtgcatggccaacggcagacccgagcccgtgatcacctggagacacctgacccccaccggcagagagttcgagggcgaggaggagtacctggagatcctgggcatcaccagagagcagagcggcaagtacgagtgcaaggccgccaacgaggtgagcagcgccgacgtgaagcaggtgaaggtgaccgtgaactacccccccaccatcaccgagagcaagagcaacgaggccaccaccggcagacaggccagcctgaagtgcgaggccagcgccgtgcccgcccccgacttcgagtggtacagagacgacaccagaatcaacagcgccaacggcctggagatcaagagcaccgagggccagagcagcctgaccgtgaccaacgtgaccgaggagcactacggcaactacacctgcgtggccgccaacaagctgggcgtgaccaacgccagcctggtgctgttcagacccggcagcgtgagaggcatcaacggcagcatcagcctggccgtgcccctgtggctgctggccgccagcctgctgtgcctgctgagcaagtgctag

SEQ ID NO: 127590 - protein, 339 aa, Artificial Sequence
  derived and/or modified sequence
MAEASSDPGAEEREELLGPTAQWSVEDEEEAVHEQCQHERDRQLQAQDEEGGGHVPERPKQEMLLSLKPSEAPELDEDEGFGDWSQRPEQRQQHEGAQGALDSGEPPQCRSPEGEQEDRPGLHAYEKEDSDEVHLEELSLSKEGPGPEDTVQDNLGAAGAEEEQEEHQKCQQPRTPSPLVLEGTIEQSSPPLSPTTKLIDRTESLNRSIEKSNSVKKSQPDLPISKIDQWLEQYTQAIETAGRTPKLARQASIELPSMAVASTKSRWETGEVQAQSAAKTPSCKDIVAGDMSKKSLWEQKGGSKTSSTIKSTPSGKRYKFVATGHGKYEKVLVEGGPAP

SEQ ID NO: 127591 - DNA, 1020 bp, Artificial Sequence
  derived and/or modified sequence
atggccgaagcatccagtgatcctggcgcagaggaaagagaagagttgctcgggcccacggctcagtggtcggtggaagatgaagaagaagctgttcatgaacagtgccaacacgagagggataggcaactccaggcccaagatgaggagggagggggccacgtgcctgaacgtccaaagcaggagatgttgctgtcactgaagccgagcgaggcccccgaactcgatgaagacgagggcttcggcgactggtcacagaggccagagcagaggcaacaacacgagggtgcccaaggagcactggacagtggggagcccccccagtgcagaagtcccgaaggtgaacaggaagaccgaccaggcctgcatgcttacgaaaaggaggattctgacgaggtgcacctggaagagttgagtcttagcaaggaagggcccggccccgaggacacggtgcaggacaacttaggtgcggcaggggccgaggaggagcaggaagagcaccaaaaatgtcagcagcctcgtacccctagccccttagtcctcgagggcacaattgaacagtcatctcccccactgtcaccaacaactaagttgatcgaccgcaccgaatccttaaatcggagtatcgaaaaatccaacagcgttaagaagagccagccggacctaccaattagtaaaatcgatcagtggcttgaacagtacacccaagccatcgaaacagccggtagaaccccgaagctcgcgcgtcaagccagtatagagctcccttccatggccgtcgcatccaccaagtctcggtgggagacaggcgaggttcaggcccagtccgcagccaaaactccatcttgcaaagatatcgtggccggtgacatgtcaaaaaagtccctgtgggagcagaagggaggatctaagacctcctctaccataaagtctacaccttctggaaagagatacaagtttgtggccacaggccatgggaaatatgaaaaagtgctagtcgaaggtgggcctgctccttag

SEQ ID NO: 127592 - DNA, 1020 bp, Artificial Sequence
  derived and/or modified sequence
atggccgaggccagcagtgaccccggggctgaggagcgggaggagctgctgggccccacagcccagtggagcgtggaggatgaggaggaggccgtgcatgagcagtgccagcacgagcgggaccggcagctgcaggcccaggatgaggagggcggcggccacgtgcctgagcggcccaagcaggagatgctgctgagcctgaagcccagcgaggcccctgagctggatgaagatgagggctttggagactggagccagaggcctgagcagaggcagcagcacgagggcgcccagggcgccctggacagcggggagcccccccagtgccgcagccctgagggggagcaggaggaccggcccggcctgcacgcctatgagaaggaggacagtgatgaggtgcacctggaggagctgagcctgagcaaggagggccctggccctgaggacacagtgcaggacaacctgggcgccgccggggctgaggaggagcaggaggagcaccagaagtgccagcagcccaggacccccagccccctggtgctggagggcaccatcgagcagagcagcccccccctgagccccaccaccaagctgattgacagaacagagagcctgaacagaagcattgagaagagcaacagcgtgaagaagagccagcctgacctgcccatcagcaagattgaccagtggctggagcagtacacccaggccatcgagacagctggccgcacccccaagctggcccggcaggccagcattgagctgcccagcatggctgtggccagcaccaagagccgctgggagactggagaggtgcaggcccagagcgctgccaagacccccagctgcaaggacatcgtggccggggacatgagcaagaagagcctgtgggagcagaagggcggcagcaagaccagcagcaccatcaagagcacccccagcggcaagcgctacaagtttgtggccactggacatggcaagtatgagaaggtgctggtggagggcggccctgccccctag

SEQ ID NO: 127593 - DNA, 1699 bp, Artificial Sequence
  derived and/or modified sequence
acaccctgacccaagccgagacaggttccaaacctcaacctgcagccggaagggggaagtgaaactcggctgggggtgggggctcagaagccgccccagaaagcactgaaagccacagcacgtacacccactccagggatctgccagcaccctgtggggcccagactacaggctgatggcggaggcttcgagtgacccgggtgccgaggagcgggaagagttgctggggcccactgctcagtggagcgtggaggacgaggaggaggccgtccacgagcaatgccagcatgagagagacaggcagcttcaggcccaggacgaggagggaggcggccatgtccccgagcggccgaagcaggagatgctcctcagcctgaagccctcggaggcccctgaactggatgaggacgagggctttggcgactggtcccagaggccagagcagcggcagcagcacgagggggcgcagggcgccttggacagcggagagcccccccagtgcaggagtcctgagggggagcaagaggacaggcccggcctgcatgcctacgaaaaggaggacagtgatgaagtccacctggaggagttgagtctgagcaaggaggggccaggcccagaggacactgtccaggacaacctgggggccgcaggggctgaggaggaacaggaggagcaccagaaatgtcagcagcccaggacacccagccccttggtcttggaggggaccatcgaacagagctcgcctcccctgagccctaccaccaaactcatcgacaggaccgagtccctaaaccgctccatagagaagagtaacagtgtgaagaaatcccagccagacttgcccatctccaagattgatcagtggctggaacaatacacccaggccatcgagaccgctggccggacccccaagctagcccgccaggcctccatagagctgcccagcatggctgtggccagtaccaagagtcggtgggagacgggtgaggtacaggctcagtctgcggccaagactccgtcctgcaaggatattgtggctggagacatgagcaagaaaagcctctgggagcagaagggaggctccaagacctcatcaacaattaagagcaccccatctgggaagaggtataagtttgtggccaccgggcatgggaagtatgagaaggtgcttgtggaagggggcccggctccctaggcgtcccatctcgcttcctgggtctgcaggtccagccggctggcaccctccatgtacccaggggagattccagccagacacccgccccccggccctggctaagaagttgcttcctgttgccagcatgacctaccctcgcctctttgatgccatccgctgccacctccttttgctcctggaccctttagcctctctgcccttccactctctgaccaccgcccccgccctccccacccagctccgcttcttgttacttgggggaggaaagaaactcctgatcattggccaaagggacttacccctggagaggccaagtgccttctaggaagttaggaggttgaggcacagcctgtgcagagagggtgggtcacccccccagatccaaggagaaactgcaggtcaagggctgataacggccatgcaggatgcttgatgctgcgtcccccgctgcttgccgccccccaccccgccattttgtataataaagctccctgtgtattctca

SEQ ID NO: 127594 - DNA, 1785 bp, Artificial Sequence
  derived and/or modified sequence
gggctggaagtcggtcttcggacagagcccgtcctgcccagaagcccaggcgagccagcagcaggggtgcagggaccgagtggcccagccccctgggcagggtgtcagggccagagcccagaggacggcggttcaggcttcagtcccagccggcgaaccagagctgggcagagcggccagcaagcggcagccagggtgccctgggcactcgacccccagatgcccctgctggaaccgtaaaggggaggcaccctgaggccagagggagcatggccccggggactgagcatccggctcagagcggcttggcagaggcccactgctcagtggagcgtggaggacgaggaggaggccgtccacgagcaatgccagcatgagagagacaggcagcttcaggcccaggacgaggagggaggcggccatgtccccgagcggccgaagcaggagatgctcctcagcctgaagccctcggaggcccctgaactggatgaggacgagggctttggcgactggtcccagaggccagagcagcggcagcagcacgagggggcgcagggcgccttggacagcggagagcccccccagtgcaggagtcctgagggggagcaagaggacaggcccggcctgcatgcctacgaaaaggaggacagtgatgaagtccacctggaggagttgagtctgagcaaggaggggccaggcccagaggacactgtccaggacaacctgggggccgcaggggctgaggaggaacaggaggagcaccagaaatgtcagcagcccaggacacccagccccttggtcttggaggggaccatcgaacagagctcgcctcccctgagccctaccaccaaactcatcgacaggaccgagtccctaaaccgctccatagagaagagtaacagtgtgaagaaatcccagccagacttgcccatctccaagattgatcagtggctggaacaatacacccaggccatcgagaccgctggccggacccccaagctagcccgccaggcctccatagagctgcccagcatggctgtggccagtaccaagagtcggtgggagacgggtgaggtacaggctcagtctgcggccaagactccgtcctgcaaggatattgtggctggagacatgagcaagaaaagcctctgggagcagaagggaggctccaagacctcatcaacaattaagagcaccccatctgggaagaggtataagtttgtggccaccgggcatgggaagtatgagaaggtgcttgtggaagggggcccggctccctaggcgtcccatctcgcttcctgggtctgcaggtccagccggctggcaccctccatgtacccaggggagattccagccagacacccgccccccggccctggctaagaagttgcttcctgttgccagcatgacctaccctcgcctctttgatgccatccgctgccacctccttttgctcctggaccctttagcctctctgcccttccactctctgaccaccgcccccgccctccccacccagctccgcttcttgttacttgggggaggaaagaaactcctgatcattggccaaagggacttacccctggagaggccaagtgccttctaggaagttaggaggttgaggcacagcctgtgcagagagggtgggtcacccccccagatccaaggagaaactgcaggtcaagggctgataacggccatgcaggatgcttgatgctgcgtcccccgctgcttgccgccccccaccccgccattttgtataataaagctccctgtgtattctca

SEQ ID NO: 127595 - DNA, 2640 bp, Artificial Sequence
  derived and/or modified sequence
ataccccattttgcaaacaggaaagctgaggctcagggaggcaccaaagcttactcccatcctggggcttggcagggggtgcccgcagcacccggggacatacaccggggagtctcctgggaaagaagtgccggcccaggggcagactcttttctgctctgccatgtcttccctgcacccccagggatgatgagtctgggaggggctggtcagccatgaaagcttcggggaggggccggtggccaggccgggcaccccagagctccacaggcagacatggtgtgggggtgtcaggaagagggcctggctgctgggtgctacggtaggaagatcccggtgctgtgggagtggagcaggtggttgaatgccaggctggcttggtccttctctctgggtgccggctgtggctcccgcccaggtgggcaccacgtctgaataatgtatgaagcctctggttgcgtggaggatgggagcgcttcgggcagcatctgtgggcagagacttcagggatgtgaggtacatctgggcatggctagctgggaaggaaagaggatggcagagcctcgagccgttgccagggactggttgcgtgtcccagaacgtgccaaaagcctgcctcgtgagcacggcaagagctctgccagggcagtcccagctggcccaggcgccgcagcgctcccgagggccgtcgagcaaaggcgggaggcgcagccgggctgtcggtggacctgtaggtatcagggctccttggtcccctcctgcgggaagcaggcaccgagtggggctgcatgtagacgcatgcgagggtgagagctgcggcggaggacgctgatcgcggagtgcaggcgagggccccagaaaggtcccgcaggtcgcctcgctcgtggcacgggctcggcagcgttgtggttagtgacacggaggaagacagaaagccatatgcacagcacgcagaacaggaggaggggggaagaaagagcaggcacggggcaggcagagccgcagccacgccgccgggatgcagcaggcagggccacccacgagcagggcggggccctaacctccgacccaggctggtcgccgcagatgggggcagagatgtgaaacagctgcagagcgggacaagggtgctgccggcacagggctgaccacagagcacatcaaaagaggcccactgctcagtggagcgtggaggacgaggaggaggccgtccacgagcaatgccagcatgagagagacaggcagcttcaggcccaggacgaggagggaggcggccatgtccccgagcggccgaagcaggagatgctcctcagcctgaagccctcggaggcccctgaactggatgaggacgagggctttggcgactggtcccagaggccagagcagcggcagcagcacgagggggcgcagggcgccttggacagcggagagcccccccagtgcaggagtcctgagggggagcaagaggacaggcccggcctgcatgcctacgaaaaggaggacagtgatgaagtccacctggaggagttgagtctgagcaaggaggggccaggcccagaggacactgtccaggacaacctgggggccgcaggggctgaggaggaacaggaggagcaccagaaatgtcagcagcccaggacacccagccccttggtcttggaggggaccatcgaacagagctcgcctcccctgagccctaccaccaaactcatcgacaggaccgagtccctaaaccgctccatagagaagagtaacagtgtgaagaaatcccagccagacttgcccatctccaagattgatcagtggctggaacaatacacccaggccatcgagaccgctggccggacccccaagctagcccgccaggcctccatagagctgcccagcatggctgtggccagtaccaagagtcggtgggagacgggtgaggtacaggctcagtctgcggccaagactccgtcctgcaaggatattgtggctggagacatgagcaagaaaagcctctgggagcagaagggaggctccaagacctcatcaacaattaagagcaccccatctgggaagaggtataagtttgtggccaccgggcatgggaagtatgagaaggtgcttgtggaagggggcccggctccctaggcgtcccatctcgcttcctgggtctgcaggtccagccggctggcaccctccatgtacccaggggagattccagccagacacccgccccccggccctggctaagaagttgcttcctgttgccagcatgacctaccctcgcctctttgatgccatccgctgccacctccttttgctcctggaccctttagcctctctgcccttccactctctgaccaccgcccccgccctccccacccagctccgcttcttgttacttgggggaggaaagaaactcctgatcattggccaaagggacttacccctggagaggccaagtgccttctaggaagttaggaggttgaggcacagcctgtgcagagagggtgggtcacccccccagatccaaggagaaactgcaggtcaagggctgataacggccatgcaggatgcttgatgctgcgtcccccgctgcttgccgccccccaccccgccattttgtataataaagctccctgtgtattctca

SEQ ID NO: 127596 - DNA, 887 bp, Artificial Sequence
  derived and/or modified sequence
agggcagtcccagctggcccaggcgccgcagcgctcccgagggccgtcgagcaaaggcgggaggcgcagccgggctgtcggtggacctgcccactgctcagtggagcgtggaggacgaggaggaggccgtccacgagcaatgccagcatgagagagacaggcagcttcaggcccaggacgaggagggaggcggccatgtccccgagcggccgaagcaggagatgctcctcagcctgaagccctcggaggcccctgaactggatgaggacgagggctttggcgactggtcccagaggccagagcagcggcagcagcacgagggggcgcagggcgccttggacagcggagagcccccccagtgcaggagtcctgagggggagcaagaggacaggcccggcctgcatgcctacgaaaaggaggacagtgatgaagtccacctggaggagttgagtctgagcaaggaggggccaggcccagaggacactgtccaggacaacctgggggccgcaggggctgaggaggaacaggaggagcaccagaaatgtcagcagcccaggacacccagccccttggtcttggaggggaccatcgaacagagctcgcctcccctgagccctaccaccaaactcatcgacaggaccgagtccctaaaccgctccatagagaagagtaacagtgtgaagaaatcccagccagacttgcccatctccaagattgatcagtggctggaacaatacacccaggccatcgagaccgctggccggacccccaagctagcccgccaggcctccatagagctgcccagcatggctgtggccagtaccaagagtcggtgggagacgggtgaggtacaggctcagtctgcggccaagactccgtcctgcaag

SEQ ID NO: 127597 - DNA, 968 bp, Artificial Sequence
  derived and/or modified sequence
gagcctcctcactccccaggaccccagagaggacggaccctctccagccgccctctgggctcaggacagccgggtggggcagccacaggagctgcctgcagggggcagagtcgggacggggaccgagccggacacccattctgcaagtgtctgcagggggaggacggaggcccactgctcagtggagcgtggaggacgaggaggaggccgtccacgagcaatgccagcatgagagagacaggcagcttcaggcccaggacgaggagggaggcggccatgtccccgagcggccgaagcaggagatgctcctcagcctgaagccctcggaggcccctgaactggatgaggacgagggctttggcgactggtcccagaggccagagcagcggcagcagcacgagggggcgcagggcgccttggacagcggagagcccccccagtgcaggagtcctgagggggagcaagaggacaggcccggcctgcatgcctacgaaaaggaggacagtgatgaagtccacctggaggagttgagtctgagcaaggaggggccaggcccagaggacactgtccaggacaacctgggggccgcaggggctgaggaggaacaggaggagcaccagaaatgtcagcagcccaggacacccagccccttggtcttggaggggaccatcgaacagagctcgcctcccctgagccctaccaccaaactcatcgacaggaccgagtccctaaaccgctccatagagaagagtaacagtgtgaagaaatcccagccagacttgcccatctccaagattgatcagtggctggaacaatacacccaggccatcgagaccgctggccggacccccaagctagcccgccaggcctccatagagctgcccagcatggctgtggccagtaccaagagtcggtgggagacgggtgaggtacaggctcagtctgcggccaagactccgtcctgcaag

SEQ ID NO: 127598 - DNA, 574 bp, Artificial Sequence
  derived and/or modified sequence
gagacggggaaggaggggacgggacaaagaggaaccagcgaagggtccaggcctgcgatgatggcccactgctcagtggagcgtggaggacgaggaggaggccgtccacgagcaatgccagcatgagagagacaggcagcttcaggcccaggacgaggagggaggcggccatgtccccgagcggccgaagcaggagatgctcctcagcctgaagccctcggaggcccctgaactggatgaggacgagggctttggcgactggtcccagaggccagagcagcggcagcagcacgagggggcgcagggcgccttggacagcggagagcccccccagtgcaggagtcctgagggggagcaagaggacaggcccggcctgcatgcctacgaaaaggaggacagtgatgaagtccacctggaggagttgagtctgagcaaggaggggccaggcccagaggacactgtccaggacaacctgggggccgcaggggctgaggaggaacaggaggagcaccagaaatgtcagcagcccaggacacccagccccttggtcttggaggggaccatcgaacagagc

SEQ ID NO: 127599 - DNA, 1020 bp, Artificial Sequence
  derived and/or modified sequence
atggccgaggccagcagcgaccccggcgccgaggagcgggaggagcttttagggcctacagcccaatggtccgtggaggacgaagaagaggcggttcatgagcagtgtcagcatgagagagacagacaactccaggcccaagacgaggaaggcggaggccatgttcctgaacgtccaaagcaagagatgcttctgagcctcaagccttcggaagcgccagagcttgatgaggatgaaggctttggggattggtctcagagaccggaacagcgccagcagcatgagggggcccagggagcactggatagcggtgaacccccccagtgtcggagcccggaaggtgaacaggaggaccgtccaggattgcacgcatatgaaaaggaggattcagacgaagttcatctagaagagctctctttatcaaaagaaggccctgggccagaagacactgtccaggataacctgggcgcggctggcgccgaagaagaacaagaagaacaccagaagtgccagcagccacgaacaccctcccctttggtcttggaggggactattgagcagagtagtccacccctttccccaacgacgaaattaatcgacaggacggaaagcctgaaccgcagcatcgagaagtctaacagtgtgaagaaaagccagcccgacttgcctatctccaaaatagaccagtggcttgagcagtacacccaagcgatagaaaccgctggtcgcactcctaaattggccagacaggcctctatcgaattgcctagcatggctgttgcctcgacgaaatctcgatgggaaacaggtgaggttcaggcacagtccgccgccaaaaccccctcctgcaaggacatagtcgccggtgatatgtcaaaaaaaagcctgtgggaacagaagggaggatcgaagacatctagtaccatcaagtcaactccgtcgggcaaacgatataaattcgtcgctactggtcacggaaagtacgagaaagtgcttgtcgaaggcggccctgcaccttag

SEQ ID NO: 127600 - DNA, 1020 bp, Artificial Sequence
  derived and/or modified sequence
atggcagaggcaagctccgatcccggagcggaagaacgggaagagctgctgggtcccactgcccagtggagcgtggaggacgaggaggaggccgtgcatgaacagtgtcagcacgagcgagatcgacagttacaggcacaggatgaggagggcggaggtcacgtgccggagcgcccaaagcaagagatgctcttgtcactgaagccctctgaggcccctgagctcgacgaggatgagggctttggggactggagtcagaggcccgagcagaggcagcaacatgagggagcccagggtgccttggattctggcgaaccgcctcagtgtcggagccccgagggcgagcaggaggatcgtcctggcctccacgcctacgagaaagaggactctgacgaggtgcacctggaggaactgtccctgtcgaaggaaggaccaggtcctgaagacaccgtacaggacaacctgggtgccgcaggggctgaagaggaacaagaggaacatcagaagtgccaacaaccgcgaactccctcccctctcgtcctggaaggaacaattgagcagagtagcccccctctatctccaaccacaaagctcattgacagaacggaaagcctgaataggagcatcgagaaaagcaatagcgtgaaaaaaagccagccagacttgccaatctccaaaattgatcagtggctcgagcaatacacccaggctatagagactgcaggacggaccccaaagctcgcaaggcaagcctccattgaactcccttccatggctgttgccagcaccaagagccgctgggaaaccggggaagttcaagcacaatctgctgcaaaaacacccagttgtaaggacattgtagcaggcgatatgagcaagaaatcactgtgggagcaaaagggaggttccaaaacatcgtcaacgatcaagtcaaccccctccggcaaacggtataagtttgtggccacagggcacggcaagtacgaaaaggtgcttgtggagggtgggcctgctccctag

SEQ ID NO: 127601 - DNA, 1020 bp, Artificial Sequence
  derived and/or modified sequence
atggccgaggccagcagcgaccccggcgccgaggagagagaggagctgctgggccccaccgcccagtggagcgtggaggacgaggaggaggccgtgcacgagcagtgccagcacgagagagacagacagctgcaggcccaggacgaggagggcggcggccacgtgcccgagagacccaagcaggagatgctgctgagcctgaagcccagcgaggcccccgagctggacgaggacgagggcttcggcgactggagccagagacccgagcagagacagcagcacgagggcgcccagggcgccctggacagcggcgagcccccccagtgcagaagccccgagggcgagcaggaggacagacccggcctgcacgcctacgagaaggaggacagcgacgaggtgcacctggaggagctgagcctgagcaaggagggccccggccccgaggacaccgtgcaggacaacctgggcgccgccggcgccgaggaggagcaggaggagcaccagaagtgccagcagcccagaacccccagccccctggtgctggagggcaccatcgagcagagcagcccccccctgagccccaccaccaagctgatcgacagaaccgagagcctgaacagaagcatcgagaagagcaacagcgtgaagaagagccagcccgacctgcccatcagcaagatcgaccagtggctggagcagtacacccaggccatcgagaccgccggcagaacccccaagctggccagacaggccagcatcgagctgcccagcatggccgtggccagcaccaagagcagatgggagaccggcgaggtgcaggcccagagcgccgccaagacccccagctgcaaggacatcgtggccggcgacatgagcaagaagagcctgtgggagcagaagggcggcagcaagaccagcagcaccatcaagagcacccccagcggcaagagatacaagttcgtggccaccggccacggcaagtacgagaaggtgctggtggagggcggccccgccccctag

SEQ ID NO: 127602 - protein, 244 aa, Artificial Sequence
  derived and/or modified sequence
MGALGLEGRGGRLQGRGSLLLAVAGATSLVTLLLAVPITVLAVLALVPQDQGGLVTETADPGAQAQQGLGFQKLPEEEPETDLSPGLPAAHLIGAPLKGQGLGWETTKEQAFLTSGTQFSDAEGLALPQDGLYYLYCLVGYRGRAPPGGGDPQGRSVTLRSSLYRAGGAYGPGTPELLLEGAETVTPVLDPARRQGYGPLWYTSVGFGGLVQLRRGERVYVNISHPDMVDFARGKTFFGAVMVG

SEQ ID NO: 127603 - DNA, 735 bp, Artificial Sequence
  derived and/or modified sequence
atgggtgcccttggcctggagggtcgcgggggccgacttcagggacgcgggtctctgctgcttgccgtggccggggccacttctctggtcacacttcttctcgcggtcccgatcactgttctggctgtcttagcactggtgcctcaggaccagggaggattggtgactgaaaccgcagaccctggggcccaggcccaacaggggcttgggtttcaaaagctccctgaggaggagcccgagaccgacctgagtcccggcttgccggccgcccacttgatcggcgcacctctgaaaggccagggtctggggtgggagacaaccaaggagcaagccttcctgacctctggaactcaattcagcgacgcggagggcctggctttgccacaggacggtctctactacttgtattgtctggtggggtaccgaggacgggccccacccgggggcggtgacccccagggccgcagtgttactttaagaagtagcttatatcgtgctggcggagcgtacgggcctggaacaccagagctactgctggaaggggccgaaacagtgactcccgtgctggatccggccagaagacagggttacggccccctgtggtacacatccgtaggtttcggggggcttgtgcagttgcgcaggggggagcgcgtttacgtgaacatctcacatccagatatggtcgacttcgcgagaggcaaaacatttttcggtgctgtgatggtgggatag

SEQ ID NO: 127604 - DNA, 735 bp, Artificial Sequence
  derived and/or modified sequence
atgggagccttgggcttagaaggacgcgggggacgcctgcaaggccgaggctcactactcttggccgtggccggagccacatcgcttgtgaccctgctcctcgccgtgccaatcaccgtcctggccgtgctggctttagtgccccaggaccaaggcggccttgtgaccgagactgccgatccaggcgctcaggcgcagcaaggtcttggcttccagaaattgcctgaggaagaacccgaaaccgatctctctcccggtcttcccgcagcccacttaatcggcgctccccttaagggacaaggccttggatgggagaccactaaggagcaggcttttttaacatctggtacccagttctctgatgccgaggggctggccctgccccaggatggcctctattacctgtattgcttggtggggtatcggggcagggcccctcctggcgggggggatccgcagggccgctcggtcactctaagatcgtcattataccgcgccgggggcgcctacggccccggtacccccgagctgttgttggagggtgccgaaacagtcactccagtgctagacccagctagaaggcagggatacggccctttatggtacacctcggttggttttggaggcctggtccaactccgacgaggcgagcgcgtgtatgttaatattagtcacccagatatggtggatttcgccagaggcaagacatttttcggcgccgtgatggtagggtag

SEQ ID NO: 127605 - DNA, 735 bp, Artificial Sequence
  derived and/or modified sequence
atgggcgcacttggcctggaggggagaggcgggcggttgcagggcagaggatcactcctgctggccgtggccggtgcaacgtctctggtgacgttgctgctggccgtccctattacagtactggcagtcctcgccctcgtgccacaggatcaggggggactcgttacggaaacagctgatccaggcgcccaggctcagcagggcctggggtttcagaagctgccagaggaggagccagagacggatctgtcacccggtctcccagccgctcacctaatcggtgcccctttaaagggccagggcctaggttgggagactaccaaggaacaggcctttttgacaagcggcactcaatttagtgatgctgagggtttggcactgccccaggatggcctgtactatctctactgcctcgtggggtatagaggacgagcgcctccaggcggaggcgatcctcagggacggtcagtcacattgaggagctccttgtatagagccggaggagcgtacggtccgggcacaccagagctcctgctcgaaggcgctgaaactgtaacgcctgtgcttgaccccgctaggagacagggatacgggccgctctggtacacaagcgttggcttcggaggactagtgcagctgaggcggggagaacgggtctatgtgaatatatctcaccctgacatggtggattttgctaggggaaagacctttttcggcgcagtgatggtgggctag

SEQ ID NO: 127606 - DNA, 735 bp, Artificial Sequence
  derived and/or modified sequence
atgggggcccttggcctcgaggggcgggggggacggctgcagggaaggggctccctgcttctggccgttgccggggcgacctcccttgttacactgcttctggcggtgcccatcactgttctggccgtgctggcccttgtgccacaggatcagggcggcttggtgaccgaaacggccgacccaggtgcccaggcacagcaaggcttaggattccagaagcttcccgaggaagagcccgaaacggatctgtcacctgggctgcctgcagctcacctcatcggagccccactcaaagggcagggcctgggatgggaaaccacaaaggaacaggctttccttacgtcaggcactcaattttccgatgcagagggactcgccctgcctcaggacggtctatattatctttactgccttgtgggctatcgaggtagagctccacctggcgggggagaccctcaggggcggagcgtcacactccgaagtagtctttaccgcgcggggggagcgtacgggcctggaacaccagagttgctcttggaaggcgctgaaacagtgaccccagtgctcgatcctgcgcgtcgccagggttatggacccttatggtatacgagcgtgggattcggcggacttgttcagttgcgtaggggtgagcgggtgtacgtcaatatctcccatcctgatatggttgattttgcccgaggtaagactttttttggcgctgtgatggtaggatag

SEQ ID NO: 127607 - DNA, 735 bp, Artificial Sequence
  derived and/or modified sequence
atgggtgccctgggcttggagggtaggggaggaagactccagggacggggtagcttgctgctagcggttgcaggagcaacatctctggttaccctgctgctagcagttccaattactgtcctagcagtccttgccctggtgcctcaggatcagggagggctagtgaccgagaccgctgatccaggagcgcaagcgcagcagggcctcggcttccaaaagctgccggaggaggagcctgagaccgatttaagcccaggactaccagccgctcatcttatcggagctcctctgaaaggccagggtctgggatgggagacaactaaggaacaggcgtttctgacatccggaacacagtttagcgacgccgaaggattagccttgccccaggacggactgtactatctttattgcctagtcggctataggggccgtgctccccctgggggaggggatccacaggggcggtccgtgaccctcaggtccagcttatatcgagccggcggtgcctacggacccgggacccctgaattactgttggaaggcgcagagacagtcacccccgtcctagaccccgcacgccgccagggatatggacccctgtggtataccagcgtcggcttcggagggctggtgcagctaagacggggagagagggtttacgtcaacatttcccatccagatatggtcgactttgccagaggaaaaacattcttcggcgccgtgatggttggctag

SEQ ID NO: 127608 - DNA, 735 bp, Artificial Sequence
  derived and/or modified sequence
atgggggccttaggccttgaggggcggggaggccgcctgcagggccgcgggtcactcctgttggcagtggccggcgcaacctctctggttactctcctcttggctgtccctatcaccgttctcgctgtgctggctctcgtgccccaagatcagggcggactcgttacggagacggcggaccctggtgcccaagctcagcagggcctcgggttccagaagttacctgaggaggagcctgaaaccgacctaagcccaggcctgcccgccgcacacctgatcggcgccccactgaaagggcaggggttggggtgggaaaccacgaaggagcaggcgttcctcacatctggcacccagttcagcgacgctgaaggactagcgttacctcaggatgggctctattatctctattgcttggtcgggtataggggtcgggcaccgcccggcggtggcgaccctcaaggcaggagtgtaacactccgctcctccctctatcgcgctggcggggcatacgggccaggaactcccgagttactgttggaaggcgccgaaacagtcacgcccgttctggacccggcccgccggcagggctatgggcccctgtggtatacatctgtcggatttggcgggctcgtgcagcttcggcgcggagaaagggtctacgtcaacatttcgcaccctgacatggtggatttcgctcgggggaaaaccttttttggggctgtcatggtcggctag

SEQ ID NO: 127609 - DNA, 735 bp, Artificial Sequence
  derived and/or modified sequence
atgggagcactcgggttagagggtcgagggggccgactgcaaggcaggggctctcttctccttgctgtagccggcgccacatccttagtcacgttgttgctggctgtgcccattactgtactggccgtgctggctcttgtgccgcaggaccagggagggctggtcaccgagactgccgacccaggcgcccaggcccagcaggggctcggttttcagaagctgcctgaagaagaaccggagacggaccttagtccaggcctgccggctgctcatctcatcggtgcccccctgaaaggccagggtctgggatgggagacaaccaaagagcaagcctttctgacctcaggcacccagttttccgacgccgaggggcttgcgctcccacaggacggtttgtactacttatattgtctagtggggtaccgcgggagggcgccccctggcggtggagacccccagggccgcagcgtcaccctcagaagcagtctttacagggccggcggtgcgtatggacctggaacccccgagctgctcctggaaggagccgagacagttaccccagtgctggatcctgcacgtaggcagggctatggtcccctctggtacacgagcgtcgggttcgggggcctggtgcagctgcggcggggggagcgggtgtacgtcaacataagccatccagatatggtggactttgccagaggtaaaaccttcttcggtgcagtgatggtcggctag

SEQ ID NO: 127610 - DNA, 735 bp, Artificial Sequence
  derived and/or modified sequence
atgggcgccttaggcttagaaggtcgcggcggcagacttcagggtaggggctccctgctgctggctgttgccggagcaacgtctctagtgacactactgctcgctgtgccaataacagttctggccgtgctcgcactagtacctcaggatcagggcggtctcgtgacagaaacggctgatccaggggcccaggcccagcagggcctgggcttccagaagcttcccgaggaagagccagagactgatctgtcgcccggcctcccagccgctcatcttattggcgcgccactcaagggccagggattgggatgggagaccacaaaagagcaggccttcctgaccagcggcacccagttttccgatgcagaaggcctcgccctccctcaggacggtctctactacttatactgtctggtgggctacagggggagggcaccccccggcggcggggatccccaggggcgcagtgtcacactgcgcagctctctgtacagagctggtggtgcctacgggccaggaactcctgaactgctgctcgagggcgccgaaacagtgacccctgtccttgacccggctcgaaggcagggctacggtccgctgtggtacacatctgttggttttgggggcctggtgcagctgaggaggggagaacgcgtttacgtgaacattagtcaccccgacatggtggatttcgctagaggaaagaccttcttcggcgcggtgatggtgggttag

SEQ ID NO: 127611 - DNA, 735 bp, Artificial Sequence
  derived and/or modified sequence
atgggcgccctgggcctggagggccggggcggccgcctgcagggccggggcagcctgctgctggccgtggccggggccaccagcctggtgaccctgctgctggccgtgcccatcaccgtgctggccgtgctggccctggtgccccaggaccagggcggcctggtgacagaaacagctgaccccggggcccaggcccagcagggcctgggcttccagaagctgcctgaggaggagcctgagacagacctgagccctggcctgcctgctgcccacctgattggagcccccctgaagggccagggcctgggctgggagaccaccaaggagcaggccttcctgaccagcggcacccagttcagtgatgctgagggcctggccctgccccaggacggcctgtactacctgtactgcctggtgggctaccggggccgggcccctcctgggggcggggacccccagggccgctctgtgaccctgcggagcagcctgtaccgggccggcggggcctacggccctggcaccccagagctgctgctggagggcgctgagaccgtgacccctgtgctggaccctgcccggcggcagggctacggccccctgtggtacacctctgtgggctttggaggcctggtgcagctgcggcggggggagcgggtgtatgtgaacatcagccacccagacatggtggactttgcccggggcaagaccttcttcggggctgtgatggtgggctag

SEQ ID NO: 127612 - DNA, 897 bp, Artificial Sequence
  derived and/or modified sequence
cagtctcaatgggggcactggggctggagggcaggggtgggaggctccaggggaggggttccctcctgctagctgtggcaggagccacttctctggtgaccttgttgctggcggtgcctatcactgtcctggctgtgctggccttagtgccccaggatcagggaggactggtaacggagacggccgaccccggggcacaggcccagcaaggactggggtttcagaagctgccagaggaggagccagaaacagatctcagccccgggctcccagctgcccacctcataggcgctccgctgaaggggcaggggctaggctgggagacgacgaaggaacaggcgtttctgacgagcgggacgcagttctcggacgccgaggggctggcgctcccgcaggacggcctctattacctctactgtctcgtcggctaccggggccgggcgccccctggcggcggggacccccagggccgctcggtcacgctgcgcagctctctgtaccgggcggggggcgcctacgggccgggcactcccgagctgctgctcgagggcgccgagacggtgactccagtgctggacccggccaggagacaagggtacgggcctctctggtacacgagcgtggggttcggcggcctggtgcagctccggaggggcgagagggtgtacgtcaacatcagtcaccccgatatggtggacttcgcgagagggaagaccttctttggggccgtgatggtggggtgagggaatatgagtgcgtggtgcgagtgcgtgaatattgggggcccggacgcccaggaccccatggcagtgggaaaaatgtaggagactgtttggaaattgattttgaacctgatgaaaataaagaatggaaagcttcagtgctgccgataaagat

SEQ ID NO: 127613 - DNA, 853 bp, Artificial Sequence
  derived and/or modified sequence
ttcagtctcaatgggggcactggggctggagggcaggggtgggaggctccaggggaggggttccctcctgctagctgtggcaggagccacttctctggtgaccttgttgctggcggtgcctatcactgtcctggctgtgctggccttagtgccccaggatcagggaggactgggtttcagaagctgccagaggaggagccagaaacagatctcagccccgggctcccagctgcccacctcataggcgctccgctgaaggggcaggggctaggctgggagacgacgaaggaacaggcgtttctgacgagcgggacgcagttctcggacgccgaggggctggcgctcccgcaggacggcctctattacctctactgtctcgtcggctaccggggccgggcgccccctggcggcggggacccccagggccgctcggtcacgctgcgcagctctctgtaccgggcggggggcgcctacgggccgggcactcccgagctgctgctcgagggcgccgagacggtgactccagtgctggacccggccaggagacaagggtacgggcctctctggtacacgagcgtggggttcggcggcctggtgcagctccggaggggcgagagggtgtacgtcaacatcagtcaccccgatatggtggacttcgcgagagggaagaccttctttggggccgtgatggtggggtgagggaatatgagtgcgtggtgcgagtgcgtgaatattgggggcccggacgcccaggaccccatggcagtgggaaaaatgtaggagactgtttggaaattgattttgaacctgatgaaaataaagaatggaaagcttcagtgctgccgataaagat

SEQ ID NO: 127614 - DNA, 735 bp, Artificial Sequence
  derived and/or modified sequence
atgggcgccctgggcctggagggccggggcggccggctgcagggccgcggctcccttctactggccgtggctggagccacatcactggtgactctcctactagctgtcccaataactgttctggctgtgctcgccttagtccctcaggatcaggggggcctagttactgaaactgccgacccaggcgcccaagcccagcagggccttggcttccaaaagctgcctgaagaagaaccagagactgacctgagccctgggctgccagcagctcatctgataggtgccccgctcaagggtcagggactgggctgggagaccaccaaagaacaagctttcctgactagcggcacacagttttctgacgctgaagggctagcactgccgcaggacggcttgtattatctgtattgcttagttggctaccgcggaagggcaccgccgggtgggggagacccacagggacggtccgtgacattgcgcagcagtctctatagagccggcggggcctatggacctgggactcccgaacttcttttagagggggctgaaaccgtgacacctgtgcttgaccctgcaagacggcagggctatgggccactatggtacacatctgtggggtttggtggcctggtccagctccgacggggggagcgggtctacgtgaacatatcccaccctgacatggtggatttcgctcgtggtaagacgtttttcggggccgtgatggtgggttag

SEQ ID NO: 127615 - DNA, 735 bp, Artificial Sequence
  derived and/or modified sequence
atgggcgccctgggcctggagggccggggcggccggctgcagggcaggggcagcctgctgctggccgtcgccggagcaacctccctggtaacgctcttgctggccgtacccatcactgtgctggcggtgttagcgctggtgccacaggaccagggtgggctcgtgaccgagacagcggatcctggcgctcaggctcagcagggcctgggcttccagaaacttccagaggaggaacctgagacagacctgagccccggtctgcccgctgcacatctgataggcgccccactgaaagggcagggactgggttgggagaccacaaaagagcaggctttcctcacctccgggacacagttctccgacgcagaggggttagctcttcctcaagacggcctgtactatttatactgcctcgtcggctaccgcggcagggccccacccggtgggggcgatccgcaagggcgtagcgtgaccttaagatcaagtttgtatcgggccggcggcgcctacggacctgggacacccgagttgctactcgaaggcgccgagacagtcaccccagtgctggaccccgcccggagacaaggttacggcccattgtggtacacatctgtcggctttggtgggttagtccagctcagaaggggtgaacgggtttatgtcaacatctctcaccctgatatggtggattttgctcgcggtaagacattctttggagcggttatggtggggtag

SEQ ID NO: 127616 - DNA, 735 bp, Artificial Sequence
  derived and/or modified sequence
atgggcgccctgggcctggagggccggggcggccggctgcagggccgtggctctttactgctggcagtagctggcgcaacttccctcgtgacactcttgctggctgttccaatcaccgtgttagctgtgttggctctcgtccctcaggaccagggcggcctggtgacagaaaccgccgatcctggcgcacaggcacagcagggtcttggcttccagaagttgcctgaagaagagcccgaaactgatttgtcacctggcctccctgccgctcacctcatcggggctcccttgaaagggcaagggctgggctgggaaactactaaagagcaagcctttctcacctcaggtacacaattctcagacgctgagggcctggcccttccccaggatggtctttattacctgtactgcctagtgggttacagggggagagcccctccaggcggtggcgatccgcaaggcaggagcgttacccttcgctcttctctatacagggctggcggggcctatggaccaggcacgcccgagctgctccttgaaggagccgaaacagtgactcccgtgcttgatccagctcggaggcagggatatggccctctatggtacacctctgttggctttgggggtctagttcagctaaggcggggcgagagggtttacgtgaacatttcccatcctgatatggtagactttgccaggggaaagactttctttggagccgttatggtggggtag

SEQ ID NO: 127617 - DNA, 735 bp, Artificial Sequence
  derived and/or modified sequence
atgggcgccctgggcctggagggccggggcggccggctgcagggcagaggtagcctgttgctcgccgtagccggcgccacttcgctcgtgactttactcctagccgtcccaattactgtgctggctgtgctggcactggtccctcaggaccagggtgggcttgtgactgaaactgcagacccaggtgcccaagcacagcagggactgggatttcaaaaactgcctgaggaagagccggagaccgacctctcacccggcttaccagctgctcaccttatcggggccccactgaagggccaggggctgggttgggaaacaaccaaagaacaagcattcctgacaagcgggacacaatttagtgacgccgaaggcctggcgctgccgcaggatggcctgtactatttatattgtctggtgggttaccgcggccgtgcaccacccggaggcggggatcctcaaggacggagtgtaacattgagatcgtctctctacagggccgggggcgcttacgggcctggaacccctgagcttcttctcgagggagctgaaaccgtgacacctgtgctcgatcccgcacggcggcagggatatggcccgctgtggtacacaagcgtgggattcggcggtttagtgcagctgcgccgtggcgagagggtgtatgtgaacatctcccatcctgacatggttgatttcgcccgcggcaagaccttcttcggcgccgtgatggtggggtag

SEQ ID NO: 127618 - DNA, 735 bp, Artificial Sequence
  derived and/or modified sequence
atgggcgccctgggcctggagggccggggcggccggctgcagggcagaggatccctcttgctcgcagttgccggggccacaagtctggtcaccttgctgctggcagtcccgattaccgtactcgccgtgctagcactggttccacaggaccagggaggcctagtgactgagactgccgatcccggagcacaggctcagcagggtttgggcttccaaaagctgccggaggaagagccagaaactgatctctctcctggtctcccagcagctcacttgatcggagctcctctcaaaggacaagggctgggctgggaaacaacaaaagagcaggcatttttgactagcggcacgcagttctctgacgcagagggactcgcccttcctcaagatgggctgtattacctctactgcctcgtcggataccgtggacgggccccgcccggtggaggtgatcctcagggaagaagcgtcacactaagaagcagcctctacagggctggaggcgcctacgggcctggaactcccgaactcctcctggagggagccgaaaccgtgacacctgtgctggatcccgctcggagacaaggttatgggccactgtggtacacgagtgttgggttcggcgggttggtgcagcttagacgaggggaaagagtgtacgtaaacattagccaccctgatatggtcgattttgcacgtggaaaaacattcttcggagcggttatggtgggctag

SEQ ID NO: 127619 - DNA, 735 bp, Artificial Sequence
  derived and/or modified sequence
atgggcgccctgggcctggagggccggggcggccggctgcagggcagaggttcattattgttagccgtggccggagccacgagtctggttactcttctgctggccgtccctatcaccgtgttagccgtgcttgccctggtgcctcaagatcagggtgggttggtcaccgagacagcggacccaggcgcccaggcacagcaggggttgggttttcagaaactccctgaagaggagcctgaaaccgatctgtccccagggcttccagccgcccatctcataggagcccccctgaaaggccaaggcttagggtgggaaaccacaaaggagcaggctttccttacgtcaggaactcagttttctgatgctgaggggctggccttaccccaggatgggttgtactatctatattgtcttgtaggctaccggggcagggctcctccaggtggtggggatcctcaaggccgcagtgtaacactgcgaagtagtctataccgggccggcggagcctatgggcctggcacacccgagctgttgctggaaggcgctgagacggtcacacccgtgttggaccccgccagaaggcaggggtatggaccactatggtacacatccgtggggtttggaggactggtgcagctgcggaggggtgaacgggtatacgtgaacatcagccaccccgacatggtggacttcgctaggggcaagaccttcttcggtgccgttatggtgggatag

SEQ ID NO: 127620 - DNA, 735 bp, Artificial Sequence
  derived and/or modified sequence
atgggcgccctgggcctggagggccggggcggccggctgcagggccgaggttcactcctgctagccgtcgccggtgccaccagcctggtgaccctcttgctcgccgtgccaataaccgtgttagccgtgcttgcgctggtaccacaggatcaggggggactcgttaccgagacagctgaccccggcgcccaggcgcagcaggggcttggttttcagaagctgccagaggaagagcctgaaaccgacctgtccccaggcctcccagctgcccacctgattggggcacctctcaaagggcagggcctgggatgggagactacgaaagagcaggcattcctcacttccggaacccagtttagcgacgcggaagggttagctcttccgcaggacggattatattacctgtactgcctcgtcggctacagaggacgggctcctccgggaggcggcgatcctcagggtaggagtgttaccctgcgctcctccctatacagagcagggggagcatatggaccagggactcctgaactgctgcttgaaggcgccgaaacagtgacacctgtgttggatcctgcacgacggcaaggatacgggcctctctggtacacgtccgtgggattcggcggactggtacagcttagaaggggggaaagggtgtatgtaaatatctcccacccagatatggtcgatttcgccaggggcaagacgttctttggcgctgtcatggtggggtag

SEQ ID NO: 127621 - DNA, 735 bp, Artificial Sequence
  derived and/or modified sequence
atgggcgccctgggcctggagggccggggcggccggctgcagggcagggggtctctactgctagccgtggctggagcgacatccctcgtgacactcctcctggctgtgccaattacagtactggctgtgttggccctggttccccaggaccagggcgggctggtgacagagaccgcagaccccggcgcacaagcccagcagggactcggattccaaaaactccctgaggaggagcccgagacggacctttctccagggttaccggctgcccatctgataggtgcccccctcaaaggccaggggttgggctgggaaacaactaaagaacaggcattcctaacttccgggacacagttcagcgacgcggaaggcctagccctcccccaagacggactttactatctgtactgcctggttggctaccgcggccgggctcctccgggtggcggggacccccaaggccgaagcgtgacccttcgcagtagtctctacagagctggaggagcgtacggacccgggactccggagctgttgctggagggcgccgaaacggtcacgcccgtactggatcccgcccgccgccagggctatgggcccctgtggtacacctctgtgggtttcggcggtctcgttcagttacgcaggggcgaacgagtctacgtcaacatctctcatccggacatggtggactttgctaggggaaagactttctttggcgccgtcatggtaggctag

SEQ ID NO: 127622 - DNA, 735 bp, Artificial Sequence
  derived and/or modified sequence
atgggggcattggggttggaagggagaggtggcaggttacagggtcggggatctttgctcctcgccgtggctggcgctaccagcctggtaacactgctgctcgcagttcctattaccgtacttgcggtgctggctctagtgccccaagaccagggaggtcttgttacagaaacggcagatccgggtgctcaggcacagcagggcctcgggttccaaaagttacccgaagaagagcctgaaacggaccttagcccgggtctgccggcagcccaccttattggcgcaccccttaagggccagggacttggctgggaaacaaccaaggaacaggcatttttaacatccggcacacagttctcagacgctgaagggctggctttgccccaggacgggctgtactacttgtattgtcttgtgggatataggggtcgggcaccccctggcggaggagaccctcaggggaggtccgttacgctgaggtcaagtctctatagagccggaggcgcatacggacctggaacccccgagctgctcctagagggcgcagaaactgtgacccccgtgttggatcctgctcggagacaggggtacggaccactatggtatacatctgtgggtttcggtggtctcgtgcagctccgcaggggggagcgagtttacgtaaacatctcacatcctgacatggtggactttgccagaggcaaaacattcttcggggcagtgatggtcggctag

SEQ ID NO: 127623 - DNA, 735 bp, Artificial Sequence
  derived and/or modified sequence
atgggtgccctgggcctggaggggcgagggggaaggctgcagggacggggatccctcctcttggccgtagctggggctacaagcctagtgacattgctattagcagttcctattacagtcctggcagtcctcgcactggtcccacaagaccaggggggtcttgtgacagaaactgccgaccccggtgcacaggcccagcagggattaggattccagaaactgccagaggaagaaccagagacggacctgtctcccggtctgcccgctgctcacctgattggggctcccctaaaggggcagggcctgggatgggagaccacgaaagaacaggcctttcttacatctgggacacaattcagtgatgcagaggggctggccctaccccaggatggtctgtactacctttactgcctagtgggctatagaggccgtgctcctcccggtggcggtgacccacaaggtagatcagtcactcttcgatcctctctttatcgagcgggaggggcttatggcccaggcacacctgagttattgctggagggggcagagacggttacccccgtcctagaccctgctcggaggcagggctacggacccctctggtacactagcgtgggattcggtgggctggtacaattgaggagaggcgaacgggtgtacgtgaacatctcccacccagacatggtcgacttcgcaagaggcaagacgtttttcggcgcagtcatggtgggatag

SEQ ID NO: 127624 - DNA, 735 bp, Artificial Sequence
  derived and/or modified sequence
atgggggctttgggcctggaaggccgtggaggacggctgcagggcagagggtccttacttctggcagtggctggagccacaagcttagtgaccctgttactcgcggtacctatcaccgtgctggccgttctggcactcgtgccccaggatcaggggggactggtgacagaaactgcagatcctggtgcccaggcacagcagggattgggatttcaaaagctgcctgaagaagagccagaaacagatttgagcccgggattgcctgccgcacatctgattggagcacctttaaaagggcaagggcttggctgggaaaccactaaggagcaagcattcttgacgagcggcacacagttctccgatgctgaagggctggcgctacctcaagacggactttactatctgtattgtctggtgggctacaggggcagggccccacccggtggaggcgatccgcagggaagatctgtgaccttaaggtctagcttgtaccgagccggtggggcatacgggccaggaacacctgagctgctgctggagggtgcagagactgttactcctgttctggacccggcacgccgacaaggttatggcccactgtggtatacaagtgtgggctttgggggtctggtgcagctgcgaaggggagaaagggtatatgttaatatctcacaccctgacatggttgactttgccagaggaaaaaccttctttggcgctgtgatggtagggtag

SEQ ID NO: 127625 - DNA, 735 bp, Artificial Sequence
  derived and/or modified sequence
atgggagccctgggcctagaaggccgtgggggacgcctgcaggggaggggctctctcctgctggccgtggctggagcaaccagtctagtcaccctgctcctggccgtacccatcacagtactcgcagtcttggccttagttccacaggaccaggggggtttagtgacagaaacggcagaccctggcgcacaggctcagcaagggcttggttttcagaagcttcccgaggaagagcctgagaccgacctttctcccggtctgccggctgcccacctcattggagccccactgaagggccaaggacttgggtgggaaaccaccaaggaacaggcgtttctcacaagcgggacacagtttagcgacgccgaaggacttgcactgcctcaggatggactctattatctgtactgcctggtgggttacaggggcagggctccccctgggggtggcgatccacagggacgctccgtgaccctgagatcgtccctttacagggctggcggtgcatacggccctggcacccccgagcttctgctggaaggagccgagaccgtaacgcccgttctggatccggctagaaggcaaggatatggccctctatggtacacatccgttggctttggaggtctcgtccagctacggaggggcgagcgcgtgtacgttaacatctctcaccctgacatggtcgattttgccaggggcaaaacatttttcggggcagtgatggttgggtag

SEQ ID NO: 127626 - DNA, 735 bp, Artificial Sequence
  derived and/or modified sequence
atgggagcactgggcttggaggggagaggtggacgactgcagggaagaggaagccttctgctggcagttgccggagccacctccctcgtgactcttctgctggccgttcccataactgtcctggccgtactggctcttgtgccccaagatcagggcggtctggtgactgaaactgctgatccaggtgcccaggctcagcaaggcctcgggttccaaaagcttcccgaggaggagcctgaaacagatctgagccctggccttcctgcagcccatctgatcggtgcacccctcaaaggccaaggactggggtgggagacaaccaaggaacaggcctttttaacgagtggaacacagttctctgatgcggagggactagcactgccccaggatggcctgtactatctgtactgtctagttggctatcggggtcgggctccccctggcggaggggacccacagggacggagcgtcactctacgaagcagtctgtacagagccggtggggcttatggacctggtacacctgagttacttttggagggggctgagactgtgacccctgtgctcgaccctgccaggagacaggggtatggacctctttggtacacgagtgttggtttcgggggtttagtgcaactccgcaggggcgagcgagtctacgtcaatatatcccacccggacatggtggatttcgcccgaggcaagaccttttttggtgccgtgatggtgggttag

SEQ ID NO: 127627 - DNA, 735 bp, Artificial Sequence
  derived and/or modified sequence
atgggggcactcggactggagggtcgaggcggtagacttcagggcaggggcagtctgctgctggccgtggcgggagccaccagcctggtcacgttgctgctagccgtccctatcaccgtgctcgccgtgctggcactggtaccccaagatcagggtggactggtcactgagaccgcggatccgggagcccaggcacagcagggactcggcttccagaagctgccagaggaggagccagagacggacttgtccccgggactccccgctgcgcacctgattggagccccattaaaaggacagggcctgggctgggagacaacaaaggagcaggccttcctgaccagtggaacccagttctccgacgctgagggcctggccctgccccaggatggcctctactatctatactgtcttgttgggtaccggggacgggctccgccaggaggaggagatccccaagggcgtagcgttacacttcgcagtagcctctatagggccggtggcgcttacgggccagggacacccgaactattgttagaaggagccgaaaccgtgactccggtcctcgaccctgccagacgacaagggtacggacccctctggtatactagtgtcgggtttggaggcctcgtgcagttacgccgtggcgagagagtatacgtgaatatctcccacccagacatggtggactttgccaggggaaagacgttttttggggcagtgatggtgggttag

SEQ ID NO: 127628 - DNA, 735 bp, Artificial Sequence
  derived and/or modified sequence
atgggtgctctgggcctggaaggcagaggaggaaggctccagggcaggggcagtttactgctggctgtagccggtgcaacttccttggtgaccttgctgttggcggtccctattaccgtcctcgctgtgctggccctcgtcccccaggaccagggaggtcttgtaaccgaaaccgctgatcccggtgctcaggcccagcagggactaggatttcaaaaacttccagaagaggagccagagacagatctgagtcctggccttcccgcagcccacttgattggagccccactaaaaggtcagggcctggggtgggagacgacgaaagaacaggcctttttgacctccggaacacagtttagtgacgccgagggcctggctctacctcaggatggtctgtactatctgtactgtctcgtggggtatcgtgggagagcaccacccggagggggagaccctcaggggaggtccgttaccctgcgctcctccttgtatagggccggaggggcttacggtccaggtacgcccgagctcctacttgagggagccgagaccgtgacacctgttctggacccagcgcgaaggcaagggtatggtcctttatggtacacctccgtagggttcggaggcctggtccagctcaggcgcggtgaaagagtgtatgtaaacatctcacatccagatatggtggatttcgctcgtggaaagacgtttttcggtgccgttatggtgggttag

SEQ ID NO: 127629 - DNA, 735 bp, Artificial Sequence
  derived and/or modified sequence
atgggtgcactgggcctggaggggaggggtggcaggttacagggtagggggagcctgctgctagcagtggctggcgcaacgtccctcgtcaccctactgttggcagtccctatcactgtattggctgtgctggccctagtgccccaggatcagggaggcctcgtgacagagacggcagaccccggagcacaggcccagcaaggccttggttttcaaaagcttcctgaggaagagcctgaaactgatctatcacccggactgcccgctgcacatcttatcggcgcaccactgaagggacaggggctaggatgggaaaccaccaaggaacaagcctttttgacatcgggcacgcaatttagcgatgccgagggacttgcgctgccccaggatgggctgtactatctctactgtctagtggggtatagagggagggcacccccaggagggggagacccacagggcaggtctgtcactctgaggtctagtctctaccgggcaggtggcgcatatggtccgggaacccccgaactgctcctggaaggagcagagacggtgacaccagtgctggatccggcacggagacagggatatggcccactgtggtacactagcgtcggcttcggcggacttgtccagctgcgcagaggcgagagagtgtacgtcaacatcagccatcccgatatggtagattttgccaggggcaaaacattcttcggagcagtcatggtaggctag

SEQ ID NO: 127630 - DNA, 735 bp, Artificial Sequence
  derived and/or modified sequence
atgggcgccctgggcctggagggcagaggcggcagactgcagggcagaggcagcctgctgctggccgtggccggcgccaccagcctggtgaccctgctgctggccgtgcccatcaccgtgctggccgtgctggccctggtgccccaggaccagggcggcctggtgaccgagaccgccgaccccggcgcccaggcccagcagggcctgggcttccagaagctgcccgaggaggagcccgagaccgacctgagccccggcctgcccgccgcccacctgatcggcgcccccctgaagggccagggcctgggctgggagaccaccaaggagcaggccttcctgaccagcggcacccagttcagcgacgccgagggcctggccctgccccaggacggcctgtactacctgtactgcctggtgggctacagaggcagagccccccccggcggcggcgacccccagggcagaagcgtgaccctgagaagcagcctgtacagagccggcggcgcctacggccccggcacccccgagctgctgctggagggcgccgagaccgtgacccccgtgctggaccccgccagaagacagggctacggccccctgtggtacaccagcgtgggcttcggcggcctggtgcagctgagaagaggcgagagagtgtacgtgaacatcagccaccccgacatggtggacttcgccagaggcaagaccttcttcggcgccgtgatggtgggctag

SEQ ID NO: 127631 - protein, 435 aa, Artificial Sequence
  derived and/or modified sequence
MLLPWATSAPGLAWGPLVLGLFGLLAASQPQAVPPYASENQTCRDQEKEYYEPQHRICCSRCPPGTYVSAKCSRIRDTVCATCAENSYNEHWNYLTICQLCRPCDPVMGLEEIAPCTSKRKTQCRCQPGMFCAAWALECTHCELLSDCPPGTEAELKDEVGKGNNHCVPCKAGHFQNTSSPSARCQPHTRCENQGLVEAAPGTAQSDTTCKNPLEPLPPEMSGTMLMLAVLLPLAFFLLLATVFSCIWKSHPSLCRKLGSLLKRRPQGEGPNPVAGSWEPPKAHPYFPDLVQPLLPISGDVSPVSTGLPAAPVLEAGVPQQQSPLDLTREPQLEPGEQSQVAHGTNGIHVTGGSMTITGNIYIYNGPVLGGPPGPGDLPATPEPPYPIPEEGDPGPPGLSTPHQEDGKAWHLAETEHCGATPSNRGPRNQFITHD

SEQ ID NO: 127632 - DNA, 2260 bp, Artificial Sequence
  derived and/or modified sequence
gctttcccggccgcccctcccgccccgcatcgaggcagacaagcctgttcctcttccctgggctgcgattgcgacaggccggcctggctcccagcgctccctgtccccgccccgcggccagctcgctccactcccacttcctgagctccgccatgggagccctggaggcccggcctggccgctcccggccctggggtgcacatcggccctgagtcccgtcccaggctctgggctcgggcagccgccgccaccgctgcccaggacgtcgggcctcctgccttcctcccaggcccccacgttgctggccgcctggccgagtggccgccatgctcctgccttgggccacctctgcccccggcctggcctgggggcctctggtgctgggcctcttcgggctcctggcagcatcgcagccccaggcggtgcctccatatgcgtcggagaaccagacctgcagggaccaggaaaaggaatactatgagccccagcaccgcatctgctgctcccgctgcccgccaggcacctatgtctcagctaaatgtagccgcatccgggacacagtttgtgccacatgtgccgagaattcctacaacgagcactggaactacctgaccatctgccagctgtgccgcccctgtgacccagtgatgggcctcgaggagattgccccctgcacaagcaaacggaagacccagtgccgctgccagccgggaatgttctgtgctgcctgggccctcgagtgtacacactgcgagctactttctgactgcccgcctggcactgaagccgagctcaaagatgaagttgggaagggtaacaaccactgcgtcccctgcaaggccgggcacttccagaatacctcctcccccagcgcccgctgccagccccacaccaggtgtgagaaccaaggtctggtggaggcagctccaggcactgcccagtccgacacaacctgcaaaaatccattagagccactgcccccagagatgtcaggaaccatgctgatgctggccgttctgctgccactggccttctttctgctccttgccaccgtcttctcctgcatctggaagagccacccttctctctgcaggaaactgggatcgctgctcaagaggcgtccgcagggagagggacccaatcctgtagctggaagctgggagcctccgaaggcccatccatacttccctgacttggtacagccactgctacccatttctggagatgtttccccagtatccactgggctccccgcagccccagttttggaggcaggggtgccgcaacagcagagtcctctggacctgaccagggagccgcagttggaacccggggagcagagccaggtggcccacggtaccaatggcattcatgtcaccggcgggtctatgactatcactggcaacatctacatctacaatggaccagtactggggggaccaccgggtcctggagacctcccagctacccccgaacctccataccccattcccgaagagggggaccctggccctcccgggctctctacaccccaccaggaagatggcaaggcttggcacctagcggagacagagcactgtggtgccacaccctctaacaggggcccaaggaaccaatttatcacccatgactgactgagtctgagaaaaggcagaagaaggggggcacaagggcaccttctcccttgaggctgccctgcccacgtgggattcacaggggcctgagtagggcccggggaagcagagccctaagggattaaggctcagacacctctgagagcaggtgggcactggctgggtacggtgccctccacaggactctccctactgcctgagcaaacctgaggcctcccggcagacccacccaccccctggggctgctcagcctcaggcacggacagggcacatgataccaactgctgcccactacggcacgccgcaccggagcacggcaccgagggagccgccacacggtcacctgcaaggacgtcacgggcccctctaaaggattcgtggtgctcatccccaagcttcagagaccctttggggttccacacttcacgtggactgaggtagaccctgcatgaagatgaaattatagggaggacgctccttccctcccctcctagaggagaggaaagggagtcattaacaactagggggttgggtaggattcctaggtatggggaagagttttggaaggggaggaaaatggcaagtgtatttatattgtaaccacatgcaaataaaaagaatgggac

SEQ ID NO: 127633 - DNA, 2088 bp, Artificial Sequence
  derived and/or modified sequence
ccactcccacttcctgagctccgccatgggagccctggaggcccggcctggccgctcccggccctggggtgcacatcggccctgagtcccgtcccaggctctgggctcgggcagccgccgccaccgctgcccaggacgtcgggcctcctgccttcctcccaggcccccacgttgctggccgcctggccgagtggccgccatgctcctgccttgggccactgctgggcctcttcgggctcctggcagcatcgcagccccaggcggtgcctccatatgcgtcggagaaccagacctgcagggaccaggaaaaggaatactatgagccccagcaccgcatctgctgctcccgctgcccgccagctaaatgtagccgcatccgggacacagtttgtgccacatgtgccgagaattcctacaacgagcactggaactacctgaccatctgccagctgtgccgcccctgtgacccagtgatgggcctcgaggagattgccccctgcacaagcaaacggaagacccagtgccgctgccagccgggaatgttctgtgctgcctgggccctcgagtgtacacactgcgagctactttctgactgcccgcctggcactgaagccgagctcaaagatgaagttgggaagggtaacaaccactgcgtcccctgcaaggccgggcacttccagaatacctcctcccccagcgcccgctgccagccccacaccaggtgtgagaaccaaggtctggtggaggcagctccaggcactgcccagtccgacacaacctgcaaaaatccattagagccactgcccccagagatgtcaggaaccatgctgatgctggccgttctgctgccactggccttctttctgctccttgccaccgtcttctcctgcatctggaagagccacccttctctctgcaggaaactgggatcgctgctcaagaggcgtccgcagggagagggacccaatcctgtagctggaagctgggagcctccgaaggcccatccatacttccctgacttggtacagccactgctacccatttctggagatgtttccccagtatccactgggctccccgcagccccagttttggaggcaggggtgccgcaacagcagagtcctctggacctgaccagggagccgcagttggaacccggggagcagagccaggtggcccacggtaccaatggcattcatgtcaccggcgggtctatgactatcactggcaacatctacatctacaatggaccagtactggggggaccaccgggtcctggagacctcccagctacccccgaacctccataccccattcccgaagagggggaccctggccctcccgggctctctacaccccaccaggaagatggcaaggcttggcacctagcggagacagagcactgtggtgccacaccctctaacaggggcccaaggaaccaatttatcacccatgactgactgagtctgagaaaaggcagaagaaggggggcacaagggcaccttctcccttgaggctgccctgcccacgtgggattcacaggggcctgagtagggcccggggaagcagagccctaagggattaaggctcagacacctctgagagcaggtgggcactggctgggtacggtgccctccacaggactctccctactgcctgagcaaacctgaggcctcccggcagacccacccaccccctggggctgctcagcctcaggcacggacagggcacatgataccaactgctgcccactacggcacgccgcaccggagcacggcaccgagggagccgccacacggtcacctgcaaggacgtcacgggcccctctaaaggattcgtggtgctcatccccaagcttcagagaccctttggggttccacacttcacgtggactgaggtagaccctgcatgaagatgaaattatagggaggacgctccttccctcccctcctagaggagaggaaagggagtcattaacaactagggggttgggtaggattcctaggtatggggaagagttttggaaggggaggaaaatggcaagtgtatttatattgtaaccacatgcaaataaaaagaatgggacct

SEQ ID NO: 127634 - DNA, 1308 bp, Artificial Sequence
  derived and/or modified sequence
atgctgctgccctgggccaccagcgcccccggcctggcctggggccccctggtgctgggcctgttcggcctgctggccgccagccagccccaggccgtgcccccctacgccagcgagaaccagacctgcagagaccaggagaaggagtactacgagccccagcacagaatctgctgcagcagatgcccccccggcacctacgtgagcgccaagtgcagcagaatcagagacaccgtgtgcgccacctgcgccgagaacagctacaacgagcactggaactacctgaccatctgccagctgtgcagaccctgcgaccccgtgatgggcctggaggagatcgccccctgcaccagcaagagaaagacccagtgcagatgccagcccggcatgttctgcgccgcctgggccctggagtgcacccactgcgagctgctgagcgactgcccccccggcaccgaggccgagctgaaggacgaggtgggcaagggcaacaaccactgcgtgccctgcaaggccggccacttccagaacaccagcagccccagcgccagatgccagccccacaccagatgcgagaaccagggcctggtggaggccgcccccggcaccgcccagagcgacaccacctgcaagaaccccctggagcccctgccccccgagatgagcggcaccatgctgatgctggccgtgctgctgcccctggccttcttcctgctgctggccaccgtgttcagctgcatctggaagagccaccccagcctgtgcagaaagctgggcagcctgctgaagagaagaccccagggcgagggccccaaccccgtggccggcagctgggagccccccaaggcccacccctacttccccgacctggtgcagcccctgctgcccatcagcggcgacgtgagccccgtgagcaccggcctgcccgccgcccccgtgctggaggccggcgtgccccagcagcagagccccctggacctgaccagagagccccagctggagcccggcgagcagagccaggtggcccacggcaccaacggcatccacgtgaccggcggcagcatgaccatcaccggcaacatctacatctacaacggccccgtgctgggcggcccccccggccccggcgacctgcccgccacccccgagcccccctaccccatccccgaggagggcgaccccggcccccccggcctgagcaccccccaccaggaggacggcaaggcctggcacctggccgagaccgagcactgcggcgccacccccagcaacagaggccccagaaaccagttcatcacccacgactag

SEQ ID NO: 127635 - DNA, 1308 bp, Artificial Sequence
  derived and/or modified sequence
atgctgctcccttgggcgacaagtgcccctggcctcgcgtggggacctttagtgctgggcctcttcggtctgctcgccgcctctcagccacaagctgtgcctccctacgcaagtgagaatcagacttgccgcgatcaggaaaaagaatattatgaaccccagcatcgaatttgctgttctaggtgtcccccgggcacctatgtatccgccaaatgcagcaggattagggatactgtctgcgcaacctgtgcagagaactcctacaatgaacactggaattacttgaccatctgccaactttgcaggccgtgcgatcccgtgatgggtctggaagaaattgccccgtgcacctctaaacggaagacgcagtgccgctgtcagccaggaatgttctgtgctgcctgggctctcgagtgcacgcattgcgaactactttctgactgtcccccaggcacggaagcagaactcaaagacgaggttggtaagggaaacaaccattgcgtgccatgtaaagccggccattttcagaacacttctagtccaagcgcgcgctgccagccgcatacacggtgtgaaaatcagggcctggtggaggctgcaccaggcactgcccagtccgacactacctgcaaaaatcctcttgagcctctccccccagagatgagtgggacaatgctcatgttggctgtccttctgccattggcattcttcctgctcctcgcaacagtgttcagctgcatctggaagtctcatccatccttgtgccgcaagcttggaagcctgctcaaaaggaggccccagggcgagggcccaaacccggtagccggctcatgggaaccgcccaaggcacatccttacttccccgacctggtacaacctctcctccctatttccggagacgtctctccggtgtccacaggactccccgccgcccctgttctcgaagcaggggtcccgcaacagcagtctccactagacctgacgcgcgagccccagctggagccgggggagcagtctcaagtcgcccacgggacgaatggtatccacgtgactggtggatcgatgacaattaccggcaatatctatatctataatgggccagtgctcggaggtccacccgggcctggtgacctgcccgccacgccggaacccccataccctatcccagaggaaggagatcctgggcccccaggactgagcactccacaccaagaagacggcaaggcttggcatctggccgagactgaacattgcggagcaacccctagcaatcgcggaccgcggaatcaattcataacgcatgactag

SEQ ID NO: 127636 - DNA, 1308 bp, Artificial Sequence
  derived and/or modified sequence
atgctgctgccctgggccaccagcgcccctggcctggcctggggccccctggtgctgggcctgtttggcctgctggccgccagccagccccaggccgtgcccccctatgccagcgagaaccagacctgccgggaccaggagaaggagtactatgagccccagcaccgcatctgctgcagccgctgccccccaggcacctacgtgtctgccaagtgcagccgcatccgggacacagtgtgtgccacctgtgctgaaaattcctacaatgagcactggaactacctgaccatctgccagctgtgccggccctgtgaccctgtgatgggcctggaggagatcgccccctgcaccagcaagaggaagacccagtgccgctgccagcccggcatgttctgtgccgcctgggccctggagtgcacccactgtgagctgctgagtgactgccccccaggcacagaggccgagctgaaggatgaggtgggcaagggcaacaaccactgtgtgccctgcaaggccggccacttccagaacaccagcagccccagcgcccgctgccagccccacacccgctgtgagaaccagggcctggtggaggccgcccctggaacagcccagagcgacaccacctgcaagaaccccctggagcccctgcccccagagatgagcggcaccatgctgatgctggccgtgctgctgcccctggccttcttcctgctgctggccaccgtcttcagctgcatctggaagagccaccccagcctgtgcaggaagctgggcagcctgctgaagaggcggccccagggcgagggccccaaccctgtggccggctcctgggagccccccaaggcccacccctacttcccagacctggtgcagcccctgctgcccatctctggagatgtgtcccctgtgtccacaggcctgcctgctgcccctgtgctggaggccggcgtgccccagcagcagagccccctggacctgacccgggagccccagctggagcctggagagcagagccaggtggcccacggcaccaacggcatccacgtgactggaggctccatgaccatcaccggcaacatctacatctacaatggacctgtgctgggcggccccccaggccctggggacctgcctgccaccccagagcccccctaccccatccctgaggagggggaccccggccccccaggcctgagcaccccccaccaggaggatggcaaggcctggcacctggccgagacagagcactgtggggccacccccagcaacagaggccccaggaaccagttcatcacccatgactag

SEQ ID NO: 127637 - DNA, 1308 bp, Artificial Sequence
  derived and/or modified sequence
atgctgctgccctgggccaccagcgcccccggcctggcctggggccccctcgtgctcggactgtttgggctgctcgccgcctcccagcctcaggctgttcccccttacgcaagcgagaaccagacttgcagagatcaagagaaagagtactatgaaccacaacaccggatctgttgctccagatgcccgcccgggacttacgtgtctgctaagtgctcacggattcgcgatactgtatgtgccacttgtgcagagaattcttacaatgaacactggaattatctcacgatttgccagctgtgccgaccatgcgatcctgtaatgggactggaggagatcgccccctgcaccagtaagcgaaagacccagtgcagatgtcagcccggaatgttttgtgctgcatgggcgctagagtgtacacactgtgagctcttgtctgactgtcctcctggaaccgaggctgagctgaaagatgaagtgggtaaaggaaacaatcactgcgttccctgtaaggccggtcactttcagaacacttcaagcccgagtgcgaggtgccagccacacacccgctgcgaaaatcagggccttgtggaggccgcccccggtaccgcacagagcgacaccacctgcaagaacccactggaaccattgcccccagagatgtcaggaacaatgcttatgctggcggttcttttgccactggctttctttctcctgctggctacagttttttcttgcatatggaagagccacccaagcctttgtaggaagttggggagcctattgaagcgacgtccacagggagagggcccaaaccccgtagctgggtcttgggagccacccaaggctcacccatacttcccagaccttgtgcagccactcttacctattagcggcgacgtgtcacctgtttcgactggacttccagctgctccggttctagaggccggggtcccacagcagcagtcccccctggatcttacacgagagccccagcttgagcccggcgagcagagtcaggtggcacacggaacaaatggcattcatgtgactggcggctctatgaccataaccgggaacatctatatctataacggaccggtactcggcggcccccccggccccggtgatttgcctgcaacccctgaacctccatatccgattccagaggagggagatcctggaccccccggcctgtccacaccccaccaagaggacggtaaagcctggcacctggccgagactgaacactgtggtgccaccccatcaaaccggggaccccgcaaccagtttatcacacacgattag

SEQ ID NO: 127638 - DNA, 1308 bp, Artificial Sequence
  derived and/or modified sequence
atgctgctaccttgggcaacgtccgcgcctggattagcatgggggcctctggtactgggcctcttcggcctgctcgctgcgagccaacctcaggctgtccctccctacgctagtgagaaccaaacatgtcgcgaccaagaaaaagagtattacgagccgcagcaccggatatgctgcagtcgctgtccacctggtacatatgtgtccgccaaatgttctcgtatcagggacactgtctgtgccacttgcgccgaaaatagctacaacgagcactggaattacctgaccatttgccaactatgtaggccatgcgaccctgtcatgggactggaggagatagccccttgcacctcaaaaaggaaaactcaatgccgctgccagcctgggatgttctgcgcagcctgggccctggagtgcacacactgtgaactgctctcagactgcccacccggtactgaggccgaattgaaagatgaagtcggcaaaggcaacaaccactgtgtcccatgtaaagccggacatttccagaacacgtcatcaccttccgcacggtgtcagcctcatacaagatgcgagaaccaagggctggtggaagccgctcccggaaccgctcaatcagacacaacctgcaaaaacccccttgaacctctgccgcctgaaatgtctggtacaatgctgatgctggcggttctattgccgctggcgtttttcctgctcttagctacagtgttctcctgcatctggaagtcgcacccgtctctttgtagaaagttgggctcactgctcaagcggaggcctcaaggagaagggccaaatccagtggctgggagctgggagcctcccaaagctcacccctacttccccgatctggtgcaacccttgctgcctatcagcggggacgtgtcccctgtttccacaggactccctgccgcaccagtcttggaagccggtgtcccgcagcagcaatcccctcttgaccttacgagggaaccacaactggaaccgggagagcagagccaggtggctcatggcactaatggtattcacgtgaccgggggttcaatgaccattaccggtaacatctacatttataatggacccgtgctgggcggaccacccggaccaggcgaccttccagctacgcctgaacccccttacccaatcccagaggagggcgatcccggaccccctggtttgtcgacaccccaccaagaagatggaaaagcctggcacttagctgaaacagaacattgcggagcaaccccctctaatagaggaccacgaaatcagttcatcacacacgactag

SEQ ID NO: 127639 - protein, 69 aa, Artificial Sequence
  derived and/or modified sequence
WQWRMKKLGAPCISCLRRAFALESIRAIPEKKADAVTLDDAMVFEAGRGCLRLRPVAAEMYGTKECIQS

SEQ ID NO: 127640 - protein, 710 aa, Artificial Sequence
  derived and/or modified sequence
MKLVFLVLLFLGALGLCLAGRRRSVQWCAVSQPEATKCFQWQRNMRKVRGPPVSCIKRDSPIQCIQAIAENRADAVTLDGGFIYEAGLAPYKLRPVAAEVYGTERQPRTHYYAVAVVKKGGSFQLNELQGLKSCHTGLRRTAGWNVPIGTLRPFLNWTGPPEPIEAAVARFFSASCVPGADKGQFPNLCRLCAGTGENKCAFSSQEPYFSYSGAFKCLRDGAGDVAFIRESTVFEDLSDEAERDEYELLCPDNTRKPVDKFKDCHLARVPSHAVVARSVNGKEDAIWNLLRQAQEKFGKDKSPKFQLFGSPSGQKDLLFKDSAIGFSRVPPRIDSGLYLGSGYFTAIQNLRKSEEEVAARRARVVWCAVGEQELRKCNQWSGLSEGSVTCSSASTTEDCIALVLKGEADAMSLDGGYVYTAGKCGLVPVLAENYKSQQSSDPDPNCVDRPVEGYLAVAVVRRSDTSLTWNSVKGKKSCHTAVDRTAGWNIPMGLLFNQTGSCKFDEYFSQSCAPGSDPRSNLCALCIGDEQGENKCVPNSNERYYGYTGAFRCLAENAGDVAFVKDVTVLQNTDGNNNEAWAKDLKLADFALLCLDGKRKPVTEARSCHLAMAPNHAVVSRMDKVERLKQVLLHQQAKFGRNGSDCPDKFCLFQSETKNLLFNDNTECLARLHGKTTYEKYLGPQYVAGITNLKKCSTSPLLEACEFLRK

SEQ ID NO: 127641 - protein, 150 aa, Artificial Sequence
  derived and/or modified sequence
MKLVFLVLLFLGALGLCLAGRRRSVQWCAVSQPEATKCFQWQRNMRKVRGPPVSCIKRDSPIQCIQAIAENRADAVTLDGGFIYEAGLAPYKLRPVAAEVYGTERQPAVFPVQIKDSSPTCVACVRGQGKTNVPSPPRNRTSATLVPSSV

SEQ ID NO: 127642 - DNA, 2133 bp, Artificial Sequence
  derived and/or modified sequence
atgaagctggtgttcctggtgctgctgttcctgggcgccctgggcctgtgcctggccggcagaagaagaagcgtgcagtggtgcgccgtgagccagcccgaggccaccaagtgcttccagtggcagagaaacatgagaaaggtgagaggcccccccgtgagctgcatcaagagagacagccccatccagtgcatccaggccatcgccgagaacagagccgacgccgtgaccctggacggcggcttcatctacgaggccggcctggccccctacaagctgagacccgtggccgccgaggtgtacggcaccgagagacagcccagaacccactactacgccgtggccgtggtgaagaagggcggcagcttccagctgaacgagctgcagggcctgaagagctgccacaccggcctgagaagaaccgccggctggaacgtgcccatcggcaccctgagacccttcctgaactggaccggcccccccgagcccatcgaggccgccgtggccagattcttcagcgccagctgcgtgcccggcgccgacaagggccagttccccaacctgtgcagactgtgcgccggcaccggcgagaacaagtgcgccttcagcagccaggagccctacttcagctacagcggcgccttcaagtgcctgagagacggcgccggcgacgtggccttcatcagagagagcaccgtgttcgaggacctgagcgacgaggccgagagagacgagtacgagctgctgtgccccgacaacaccagaaagcccgtggacaagttcaaggactgccacctggccagagtgcccagccacgccgtggtggccagaagcgtgaacggcaaggaggacgccatctggaacctgctgagacaggcccaggagaagttcggcaaggacaagagccccaagttccagctgttcggcagccccagcggccagaaggacctgctgttcaaggacagcgccatcggcttcagcagagtgccccccagaatcgacagcggcctgtacctgggcagcggctacttcaccgccatccagaacctgagaaagagcgaggaggaggtggccgccagaagagccagagtggtgtggtgcgccgtgggcgagcaggagctgagaaagtgcaaccagtggagcggcctgagcgagggcagcgtgacctgcagcagcgccagcaccaccgaggactgcatcgccctggtgctgaagggcgaggccgacgccatgagcctggacggcggctacgtgtacaccgccggcaagtgcggcctggtgcccgtgctggccgagaactacaagagccagcagagcagcgaccccgaccccaactgcgtggacagacccgtggagggctacctggccgtggccgtggtgagaagaagcgacaccagcctgacctggaacagcgtgaagggcaagaagagctgccacaccgccgtggacagaaccgccggctggaacatccccatgggcctgctgttcaaccagaccggcagctgcaagttcgacgagtacttcagccagagctgcgcccccggcagcgaccccagaagcaacctgtgcgccctgtgcatcggcgacgagcagggcgagaacaagtgcgtgcccaacagcaacgagagatactacggctacaccggcgccttcagatgcctggccgagaacgccggcgacgtggccttcgtgaaggacgtgaccgtgctgcagaacaccgacggcaacaacaacgaggcctgggccaaggacctgaagctggccgacttcgccctgctgtgcctggacggcaagagaaagcccgtgaccgaggccagaagctgccacctggccatggcccccaaccacgccgtggtgagcagaatggacaaggtggagagactgaagcaggtgctgctgcaccagcaggccaagttcggcagaaacggcagcgactgccccgacaagttctgcctgttccagagcgagaccaagaacctgctgttcaacgacaacaccgagtgcctggccagactgcacggcaagaccacctacgagaagtacctgggcccccagtacgtggccggcatcaccaacctgaagaagtgcagcaccagccccctgctggaggcctgcgagttcctgagaaagtag

SEQ ID NO: 127643 - DNA, 2133 bp, Artificial Sequence
  derived and/or modified sequence
atgaaactggtgttcctggtgttgctgttccttggagctctcggactttgtctggcagggagacgccggagcgttcaatggtgcgccgtgtcccagccagaagcaaccaaatgttttcagtggcagcgaaacatgaggaaagtccgcggtcccccagtgagctgtatcaagcgggatagtccaattcagtgtattcaggcgattgcggagaacagagccgacgccgtgacattagatggcggatttatttatgaagcaggattagcaccctacaaacttaggcccgtggccgccgaggtgtacgggacagagcggcagcccaggacacactattatgcggttgccgtggtgaagaagggtgggtctttccagctcaacgagctgcagggacttaagagttgtcacaccggccttcggaggactgccggttggaatgtgcccatcggaacattgagaccctttctgaattggaccggcccgcccgagccaatagaggctgccgtggcccggttcttctcggccagctgcgtgcccggagccgacaagggacagttcccaaatctatgccgcctttgcgctggcacgggggagaataagtgcgcttttagctcccaggaaccctacttttcctacagcggagccttcaagtgtctgcgagacggggctggagatgttgcgttcatacgggaatccactgtgtttgaggacctatccgatgaggccgagcgcgacgaatacgagctcttatgcccagacaataccaggaagccggttgacaaattcaaggattgtcacctagccagggtccccagccacgccgtggtcgctcgcagcgtgaacggcaaagaagacgctatttggaatctgctgcgacaggctcaggagaagttcggtaaggacaaatcacctaagttccagctgttcgggagtccatcgggccagaaagacctgttattcaaggactcggccattggcttcagccgggtgcctccaaggattgactcaggactgtacttgggctccgggtatttcactgccatacaaaatctaaggaagagtgaggaagaagtggcagctcgtcgtgctagagtggtctggtgtgctgtcggcgaacaagagctgcggaagtgcaatcagtggtctggattaagtgagggcagcgttacctgtagcagtgcaagcaccactgaggattgtatcgccctggtgttaaaaggcgaggccgacgcaatgagcttagatggcgggtatgtgtataccgcaggtaaatgtggtttggtgccggtgctggctgaaaattataagtcacagcagtcatcagatcctgatcccaattgcgtggatagacctgtcgagggctacctggcagtcgctgtggtgcgccgttccgacacttcacttacatggaactctgtgaagggtaagaaatcatgtcacaccgcagtggatcgaacggccgggtggaacataccaatgggtctcttatttaatcagacagggagttgcaaatttgatgaatacttctcccagtcatgtgccccaggttcagaccctcggagtaatttatgtgccctgtgtataggagacgagcagggggaaaataagtgtgtgccaaattcaaatgagaggtattacggatacactggggcgtttcggtgcctggccgagaacgcaggagacgtggcattcgtgaaagatgtcacagtcttgcagaacactgacggcaataataacgaggcatgggccaaagacctcaagttagctgatttcgccttgctttgcctggacggaaagcggaaaccagttacggaggcccgatcatgccacctagccatggcccccaaccacgctgtggtctctcgtatggacaaggtagaaagattgaagcaggttttactgcatcagcaggctaagtttggtagaaatggatcggattgtcccgacaagttttgcctgtttcaatccgagactaaaaatctgctgttcaatgataacacagaatgccttgcccgattgcacggtaagacaacctacgaaaaatacctcgggcctcagtacgtcgccggaattaccaatctgaagaaatgcagcacctccccacttctcgaggcgtgtgagttccttaggaagtag

SEQ ID NO: 127644 - DNA, 2133 bp, Artificial Sequence
  derived and/or modified sequence
atgaagctggtgttcctggtgctgctcttcctgggcgccctgggcctgtgcctggccggcagaagaagatctgtgcagtggtgtgctgtgtcccagcctgaggccaccaagtgcttccagtggcagaggaacatgaggaaggtgcggggcccccctgtgtcctgcatcaagagggacagccccatccagtgcatccaggccatcgccgagaacagagcagatgctgtgaccctggatggcggcttcatctatgaggccggcctggccccctacaagctgcggcctgtggccgctgaggtgtatggaacagagcggcagcccaggacccactactatgctgtggccgtggtgaagaagggcggcagcttccagctgaatgagctgcagggcctgaagagctgccacacaggcctgcggaggacagctggctggaatgtgcccatcggcaccctgcggcccttcctgaactggacaggccccccagagcccatcgaggccgctgtggcccgcttcttcagcgccagctgtgtgcctggagctgacaagggccagttccccaacctgtgccgcctgtgtgccggcactggagaaaataaatgtgccttcagcagccaggagccctacttctcctacagcggggccttcaagtgcctgagagatggagctggagatgtggccttcatccgggagagcacagtgtttgaggacctgagtgatgaagctgagagagatgaatatgagctgctgtgcccagacaacaccaggaagcctgtggacaagttcaaggactgccacctggcccgggtgcccagccatgctgtggtggcccggtctgtgaatggcaaggaggatgccatctggaacctgctgcggcaggcccaggagaagtttgggaaggacaagagccccaagttccagctgtttggcagccccagcggccagaaggacctgctcttcaaggacagcgccatcggcttcagccgggtgcccccaagaattgattctggcctgtacctgggcagcggctacttcaccgccatccagaacctgaggaagtctgaggaggaggtggccgcccggcgggcccgggtggtgtggtgtgctgtgggggagcaggagctgaggaagtgcaaccagtggagcggcctgtctgagggctctgtgacctgcagcagcgccagcaccacagaggactgcatcgccctggtgctgaagggggaggctgatgccatgagcctggatggcggctacgtgtacacagctggaaaatgtggcctggtgcctgtgctggccgagaactacaagagccagcagagcagtgaccctgaccccaactgtgtggacaggcctgtggagggctacctggccgtggccgtggtgagaagaagtgacaccagcctgacctggaacagcgtgaagggcaagaagagctgccacacagctgtggacagaacagctggctggaacatccccatgggcctgctcttcaaccagacaggcagctgcaagtttgatgagtacttcagccagagctgtgcccctggcagtgaccccaggagcaacctgtgtgccctgtgcattggagatgagcagggagaaaataaatgtgtgcccaacagcaatgaaagatactacggctacaccggggccttccgctgcctggccgagaatgctggagatgtggcctttgtgaaggatgtgacagtgctgcagaacacagatggcaacaacaatgaggcctgggccaaggacctgaagctggccgactttgccctgctgtgcctggatggcaagaggaagcctgtgacagaggcccggagctgccacctggccatggcccccaaccacgctgtggtgtccaggatggacaaggtggagcggctgaagcaggtgctgctgcaccagcaggccaagtttggaagaaatggaagtgactgcccagacaagttctgcctcttccagagcgagaccaagaacctgctcttcaatgacaacacagaatgtctggcccggctgcacggcaagaccacctatgagaagtacctgggcccccagtatgtggccggcatcaccaacctgaagaagtgcagcaccagccccctgctggaggcctgtgagttcctgaggaagtag

SEQ ID NO: 127645 - DNA, 2133 bp, Artificial Sequence
  derived and/or modified sequence
atgaagctggtgttcctggtgctgctgttcctgggcgccctgggcttgtgcctggccggacgccggcgcagtgttcagtggtgcgccgtatcccagccggaggcgacaaagtgttttcaatggcagcgaaatatgcgaaaagtgaggggtccccccgtgagctgcatcaaacgcgactctcccatccagtgcatccaagccatcgctgagaatagagccgatgccgtgactctggacggcggatttatttatgaagcgggccttgcaccttataagctacgacctgtcgcggcggaggtctacggaaccgaaaggcagccaaggacacactattacgccgttgctgttgtcaagaaaggcggctcctttcagcttaacgagttgcagggcctgaagtcttgtcataccgggcttaggcggactgccgggtggaatgtcccaattggcactctgcgtccattcttgaactggactggtccccccgagcccattgaggctgcagtggctaggttcttctctgcctcctgtgtgcctggtgcggacaaagggcagttcccgaatctgtgcaggctctgcgccggtactggagagaacaagtgcgccttttccagccaggaaccttacttttcttactctggtgcctttaagtgcttgcgggacggtgcgggggacgtggctttcataagggagtccactgttttcgaagaccttagcgacgaggccgagagggacgagtacgaactcctttgccctgataatacccgaaaacctgtcgataagtttaaagactgccacctggcaagggtaccctcacacgctgttgttgcgaggtcagtgaatggaaaagaagatgccatttggaacctgttgaggcaggctcaggagaaatttggtaaggacaaaagtcctaagttccagctcttcgggtcaccttcagggcagaaggatctgctgtttaaagacagcgccatcggcttctctagagtgccccctagaatcgattccgggttatacctgggtagcggctacttcacagcgatacagaacttgcggaagtccgaggaagaagtggccgctagacgagctagagtggtatggtgtgcagtgggcgaacaggaactgcggaagtgcaatcaatggagcggtctctctgaggggtcagtcacatgttcaagtgcatccacaactgaagattgcatcgcccttgtcctgaaaggggaggcagacgcaatgtccttggatggcggttatgtttacacagccggaaaatgcggcctcgtacccgtcttggccgagaactataaatcccagcaatcaagcgatccagaccccaattgtgtggaccgtcccgtggaaggctatctggcggtcgcagtcgtgagacggtccgacacctctttaacatggaacagtgtaaaaggcaagaaaagttgtcacaccgccgtggatcgcaccgccggctggaacatccccatgggcctgctctttaaccagactggatcatgtaagttcgacgagtactttagccagagttgtgctccaggctctgacccaaggagcaacttatgtgccctgtgtatcggggacgaacagggggagaacaaatgcgttcctaactcaaacgaaaggtactacgggtacactggcgccttcaggtgcctcgctgaaaatgccggcgatgtagcttttgtcaaagacgtcaccgtcctccagaatactgacggtaacaataatgaggcctgggcaaaggacttgaagctcgccgactttgcactcctctgcctcgatgggaagcgaaagcccgtgacagaggctcgcagctgtcacctcgccatggcgcccaatcacgcggtagtctcaaggatggataaagtggagcggctgaagcaggtgcttcttcaccaacaagccaagttcggcagaaacggatctgactgtcctgacaagttctgcctttttcagtccgaaactaagaacctcctgtttaacgacaataccgaatgcctcgcgcggcttcacggcaaaaccacatatgagaagtacctgggtccccagtatgtggcggggattaccaacctgaagaagtgctcaacgagccccctgctggaggcatgcgaatttctgcgaaaatag

SEQ ID NO: 127646 - DNA, 2133 bp, Artificial Sequence
  derived and/or modified sequence
atgaaactggttttcttagtgttgctgtttctgggagctctcggactgtgtctagccggaaggcggaggagcgttcagtggtgcgcagtcagccagcccgaggctacaaaatgttttcagtggcagcgtaatatgagaaaagtgcgtggcccaccagtttcatgtataaagagagacagccccatccagtgcattcaagccattgcagagaatcgcgcagacgcagttactcttgacgggggtttcatttacgaggccggactggccccttacaagctccgccctgtggccgctgaggtttatggaactgaacggcagcctcgtactcattattacgctgtcgctgtcgttaagaaaggtgggagcttccagctcaatgagctacagggccttaaatcgtgccatacaggactgcggcgtacggctgggtggaatgtgcccattggtacgcttcgcccattcctaaactggaccgggccaccagaaccgattgaggctgcggtggccaggttcttttcagctagttgtgtccccggagccgacaaggggcagtttccgaatctgtgccgattgtgcgcgggaacaggggagaataaatgcgccttctctagccaggaaccttacttttcttattccggggctttcaagtgcctgcgcgatggggcaggggatgtggcatttatccgcgagtctacagtcttcgaggatctgagcgatgaagcagagcgagacgagtacgagctgctctgtcccgataacactaggaagcccgtggacaagttcaaagactgccatcttgccagggtgccttctcacgcagttgttgctcgatccgtgaatgggaaggaggatgctatctggaatctgttacggcaagcacaggagaaatttggcaaggataagagtcctaagttccagctctttggctccccctccgggcagaaagacctgctctttaaagactcggcaataggcttttctcgcgtgccaccccgaatcgactctgggctataccttggttccggatacttcacggccattcagaacctccgaaagtcggaagaagaggtggcagctagaagagccagagtcgtgtggtgcgcagtcggcgaacaagagctcagaaaatgtaaccaatggtccggattatccgagggctcagtcacctgcagtagcgcatccacaacggaagactgtatcgcccttgtactaaagggggaggccgacgcaatgagcctggacgggggatatgtctataccgccggtaagtgcggcctggtgcctgtcctggcggaaaattacaaatctcagcaatcatccgacccggaccccaattgcgtggatcgccctgtagaagggtatctggccgtcgcagtggttcggcgaagcgatacttctttaacatggaacagcgttaagggcaagaaaagctgtcatacagcagtggacaggacggctggctggaatatcccaatgggactgttgttcaaccagacaggaagctgcaagttcgacgaatatttctcacagagctgcgccccaggctctgaccctcgcagcaatttgtgcgctctgtgtataggagatgagcagggcgagaacaagtgtgttccaaatagcaacgagaggtactacggatacactggagcatttagatgcttagcagagaacgccggagacgttgcattcgtgaaagatgttacagtgctccagaacactgatggcaacaacaacgaggcttgggctaaggacctgaagctggccgactttgccttgctttgtcttgatggcaagagaaagccagtgacagaggcgagaagctgtcacctggccatggcgcctaatcatgctgtcgtcagcagaatggataaggtggagcggctgaagcaggttctgttgcatcagcaagctaaatttggaagaaacggatccgattgtcctgacaagttctgcctgtttcagagcgagactaagaacttgctgttcaacgacaataccgaatgccttgccaggttacacggaaagactacatacgagaaatatctgggtccccagtacgtagctggcattaccaacctgaagaaatgctctacttcccctctcctggaagcatgtgagttcttacgtaaatag

SEQ ID NO: 127647 - DNA, 453 bp, Artificial Sequence
  derived and/or modified sequence
atgaaacttgtgttcctcgtcttgttattcctgggtgccctgggactgtgcttagctggtcgtcggcgtagcgtgcaatggtgcgcagtttcacaaccggaggcgaccaagtgtttccaatggcaacgaaatatgagaaaggtcagagggcccccggtttcatgcatcaagcgggatagccccatccagtgtatccaggccattgccgaaaacagggcagacgcagttaccctggacggggggtttatctatgaggctggtctggccccctacaagctgcgccctgttgccgccgaagtctacggcacagagcgccagccagctgtgttccccgtgcagattaaggactctagccccacgtgcgtggcttgcgttcggggtcaggggaaaacaaacgtgccttctccccctcggaaccgtacatccgcgaccctggttccctcgagcgtctag

SEQ ID NO: 127648 - DNA, 2979 bp, Artificial Sequence
  derived and/or modified sequence
gactcctaggggcttgcagactagtgggagagaaagaacatcgcagcagccaggcagaaccaggacaggtgaggtgcaggctggctttcctctcgcagcgcggtgtggagtcctgtcctgcctcagggcttttcggagcctggatcctcaaggaacaagtagacctggccgcggggagtggggagggaaggggtgtctattgggcaacagggcggggcaaagccctgaataaaggggcgcagggcaggcgcaagtggcagagccttcgtttgccaagtcgcctccagaccgcagacatgaaacttgtcttcctcgtcctgctgttcctcggggccctcggactgtgtctggctggccgtaggaggagtgttcagtggtgcgccgtatcccaacccgaggccacaaaatgcttccaatggcaaaggaatatgagaaaagtgcgtggccctcctgtcagctgcataaagagagactcccccatccagtgtatccaggccattgcggaaaacagggccgatgctgtgacccttgatggtggtttcatatacgaggcaggcctggccccctacaaactgcgacctgtagcggcggaagtctacgggaccgaaagacagccacgaactcactattatgccgtggctgtggtgaagaagggcggcagctttcagctgaacgaactgcaaggtctgaagtcctgccacacaggccttcgcaggaccgctggatggaatgtccctatagggacacttcgtccattcttgaattggacgggtccacctgagcccattgaggcagctgtggccaggttcttctcagccagctgtgttcccggtgcagataaaggacagttccccaacctgtgtcgcctgtgtgcggggacaggggaaaacaaatgtgccttctcctcccaggaaccgtacttcagctactctggtgccttcaagtgtctgagagacggggctggagacgtggcttttatcagagagagcacagtgtttgaggacctgtcagacgaggctgaaagggacgagtatgagttactctgcccagacaacactcggaagccagtggacaagttcaaagactgccatctggcccgggtcccttctcatgccgttgtggcacgaagtgtgaatggcaaggaggatgccatctggaatcttctccgccaggcacaggaaaagtttggaaaggacaagtcaccgaaattccagctctttggctcccctagtgggcagaaagatctgctgttcaaggactctgccattgggttttcgagggtgcccccgaggatagattctgggctgtaccttggctccggctacttcactgccatccagaacttgaggaaaagtgaggaggaagtggctgcccggcgtgcgcgggtcgtgtggtgtgcggtgggcgagcaggagctgcgcaagtgtaaccagtggagtggcttgagcgaaggcagcgtgacctgctcctcggcctccaccacagaggactgcatcgccctggtgctgaaaggagaagctgatgccatgagtttggatggaggatatgtgtacactgcaggcaaatgtggtttggtgcctgtcctggcagagaactacaaatcccaacaaagcagtgaccctgatcctaactgtgtggatagacctgtggaaggatatcttgctgtggcggtggttaggagatcagacactagccttacctggaactctgtgaaaggcaagaagtcctgccacaccgccgtggacaggactgcaggctggaatatccccatgggcctgctcttcaaccagacgggctcctgcaaatttgatgaatatttcagtcaaagctgtgcccctgggtctgacccgagatctaatctctgtgctctgtgtattggcgacgagcagggtgagaataagtgcgtgcccaacagcaacgagagatactacggctacactggggctttccggtgcctggctgagaatgctggagacgttgcatttgtgaaagatgtcactgtcttgcagaacactgatggaaataacaatgaggcatgggctaaggatttgaagctggcagactttgcgctgctgtgcctcgatggcaaacggaagcctgtgactgaggctagaagctgccatcttgccatggccccgaatcatgccgtggtgtctcggatggataaggtggaacgcctgaaacaggtgttgctccaccaacaggctaaatttgggagaaatggatctgactgcccggacaagttttgcttattccagtctgaaaccaaaaaccttctgttcaatgacaacactgagtgtctggccagactccatggcaaaacaacatatgaaaaatatttgggaccacagtatgtcgcaggcattactaatctgaaaaagtgctcaacctcccccctcctggaagcctgtgaattcctcaggaagtaaaaccgaagaagatggcccagctccccaagaaagcctcagccattcactgcccccagctcttctccccaggtgtgttggggccttggcctcccctgctgaaggtggggattgcccatccatctgcttacaattccctgctgtcgtcttagcaagaagtaaaatgagaaattttgttgatattctctccttataaagtgtcactcatcttttctagaattttatactgaaatcacatgcctgacaaaatacctgtacagttggaccttcccttccaagtttttcaggtccagcccctcctctttcttgcagtcttgggtatgatgcccaagggtctggaatttaaggccaggccaagcaccggttttcctaaggggatcttgttggttattcacatagctgtctcagtgcacgtgcatgtatgtgcctgggagtgtgtgcgtgtccccaaggcagggcaggaagagcaagcataggaattataactgaaatgtaggttcagttgctcatcacttgcagagtctaattaacaagagctaggtttggtataaag

SEQ ID NO: 127649 - DNA, 2494 bp, Artificial Sequence
  derived and/or modified sequence
gtccaggattctggctcagagttgcaccactgggttttatattcacttggatctttagttgttttggcgcctactgaggtctgaagtttgaatcctgcagtcaattgggatggtggcttgtaccccaaagtgccattgcaacccttgtccttcctgaggaaagggtggcagttgccctgtggaattcctgccctgctccccgtgggtgtccaggctgacagaagttgggactgtgtctggctggccgtaggaggagtgttcagtggtgcgccgtatcccaacccgaggccacaaaatgcttccaatggcaaaggaatatgagaaaagtgcgtggccctcctgtcagctgcataaagagagactcccccatccagtgtatccaggccattgcggaaaacagggccgatgctgtgacccttgatggtggtttcatatacgaggcaggcctggccccctacaaactgcgacctgtagcggcggaagtctacgggaccgaaagacagccacgaactcactattatgccgtggctgtggtgaagaagggcggcagctttcagctgaacgaactgcaaggtctgaagtcctgccacacaggccttcgcaggaccgctggatggaatgtccctatagggacacttcgtccattcttgaattggacgggtccacctgagcccattgaggcagctgtggccaggttcttctcagccagctgtgttcccggtgcagataaaggacagttccccaacctgtgtcgcctgtgtgcggggacaggggaaaacaaatgtgccttctcctcccaggaaccgtacttcagctactctggtgccttcaagtgtctgagagacggggctggagacgtggcttttatcagagagagcacagtgtttgaggacctgtcagacgaggctgaaagggacgagtatgagttactctgcccagacaacactcggaagccagtggacaagttcaaagactgccatctggcccgggtcccttctcatgccgttgtggcacgaagtgtgaatggcaaggaggatgccatctggaatcttctccgccaggcacaggaaaagtttggaaaggacaagtcaccgaaattccagctctttggctcccctagtgggcagaaagatctgctgttcaaggactctgccattgggttttcgagggtgcccccgaggatagattctgggctgtaccttggctccggctacttcactgccatccagaacttgaggaaaagtgaggaggaagtggctgcccggcgtgcgcgggtcgtgtggtgtgcggtgggcgagcaggagctgcgcaagtgtaaccagtggagtggcttgagcgaaggcagcgtgacctgctcctcggcctccaccacagaggactgcatcgccctggtgctgaaaggagaagctgatgccatgagtttggatggaggatatgtgtacactgcaggcaaatgtggtttggtgcctgtcctggcagagaactacaaatcccaacaaagcagtgaccctgatcctaactgtgtggatagacctgtggaaggatatcttgctgtggcggtggttaggagatcagacactagccttacctggaactctgtgaaaggcaagaagtcctgccacaccgccgtggacaggactgcaggctggaatatccccatgggcctgctcttcaaccagacgggctcctgcaaatttgatgaatatttcagtcaaagctgtgcccctgggtctgacccgagatctaatctctgtgctctgtgtattggcgacgagcagggtgagaataagtgcgtgcccaacagcaacgagagatactacggctacactggggctttccggtgcctggctgagaatgctggagacgttgcatttgtgaaagatgtcactgtcttgcagaacactgatggaaataacaatgaggcatgggctaaggatttgaagctggcagactttgcgctgctgtgcctcgatggcaaacggaagcctgtgactgaggctagaagctgccatcttgccatggccccgaatcatgccgtggtgtctcggatggataaggtggaacgcctgaaacaggtgttgctccaccaacaggctaaatttgggagaaatggatctgactgcccggacaagttttgcttattccagtctgaaaccaaaaaccttctgttcaatgacaacactgagtgtctggccagactccatggcaaaacaacatatgaaaaatatttgggaccacagtatgtcgcaggcattactaatctgaaaaagtgctcaacctcccccctcctggaagcctgtgaattcctcaggaagtaaaaccgaagaagatggcccagctccccaagaaagcctcagccattcactgcccccagctcttctccccaggtgtgttggggccttggcctcccctgctgaaggtggggattgcccatccatctgcttacaattccctgctgtcgtcttagcaagaagtaaaatgagaaattttgttg

SEQ ID NO: 127650 - DNA, 453 bp, Artificial Sequence
  derived and/or modified sequence
atgaagctggtgttcctggtgctgctcttcctgggcgccctgggcctgtgcctggccggcagaagaagatctgtgcagtggtgtgctgtgtcccagcctgaggccaccaagtgcttccagtggcagaggaacatgaggaaggtgcggggcccccctgtgtcctgcatcaagagggacagccccatccagtgcatccaggccatcgccgagaacagagcagatgctgtgaccctggatggcggcttcatctatgaggccggcctggccccctacaagctgcggcctgtggccgctgaggtgtatggaacagagcggcagcctgctgtgtttcctgtgcagatcaaggacagcagccccacctgtgtggcctgtgtgcggggccagggcaagaccaacgtgcccagcccccccaggaacagaaccagcgccaccctggtgcccagctctgtgtag

SEQ ID NO: 127651 - DNA, 453 bp, Artificial Sequence
  derived and/or modified sequence
atgaagctggtgttcctggtgctgctgttcctgggcgccctgggcctgtgtttggccggccggcggcggtctgtccagtggtgcgcagtctcacagcccgaggcaacaaaatgcttccagtggcaacgtaatatgcgcaaagtgagagggcctccagtgtcatgcatcaaacgcgactccccaatccaatgcatccaagcaatcgccgaaaatcgcgcagacgccgtgactctggacggcggattcatctatgaggcgggactggctccttacaagcttcgaccggttgccgcagaggtgtatggaactgagagacagcccgctgtgtttcccgtgcaaataaaagactcatcacctacctgcgtggcatgcgttcggggtcaggggaagacaaatgttccgtctccaccccggaatcgtacttccgcaactctggttccatctagcgtgtag

SEQ ID NO: 127652 - DNA, 453 bp, Artificial Sequence
  derived and/or modified sequence
atgaaactagtctttctggtgctgcttttcctgggggctctgggattatgcctggcgggaaggcgccgatcagtacaatggtgcgcagtttcacagcctgaagcaacaaagtgctttcagtggcaacgaaacatgcgaaaagtgcggggaccacctgtgtcttgcattaagagggatagcccaattcagtgtattcaggcaatcgccgaaaaccgggctgacgccgtgacactggatggtggatttatctacgaggcgggactggcaccctacaagttgaggcctgtggcagcagaggtgtacggtacggagagacagcctgccgtcttcccagtccagattaaagattccagtcctacttgcgtcgcatgcgtgagaggacagggaaagacaaatgtaccatctccaccaagaaacagaacctcggccacactcgttcccagctccgtgtag

SEQ ID NO: 127653 - DNA, 453 bp, Artificial Sequence
  derived and/or modified sequence
atgaagctggtgttcctggtgctgctgttcctgggcgccctgggcctgtgcctggccggcagaagaagaagcgtgcagtggtgcgccgtgagccagcccgaggccaccaagtgcttccagtggcagagaaacatgagaaaggtgagaggcccccccgtgagctgcatcaagagagacagccccatccagtgcatccaggccatcgccgagaacagagccgacgccgtgaccctggacggcggcttcatctacgaggccggcctggccccctacaagctgagacccgtggccgccgaggtgtacggcaccgagagacagcccgccgtgttccccgtgcagatcaaggacagcagccccacctgcgtggcctgcgtgagaggccagggcaagaccaacgtgcccagcccccccagaaacagaaccagcgccaccctggtgcccagcagcgtgtag

SEQ ID NO: 127654 - protein, 864 aa, Artificial Sequence
  derived and/or modified sequence
MGCWGQLLVWFGAAGAILCSSPGSQETFLRSSPLPLASPSPRDPKVSAPPSILEPASPLNSPGTEGSWLFSTCGASGRHGPTQTQCDGAYAGTSVVVTVGAAGQLRGVQLWRVPGPGQYLISAYGAAGGKGAKNHLSRAHGVFVSAIFSLGLGESLYILVGQQGEDACPGGSPESQLVCLGESRAVEEHAAMDGSEGVPGSRRWAGGGGGGGGATYVFRVRAGELEPLLVAAGGGGRAYLRPRDRGRTQASPEKLENRSEAPGSGGRGGAAGGGGGWTSRAPSPQAGRSLQEGAEGGQGCSEAWATLGWAAAGGFGGGGGACTAGGGGGGYRGGDASETDNLWADGEDGVSFIHPSSELFLQPLAVTENHGEVEIRRHLNCSHCPLRDCQWQAELQLAECLCPEGMELAVDNVTCMDLHKPPGPLVLMVAVVATSTLSLLMVCGVLILVKQKKWQGLQEMRLPSPELELSKLRTSAIRTAPNPYYCQVGLGPAQSWPLPPGVTEVSPANVTLLRALGHGAFGEVYEGLVIGLPGDSSPLQVAIKTLPELCSPQDELDFLMEALIISKFRHQNIVRCVGLSLRATPRLILLELMSGGDMKSFLRHSRPHLGQPSPLVMRDLLQLAQDIAQGCHYLEENHFIHRDIAARNCLLSCAGPSRVAKIGDFGMARDIYRASYYRRGDRALLPVKWMPPEAFLEGIFTSKTDSWSFGVLLWEIFSLGYMPYPGRTNQEVLDFVVGGGRMDPPRGCPGPVYRIMTQCWQHEPELRPSFASILERLQYCTQDPDVLNSLLPMELGPTPEEEGTSGLGNRSLECLRPPQPQELSPEKLKSWGGSPLGPWLSSGLKPLKSRGLQPQNLWNPTYRS

SEQ ID NO: 127655 - DNA, 2595 bp, Artificial Sequence
  derived and/or modified sequence
atgggctgctggggtcagcttctggtctggttcggggcagccggagctatactgtgcagctcccctggcagccaggaaacttttctgcgaagtagccccctgccccttgcctccccctcacctagagaccccaaggttagcgcacccccctccatactggaaccagcatctcccctgaacagccctggtaccgaaggctcttggctttttagtacctgcggcgcctcaggacgccatggccctacacagacacagtgtgacggcgcttacgcaggcacctctgtagtggtgactgtcggtgctgccgggcagctgcgaggtgtgcagctgtggcgcgtccccggccccggtcagtaccttattagcgcctatggcgccgctgggggtaagggtgctaagaaccatctgtcacgggctcacggagtgtttgtgtcagcaatattttcgttgggcctgggcgagagcctctacatcctggtgggacagcagggagaggatgcatgccccgggggctcgccagaatcccagcttgtttgcctcggagagtctcgcgctgttgaggaacacgccgccatggatggaagcgagggagtccccggctccagaagatgggctggtggaggaggcggcggaggcggagccacttacgtgtttagggtgcgcgctggggagctggaacctctccttgtcgctgctggaggtggcggccgcgcctacttacgccctcgggatcggggccggacccaggcttccccagaaaagctggaaaatcgctccgaagccccggggtcaggcggccgtggaggagccgcaggtggaggtggtgggtggacatctcgcgctcctagccctcaggctggtcggtctttacaggagggggccgaaggcggtcaaggctgcagcgaggcctgggccactctcgggtgggcagcagctggcggctttgggggcgggggaggggcttgcacggcaggcggaggcgggggggggtatcgcggaggagacgcctctgagaccgataatctatgggcagatggagaggatggagtgagcttcattcatccctcaagtgagttgttcctgcagccacttgcggtgaccgaaaaccacggtgaggttgagattcgacggcatcttaactgttcccactgtccacttagggattgccagtggcaggctgagctgcagttagccgaatgtctgtgtccagaaggaatggaattagccgtagataatgtaacctgcatggatttgcacaagccaccggggcccctggtgcttatggtcgctgtcgtagctacaagcaccctttcattattaatggtgtgtggtgtgctgatccttgtgaagcagaaaaagtggcagggccttcaagaaatgaggctgccctcccctgagctggagctaagcaagctccggacgtctgcaatccggacagctccaaacccctattactgccaggtggggctgggaccagcacagtcctggcctctgcctcccggagtaacggaggtgagccctgctaatgtgacccttcttcgcgctctaggacatggggcatttggggaagtgtacgaagggttggtgattggactccctggagactcaagcccactacaggtggccattaaaacccttcctgagctctgttctcctcaggacgagctagactttctaatggaagcacttataatatctaaatttcgacatcaaaacatagtgaggtgcgtggggctaagtctgcgggctactccacgtctgatcctgcttgaactaatgagtgggggagatatgaagtctttcttgcggcacagtagacctcacctgggacaaccttcacccctcgtcatgagggacctcctacagcttgcccaagatatcgcccagggttgtcactatctagaggagaaccacttcatccaccgggatatagccgcaaggaattgtctcctgtcttgtgccggcccctcacgagtggcgaaaattggagacttcggcatggcacgtgacatctatcgcgccagctactatagacggggcgacagagccctgctgccagtgaagtggatgccacctgaggccttcctggaaggtatttttactagtaagacggatagctggagtttcggtgttttgctgtgggaaatctttagcctgggttacatgccatacccaggtagaacaaatcaggaggtgttagacttcgttgtgggtggcggccgcatggatcccccgcgcggctgccctgggcccgtttaccgcatcatgacgcagtgctggcagcacgaacccgaattgcgaccctcatttgcgtctatccttgagcggctccagtattgcacacaggacccagacgtcctgaatagtcttctgccaatggaacttggaccaacacccgaggaagagggcacaagtggcctcggaaaccggtccctggagtgtctgcgcccgccacaacctcaggaactatccccagaaaagttgaagtcttggggcggcagtcccctgggtccgtggctttcttctgggctgaagcctcttaaaagcagaggcttgcaaccgcagaacctttggaaccccacttacaggtcatag

SEQ ID NO: 127656 - DNA, 2595 bp, Artificial Sequence
  derived and/or modified sequence
atgggctgctggggccagctgctggtgtggtttggagctgctggggccatcctgtgcagcagccctggcagccaggagaccttcctgcggagcagccccctgcccctggccagccccagcccccgggaccccaaggtgtctgcccctccttccatcctggagcccgccagccccctgaacagccctggaacagagggctcctggctgttcagcacctgtggggccagcggcagacatggccccacccagacccagtgtgatggagcctatgccggcacctctgtggtggtgacagtgggcgccgccggccagctgcggggcgtgcagctgtggagggtgcccggccctggccagtacctgatcagcgcctacggggctgctgggggcaagggggccaagaaccacctgagccgggcccacggcgtgtttgtgtctgccatcttcagcctgggcctgggggagagcctgtacatcctggtgggccagcagggagaagatgcctgccctgggggcagccctgagagccagctggtgtgcctgggggagagcagagctgtggaggagcacgccgccatggatggcagcgagggcgtgcccggcagccgccgctgggccggcggcggcggcggcggcggcggggccacctacgtgttccgggtgcgggccggggagctggagcccctgctggtggccgccggcggcggcggccgggcctacctgcggccccgggaccggggccgcacccaggccagccctgagaagctggagaacagaagtgaggcccctggcagcggcggccggggcggcgctgctgggggcggcggcggctggaccagccgggcccccagcccccaggccggccgcagcctgcaggagggcgctgagggcggccagggctgcagcgaggcctgggccaccctgggctgggccgccgccggcggctttggaggcggcggcggggcctgcacagctgggggcggcggcggcggctacagaggaggagatgccagcgagacagacaacctgtgggcagatggagaagatggagtgtccttcatccaccccagcagcgagctgttcctgcagcccctggccgtgacagagaaccacggggaggtggagatccgccgccacctgaactgcagccactgccccctgcgggactgccagtggcaggccgagctgcagctggctgaatgtctgtgcccagagggcatggagctggccgtggacaacgtgacctgcatggacctgcacaagcccccaggccccctggtgctgatggtggccgtggtggccaccagcaccctgagcctgctgatggtgtgtggggtgctgatcctggtgaagcagaagaagtggcagggcctgcaggagatgaggctgcccagccctgagctggagctgagcaagctgcggaccagcgccatcagaacagcccccaacccctactactgccaggtgggcctgggccctgcccagagctggcccctgcccccaggagtgacagaggtgtccccagccaacgtgaccctgctgcgggccctgggccacggggcctttggagaggtgtatgagggcctggtgattggcctgcccggggacagcagccccctgcaggtggccatcaagaccctgcctgagctgtgcagcccccaggatgagctggacttcctgatggaggccctgatcatcagcaagttccgccaccagaacatcgtgcgctgtgtgggcctgagcctgcgggccacccccaggctcatcctgctggagctgatgtctggaggagacatgaagagcttcctgcggcacagccggccccacctgggccagcccagccccctggtgatgagggacctgctgcagctggcccaggacatcgcccagggctgccactacctggaggagaaccacttcatccaccgggacattgctgccaggaactgcctgctgagctgtgccggccccagccgggtggccaagatcggggactttggcatggcccgggacatctaccgggccagctactaccgccgcggggaccgggccctgctgcctgtgaagtggatgcctcctgaggccttcctggagggcatcttcaccagcaagacagacagctggagctttggagtgctgctgtgggagatcttcagcctgggctacatgccctacccaggccgcaccaaccaggaggtgctggactttgtggtgggcggcggccgcatggaccccccccggggctgccccggccctgtgtaccgcatcatgacccagtgctggcagcacgagcctgagctgcggcccagctttgccagcatcctggagcggctgcagtactgcacccaggaccctgatgtgctgaacagcctgctgcccatggagctgggccccaccccagaggaggagggcaccagcggcctgggcaacagaagcctggagtgcctgcggcccccccagccccaggagctgagccctgagaagctgaagtcctggggcggcagccccctgggcccctggctgagcagcggcctgaagcccctgaagagccggggcctgcagccccagaacctgtggaaccccacctaccgctcctag

SEQ ID NO: 127657 - DNA, 3100 bp, Artificial Sequence
  derived and/or modified sequence
agctttaggtccggggagtgtctcgccagcggcagcacacccctgtaagtggtggccagggctgccgtggcaaaatgagctgtcaactttaggttgacaggggtgtggccgcgaccgcaagggcttttgttgccgggtggacccaacagggatgggctgctggggacagctgctggtgtggttcggagccgcgggcgccattctctgctctagcccggggtcccaggagacttttctgcggtcctcgcccctgccgctggcaagtcccagcccccgggacccgaaagtcagcgccccgcctagtatcttggagccagcctccccgctgaattctccgggcaccgaggggtcttggctgttttctacctgcggggccagcggccggcatgggcccacacagacacaatgtgacggggcgtacgcggggaccagcgtggtggtgaccgtgggggccgccgggcagctgagaggcgtgcagctgtggcgcgtgccgggccctggccagtatctgatctcagcctacggagccgcgggcggcaaaggcgccaagaaccacctgtcgcgggcgcatggcgtcttcgtctcagcaatcttctccctcggtctcggggagtcgctgtacatcctggtggggcagcagggagaggacgcctgtcccggaggtagcccggagagccagctcgtctgcctcggggagtctcgagccgttgaagagcacgcggcgatggatgggagcgaaggggtcccggggtcgcggcgctgggcgggaggtggcgggggtggcgggggcgccacctacgttttccgggtgcgcgctggcgagctggaaccgttgctggtggcggccggaggcggcggtcgggcctacctgaggccgcgggaccgaggccggactcaggcctcccccgagaaactggagaaccgctcggaggcgcccgggagcggcgggagaggcggggcggcaggtggtgggggcggctggacgtcgcgggctccctctccgcaggccggccgctcactgcaggagggggcggagggcggccagggctgctccgaggcttgggcgacccttggctgggccgcggccggcggcttcgggggcggcggcggggcctgcactgcgggcggaggcggcggcggctacagggggggcgacgcttcagagactgacaacctctgggctgatggggaagatggagtatccttcatacaccccagcagcgagctcttcctgcagcctctggcagtcaccgagaaccacggagaggtagagatccgaaggcacctcaactgcagtcactgccctttgagagactgccaatggcaggcagagctccagctggctgaatgcctgtgcccagaaggcatggagctagctgtggataacgtcacctgcatggacctgcacaagcccccaggccctctggttctgatggtggctgtggtggcaacctcaacactgagcctccttatggtgtgtggggtcctgattctggtgaagcagaagaagtggcagggcctgcaggagatgaggctgccgagccctgagcttgagctgagcaagcttcgaacctctgccatcaggacagcccccaatccctattattgccaggtggggcttggcccggcccagtcctggcctctgccaccaggtgtcaccgaggtttccccagccaatgttactctgctcagagccctgggccatggtgcctttggggaggtgtatgagggactggtaattggccttcctggggactccagtcccctgcaggtagctatcaagaccctgccagaactctgctcgcctcaggatgagctggatttcctcatggaggccctcatcatcagcaagtttcgccatcagaacattgtgcggtgtgtggggctcagcctcagggccacccctcgcctcattctgctggaactgatgtctggaggggacatgaagagtttcctgaggcacagtcggccacacctgggccagccatcacctctggtcatgcgggacctgctgcaactggcccaggacatagcccagggctgccactacctggaggaaaatcacttcatccacagggatattgccgcccggaactgcctgctgagctgcgctggacccagccgagtggccaagattggggactttgggatggcacgagatatctaccgggccagttattaccgcaggggggaccgggccttgctcccagtcaagtggatgcccccagaggccttcctggagggcatcttcacatccaagacagattcctggtcttttggggtgctgctctgggagatcttctcactgggctacatgccctatcctgggcgcaccaaccaggaggtgctggacttcgtcgttggaggaggccggatggaccctcctaggggctgcccagggcctgtgtaccgcatcatgacccagtgttggcagcacgagcctgagctccgccctagctttgccagcatcttggagcgtctgcagtactgcactcaggacccggatgtgctgaattcactcctgccaatggagctggggcccaccccagaggaggaagggacttctgggctggggaacagatctttggagtgcctaagacccccacagccccaggaactgagtccagagaagttgaaaagctggggaggtagccctcttggcccctggctgtcctctggcctcaagcccctcaaatccaggggcctccaacctcagaacctttggaatcccacttatcgctcctgagccccaaggggccctgagggtaaggactgaggcactgagggtccctccctatactcctcaggctcctgggtggcctgttatgccagcggcctctgttccctgcagtctgtgctgtgtgtctgggcctgtctcggggctggcctggcagcgctgcacttgccatgctggaaaccagcccaggcctcccagggaagggcccagccacttccagcttttgatcttggggccagaggccgccttacacacaccccaggtgtccatggggagcactggattgctctcccattatgagcatccttcatctgggcagaccccccaccctgcagatgcttctaataaaaagctcttctcatc

SEQ ID NO: 127658 - DNA, 2595 bp, Artificial Sequence
  derived and/or modified sequence
atgggctgctggggccagctgctggtgtggttcggcgccgccggcgcgatattgtgcagcagtcctggctcccaggaaactttcctgcgtagcagccctcttcccctcgctagcccaagtcctcgtgatcccaaggtgtccgccccaccttccattctggagcctgcctccccccttaattcccccggcacagagggaagctggctcttctccacgtgtggcgccagtggccgccacggtcctacccagacacaatgtgatggggcatacgccgggacaagcgtcgtagttacagtcggggctgcaggccagctacgcggagttcagctctggcgagtccccggtccaggtcagtacctgatatcagcatatggcgctgctgggggtaagggggcaaagaatcatctatccagggcacacggggtgttcgtttctgccatctttagtcttggtcttggtgagtctctgtatatactggtgggccagcaaggcgaagatgcttgcccaggtggatcccctgaaagtcaattagtttgcctgggcgagagccgtgcagtggaagagcacgccgcaatggacggttcagagggcgtgcccggatcccgtcggtgggcagggggcggtggggggggaggaggagctacgtacgtgtttagagtcagagcaggggaactcgagcctctgttggtagccgccggagggggcggacgtgcatacctgagaccgagagaccgcggcagaactcaggcatctcccgagaagttggagaacaggagcgaagctcctggcagcggtggccgaggaggcgccgctggaggtggtggagggtggacttcaagagctccatcccctcaggcaggccgctcactccaggagggagcggaaggtgggcaggggtgcagcgaggcatgggccacgttgggatgggccgctgccggaggattcggcggtggagggggggcttgtacagcagggggcggcggtggaggttatagaggtggggacgctagtgaaacggacaacctgtgggccgatggagaggatggcgtctcctttattcatccttcctctgagctgttcctccagccattagccgtgacggaaaatcatggcgaggtcgaaatcaggaggcacttgaattgcagccactgccccctgcgagattgccagtggcaagctgaactgcagcttgccgaatgtctgtgcccagaaggaatggaactcgcagtggacaacgtgacctgtatggatctccataagccccccggacctcttgtcctgatggtagcggtcgtggcgacctccacattgagtctgcttatggtgtgtggtgtgctgatactggtaaagcagaagaagtggcaagggctgcaggaaatgcggctgccaagccccgaactcgaactgagcaaattacggacgtctgcaatccgtactgcccccaacccttactactgccaagtcggtctgggccctgctcaaagttggcctctgccgcccggggtaacagaagtgagtccggccaacgtgactcttctccgtgcattgggacacggggctttcggggaggtgtacgaaggattggtgatcggactgccaggggatagtagtccccttcaagtggccatcaaaactcttccggaactttgtagcccacaggacgagctcgactttctcatggaagccctcattatatccaaattccggcaccagaatattgtccggtgtgttggcctgagcttgagggccacccctagattaatactgctggagctcatgtctggaggagacatgaaatccttcttgcgccactctaggccccacttaggacagccttctccactggtgatgcgggacctgctgcaactggcccaggatatcgctcaaggttgtcactatttggaagaaaaccacttcatacatcgcgatattgccgcccgaaattgtctactctcttgcgcgggcccttctagggtggccaaaatcggggacttcggcatggcacgtgacatctatcgagccagttactaccgtcgaggggatagggccctccttcctgtcaagtggatgccacctgaggcgtttctcgagggaatcttcacgtctaaaaccgactcttggagctttggggtgctgttgtgggaaatcttttccctgggctatatgccctacccgggccgcaccaatcaggaagttttagacttcgttgtgggtgggggcagaatggacccacccagaggatgccccggccctgtgtacaggataatgacccagtgctggcagcatgaacctgaacttcggcccagcttcgccagtatcctggagcgcttgcaatattgtactcaggatcccgatgtgctcaactctctcctgcctatggagctgggccccaccccagaggaggaaggcacctccgggttggggaatcggtccttggagtgccttcgcccaccacagccccaggagctctcccctgaaaaactcaaatcttggggaggctctccacttgggccctggctgtcatccggcttaaaacccctgaaatcgcgcggattgcagccgcagaacctctggaatccgacatatcgctcttag

SEQ ID NO: 127659 - DNA, 2595 bp, Artificial Sequence
  derived and/or modified sequence
atgggatgttggggccagctgttggtgtggttcggtgcagcaggtgccattctgtgctcctcgccaggctcccaagaaacatttctgcgaagctcccctctgccactcgcctccccctctcccagagacccaaaggtatccgccccaccctcaatcctggaacccgcatctccgcttaatagtcccggaacagagggatcctggctgttttctacttgcggcgcatcaggtaggcacgggccaacacagacccaatgcgacggagcttacgctggaaccagcgtagttgtgactgtgggcgcagccggacaactgagaggagttcagttgtggagggtccctggtcccggtcagtacttaattagtgcttacggggctgctgggggaaagggtgcgaagaaccacctgtctagagcacacggcgtgttcgtgtcagctatattctccctgggactgggcgaatctctgtacatcttggtgggacagcagggcgaggatgcatgtcccggaggaagccccgaatcccagctcgtttgcttgggcgaaagtcgcgcagtagaggaacacgccgcaatggatggcagtgaaggagttcccggttcacgtcggtgggccggagggggtggaggtgggggtggtgcgacctatgtatttcgcgtgcgcgcaggcgagctggaacctttactagttgccgctggcggagggggacgagcttacttgaggcccagagatcgcggaagaactcaagcctcgcctgaaaagctggagaaccggtcagaggcccctggctctggagggcgaggtggggctgcaggagggggaggcggttggacatctagggccccttcgccacaagcaggccgttcactgcaagaaggagctgaagggggacagggatgttctgaagcatgggctaccctcgggtgggctgcagccggagggttcggaggaggaggcggtgcttgtactgctggagggggaggcggaggatacaggggcggagacgcttctgaaacagacaacttgtgggcagacggagaggacggcgtgtcctttattcatccaagctcagagttatttttgcagcctctcgctgtgaccgagaaccacggcgaggttgagatacgcagacacctgaactgcagccactgcccactgagggattgccagtggcaggcagaactccagctggccgagtgtttatgtccagaagggatggagctcgctgtggacaacgtgacttgtatggatcttcacaagcccccaggtcccctcgtcttgatggttgccgtcgtggccactagtactttatcgttgctcatggtgtgcggtgttctgatcctggtcaagcagaagaagtggcaaggccttcaggaaatgcgattgccctccccagagctggaactgtctaaactgcggaccagtgctattcggacggcaccaaatccatactattgccaggtggggctgggccctgctcaatcctggcccttaccacccggtgtgacagaagttagtccagcgaatgtgacactcctgagggccctcgggcacggtgcattcggggaagtgtacgagggcctggttatcggattaccaggcgactcgtctccactgcaggtggcgattaagactctgccagagctgtgcagcccgcaggatgaactggatttcttaatggaggctctcattatctctaaatttagacaccagaacatcgttaggtgcgtcgggcttagcctaagggcgaccccccgactcatcctgcttgaactaatgtctggtggggacatgaaatcattcctgagacatagccggccacacttgggccagccctcacctctggtaatgcgggatttgcttcagcttgctcaggacatcgcccagggttgccactatctggaggaaaatcacttcatccatagggatattgccgctcggaattgcctgctttcctgtgctggcccaagccgagtagcaaaaatcggcgacttcggtatggcgagggacatttatagggcctcgtattacagacggggagaccgcgcactattgcctgtcaagtggatgccaccagaagccttcttggaggggattttcactagcaagaccgattcttggagtttcggcgtcttgctgtgggaaatcttcagcctggggtacatgccctaccctggaaggacaaaccaagaagtactggacttcgtggttgggggtggtcggatggacccgcctagaggatgcccagggcctgtctacagaatcatgacgcaatgttggcaacatgaaccagagttgagacccagcttcgcatctattctggaacggctgcaatactgtacacaggaccccgacgtgctcaactctttactgccgatggagctggggccaacacctgaggaggagggtacttcaggacttgggaaccggagtctcgaatgtctcaggcctccacagcctcaggagctctcacctgagaaacttaagtcatggggcggttcccccctgggaccatggttatcctctggcttgaagccactcaagtcgagagggcttcaaccgcaaaacttgtggaaccccacatatagatcttag

SEQ ID NO: 127660 - DNA, 2595 bp, Artificial Sequence
  derived and/or modified sequence
atgggctgctggggccagctgctggtgtggttcggcgccgccggcgccatcctgtgcagcagccccggcagccaggagaccttcctgagaagcagccccctgcccctggccagccccagccccagagaccccaaggtgagcgccccccccagcatcctggagcccgccagccccctgaacagccccggcaccgagggcagctggctgttcagcacctgcggcgccagcggcagacacggccccacccagacccagtgcgacggcgcctacgccggcaccagcgtggtggtgaccgtgggcgccgccggccagctgagaggcgtgcagctgtggagagtgcccggccccggccagtacctgatcagcgcctacggcgccgccggcggcaagggcgccaagaaccacctgagcagagcccacggcgtgttcgtgagcgccatcttcagcctgggcctgggcgagagcctgtacatcctggtgggccagcagggcgaggacgcctgccccggcggcagccccgagagccagctggtgtgcctgggcgagagcagagccgtggaggagcacgccgccatggacggcagcgagggcgtgcccggcagcagaagatgggccggcggcggcggcggcggcggcggcgccacctacgtgttcagagtgagagccggcgagctggagcccctgctggtggccgccggcggcggcggcagagcctacctgagacccagagacagaggcagaacccaggccagccccgagaagctggagaacagaagcgaggcccccggcagcggcggcagaggcggcgccgccggcggcggcggcggctggaccagcagagcccccagcccccaggccggcagaagcctgcaggagggcgccgagggcggccagggctgcagcgaggcctgggccaccctgggctgggccgccgccggcggcttcggcggcggcggcggcgcctgcaccgccggcggcggcggcggcggctacagaggcggcgacgccagcgagaccgacaacctgtgggccgacggcgaggacggcgtgagcttcatccaccccagcagcgagctgttcctgcagcccctggccgtgaccgagaaccacggcgaggtggagatcagaagacacctgaactgcagccactgccccctgagagactgccagtggcaggccgagctgcagctggccgagtgcctgtgccccgagggcatggagctggccgtggacaacgtgacctgcatggacctgcacaagccccccggccccctggtgctgatggtggccgtggtggccaccagcaccctgagcctgctgatggtgtgcggcgtgctgatcctggtgaagcagaagaagtggcagggcctgcaggagatgagactgcccagccccgagctggagctgagcaagctgagaaccagcgccatcagaaccgcccccaacccctactactgccaggtgggcctgggccccgcccagagctggcccctgccccccggcgtgaccgaggtgagccccgccaacgtgaccctgctgagagccctgggccacggcgccttcggcgaggtgtacgagggcctggtgatcggcctgcccggcgacagcagccccctgcaggtggccatcaagaccctgcccgagctgtgcagcccccaggacgagctggacttcctgatggaggccctgatcatcagcaagttcagacaccagaacatcgtgagatgcgtgggcctgagcctgagagccacccccagactgatcctgctggagctgatgagcggcggcgacatgaagagcttcctgagacacagcagaccccacctgggccagcccagccccctggtgatgagagacctgctgcagctggcccaggacatcgcccagggctgccactacctggaggagaaccacttcatccacagagacatcgccgccagaaactgcctgctgagctgcgccggccccagcagagtggccaagatcggcgacttcggcatggccagagacatctacagagccagctactacagaagaggcgacagagccctgctgcccgtgaagtggatgccccccgaggccttcctggagggcatcttcaccagcaagaccgacagctggagcttcggcgtgctgctgtgggagatcttcagcctgggctacatgccctaccccggcagaaccaaccaggaggtgctggacttcgtggtgggcggcggcagaatggacccccccagaggctgccccggccccgtgtacagaatcatgacccagtgctggcagcacgagcccgagctgagacccagcttcgccagcatcctggagagactgcagtactgcacccaggaccccgacgtgctgaacagcctgctgcccatggagctgggccccacccccgaggaggagggcaccagcggcctgggcaacagaagcctggagtgcctgagacccccccagccccaggagctgagccccgagaagctgaagagctggggcggcagccccctgggcccctggctgagcagcggcctgaagcccctgaagagcagaggcctgcagccccagaacctgtggaaccccacctacagaagctag

SEQ ID NO: 127661 - protein, 338 aa, Artificial Sequence
  derived and/or modified sequence
MSLSAFTLFLALIGGTSGQYYDYDFPLSIYGQSSPNCAPECNCPESYPSAMYCDELKLKSVPMVPPGIKYLYLRNNQIDHIDEKAFENVTDLQWLILDHNLLENSKIKGRVFSKLKQLKKLHINHNNLTESVGPLPKSLEDLQLTHNKITKLGSFEGLVNLTFIHLQHNRLKEDAVSAAFKGLKSLEYLDLSFNQIARLPSGLPVSLLTLYLDNNKISNIPDEYFKRFNALQYLRLSHNELADSGIPGNSFNVSSLVELDLSYNKLKNIPTVNENLENYYLEVNQLEKFDIKSFCKILGPLSYSKIKHLRLDGNRISETSLPPDMYECLRVANEVTLN

SEQ ID NO: 127662 - DNA, 1017 bp, Artificial Sequence
  derived and/or modified sequence
atgtccctgtcagccttcactttgtttctcgcactgatcggaggcaccagcgggcaatactatgattacgactttcccctgagcatttatggccagtctagccctaactgcgcccctgagtgtaactgccctgaaagttatcccagtgcaatgtattgtgatgagttgaaacttaaatcagtgccaatggtcccccccggtataaaatatctctacctacgaaacaatcagatcgaccacatcgacgagaaggcctttgagaatgtgactgatttacagtggctaatcctcgaccataacctgttggagaatagcaaaatcaagggtagagtcttctctaaattgaagcaactcaaaaaactgcatataaaccacaataacctgaccgaatcagtcggccctctccccaagagcctggaagacctccaactgacacacaataaaatcactaaacttggcagcttcgaagggctggtgaatctaacgtttatacatctgcaacacaaccggctcaaagaagacgccgtttcagccgccttcaaagggctgaagtccctggagtacttggacctgagcttcaaccaaatagcccgactcccctccggcctgcccgtgagtctgctgaccctctatttggacaataataagatcagcaatattccagatgagtattttaagcggtttaatgccctgcagtatctgcgcctgtcccacaacgagctggccgatagcggtatccctggcaatagcttcaacgtaagctcactcgtggagttggatttaagttacaacaaactcaagaatattcctacggtaaacgaaaacctcgaaaattattatctcgaggtcaatcagctcgagaaattcgacattaaatcgttctgtaagattttgggtcccctatcatactcaaagataaagcacctccggctggacggaaacagaatcagtgaaacatccctcccccccgacatgtacgagtgccttagagtggccaacgaggtcacacttaattag

SEQ ID NO: 127663 - DNA, 1017 bp, Artificial Sequence
  derived and/or modified sequence
atgagcctgagcgccttcaccctcttcctggccctgattggaggcaccagcggccagtactatgactatgacttccccctgagcatctacggccagagcagccccaactgtgcccctgagtgcaactgcccagagagctaccccagcgccatgtactgtgatgagctgaagctgaagtctgtgcccatggtgcccccaggcatcaagtacctgtacctgaggaacaaccagattgaccacattgatgagaaggcctttgaaaatgtgacagacctgcagtggctgatcctggaccacaacctgctggagaacagcaagatcaagggccgggtcttcagcaagctgaagcagctgaagaagctgcacatcaaccacaacaacctgacagaatctgtgggccccctgcccaagagcctggaggacctgcagctgacccacaacaagatcaccaagctgggcagctttgagggcctggtgaacctgaccttcatccacctgcagcacaaccggctgaaggaggatgctgtgtctgctgccttcaagggcctgaagagcctggagtacctggacctgtccttcaaccagatcgcccggctgcccagcggcctgcctgtgtccctgctgaccctgtacctggacaacaacaagatcagcaacatcccagatgagtacttcaagcgcttcaatgccctgcagtacctgcggctgagccacaatgagctggccgacagcggcatccctggcaacagcttcaacgtgagcagcctggtggagctggacctgagctacaacaagctgaagaacatccccaccgtgaatgaaaacctggagaactactacctggaggtgaaccagctggagaagtttgacatcaagagcttctgcaagatcctgggccccctgagctacagcaagatcaagcacctgcggctggatggcaaccgcatcagcgagaccagcctgcccccagacatgtatgaatgtctgcgggtggccaatgaggtgaccctgaactag

SEQ ID NO: 127664 - DNA, 3008 bp, Artificial Sequence
  derived and/or modified sequence
gagcacattgcacttaattgttgccacagccacagatgtaaagaggcttgtaagaaaaatgttctcacagtgagcttccttatttgaagcaggactcaattcttggttaaaagctatggtatttgagctagttaaacacatatctctctcccattccatagggaatgagctgggctgtcctttctccccacgttcacctgcacttcgttagagagcagtgttcacatgccacaccacaagatccccacaatgacataactccattcagagactggcgtgactgggctgggtctccccaccccccttcagctcttgtatcactcagaatctggcagccagttccgtcctgacagagttcacagcatatattggtggattcttgtccatagtgcatctgctttaagaattaacgaaagcagtgtcaagacagtaaggattcaaaccatttgccaaaaatgagtctaagtgcatttactctcttcctggcattgattggtggtaccagtggccagtactatgattatgattttcccctatcaatttatgggcaatcatcaccaaactgtgcaccagaatgtaactgccctgaaagctacccaagtgccatgtactgtgatgagctgaaattgaaaagtgtaccaatggtgcctcctggaatcaagtatctttaccttaggaataaccagattgaccatattgatgaaaaggcctttgagaatgtaactgatctgcagtggctcattctagatcacaaccttctagaaaactccaagataaaagggagagttttctctaaattgaaacaactgaagaagctgcatataaaccacaacaacctgacagagtctgtgggcccacttcccaaatctctggaggatctgcagcttactcataacaagatcacaaagctgggctcttttgaaggattggtaaacctgaccttcatccatctccagcacaatcggctgaaagaggatgctgtttcagctgcttttaaaggtcttaaatcactcgaataccttgacttgagcttcaatcagatagccagactgccttctggtctccctgtctctcttctaactctctacttagacaacaataagatcagcaacatccctgatgagtatttcaagcgttttaatgcattgcagtatctgcgtttatctcacaacgaactggctgatagtggaatacctggaaattctttcaatgtgtcatccctggttgagctggatctgtcctataacaagcttaaaaacataccaactgtcaatgaaaaccttgaaaactattacctggaggtcaatcaacttgagaagtttgacataaagagcttctgcaagatcctggggccattatcctactccaagatcaagcatttgcgtttggatggcaatcgcatctcagaaaccagtcttccaccggatatgtatgaatgtctacgtgttgctaacgaagtcactcttaattaatatctgtatcctggaacaatattttatggttatgtttttctgtgtgtcagttttcatagtatccatattttattactgtttattacttccatgaattttaaaatctgagggaaatgttttgtaaacatttattttttttaaagaaaagatgaaaggcaggcctatttcatcacaagaacacacacatatacacgaatagacatcaaactcaatgctttatttgtaaatttagtgtttttttatttctactgtcaaatgatgtgcaaaaccttttactggttgcatggaaatcagccaagttttataatccttaaatcttaatgttcctcaaagcttggattaaatacatatggatgttactctcttgcaccaaattatcttgatacattcaaatttgtctggttaaaaaataggtggtagatattgaggccaagaatattgcaaaatacatgaagcttcatgcacttaaagaagtatttttagaataagaatttgcatacttacctagtgaaacttttctagaattatttttcactctaagtcatgtatgtttctctttgattatttgcatgttatgtttaataagctactagcaaaataaaacatagcaaatggcatcactgtgtttgacttcttgtgaaatttctgtactttgtatataaaatacataaaacaatagattagaaatcaaaagatatctctggcctgcaatattttactgatgtgaacataggattttccactaaataatttgtctacttctagcattcacttacaaagagttcttaaaaacacctataataggtacttagatttcacaacttacttagatatttgtcattattcccattcctggtgtttttactggttcatatacaatggtattctattagataagaagctgctatgtgatctcagcactcactccttggttgtcaagaaatggtggataactcacaggattaaaaatgaatgaatataaaattttctgaaatagatatttaaaaaatcattttagcttgaagccaatatgtctggatcataggttttgagttcataatccagtaataacagctttcagctttctatgagtatatacaattctatacaatgataaatactctgcatataatttataaaaataacttctgttttacctagttaacaataaaacctatgtgtggagccaaatgttatgcagacaaaggtctgctcatcccataccagtgtatatatagtcaaatatgtgtctagtacaaataaaatgtatctctaaggcataaaatgttttaacacaccacttttagtgaactctatcttatggtacagcggcctttcatcagaggatcatcattgagactgagttgactggcagatatgtgcgatggatattacattaggtacaatgtgtatttttgattttcatgagttttctacattaaggtaaattccttagagtgtgatagcagcctcagtttatttgttggtttaaacttgaaatctactttttctcgataaaactataatgtagatgaa

SEQ ID NO: 127665 - DNA, 1017 bp, Artificial Sequence
  derived and/or modified sequence
atgagcctgagcgccttcaccctgttcctggccctgatcggcggcacatcgggccagtactacgattatgacttcccactgtcaatctacggccagagctctcccaactgtgccccagagtgcaactgtcccgaatcatacccttcagcaatgtactgcgatgaactgaagttgaagtccgtgcccatggttccacctggaattaaatacctgtacctgcgcaataatcagattgatcacatagacgagaaagcttttgaaaacgtgacggacctgcagtggctaatcttggaccacaatttacttgagaattctaaaattaagggacgcgtgttttcaaaactcaagcaattaaagaaactgcacataaatcataacaatctcacagaatcagttggacccctaccgaaaagcctcgaggacctgcagttaacgcataataaaattaccaagctgggttcattcgaaggactcgtgaatctcaccttcatccatctgcaacacaacagactcaaggaggacgccgtcagtgctgcattcaagggtctgaaaagcctcgaatacctagaccttagctttaatcagatcgcccggctacccagtgggctgcccgtgagtctgcttacattgtacttagataataataagatatctaatatccccgacgagtacttcaagcggttcaatgctctccagtatctgagacttagtcacaacgaactggccgattctggcattcccggcaactctttcaatgtctcgagtctggttgagttggacttatcttacaacaagctgaagaacataccaaccgtcaatgagaatctcgaaaactattaccttgaagtaaaccagctcgaaaagttcgacatcaaatccttttgtaaaatcctaggacccctgtcttattcaaagatcaagcacctgagattggacgggaatagaatcagtgagacttcacttccacccgatatgtacgagtgtctgcgtgtggcaaacgaagtgactttgaactag

SEQ ID NO: 127666 - DNA, 1017 bp, Artificial Sequence
  derived and/or modified sequence
atgtctctcagtgccttcacattgttccttgccctgataggaggcacctctggacagtattatgattacgatttccccctgtctatctacggtcagtcgtcccccaactgcgcccctgagtgcaactgtcccgaatcatatcccagcgccatgtattgtgatgagctaaagttaaaaagtgtgcctatggtcccccctggaataaagtatctttatctccggaacaaccagatcgatcatattgatgaaaaggcatttgaaaatgttactgacttgcagtggctgatccttgaccataacttgctggagaacagtaagattaaaggacgggtgtttagtaagcttaaacagctgaagaaactccatatcaaccataacaacctgactgagtccgtcggaccgctccctaagtcgctggaggaccttcagcttacacacaacaagataacaaagctgggctcgtttgaggggttggtgaaccttaccttcatccacctccagcacaacaggctgaaggaagatgctgtcagcgctgcgtttaaggggttgaagtcactggaatacctcgatctgtcgtttaaccagatagctaggctgccctccggtctccctgtatcactgcttacattatatctggataacaataagatctcaaacatacccgacgaatacttcaagagattcaacgcactccagtacctgaggctttcgcacaacgagcttgccgatagcggaatacccggaaattccttcaatgtgagctcattggtagagttggatctgtcttacaacaagttgaagaacatccccactgtcaacgaaaaccttgaaaattactatctcgaggtcaatcaactggaaaaattcgatataaagtctttttgtaagatattaggcccactttcttacagcaaaataaagcatctgcggctcgatggcaatcgaatctctgagacctcactccctccagacatgtacgagtgcctgagggtggctaacgaggtgaccttgaactag

SEQ ID NO: 127667 - DNA, 1017 bp, Artificial Sequence
  derived and/or modified sequence
atgagcctgagcgccttcaccctgttcctggccctgatcggcggcaccagcggccagtactacgactacgacttccccctgagcatctacggccagagcagccccaactgcgcccccgagtgcaactgccccgagagctaccccagcgccatgtactgcgacgagctgaagctgaagagcgtgcccatggtgccccccggcatcaagtacctgtacctgagaaacaaccagatcgaccacatcgacgagaaggccttcgagaacgtgaccgacctgcagtggctgatcctggaccacaacctgctggagaacagcaagatcaagggcagagtgttcagcaagctgaagcagctgaagaagctgcacatcaaccacaacaacctgaccgagagcgtgggccccctgcccaagagcctggaggacctgcagctgacccacaacaagatcaccaagctgggcagcttcgagggcctggtgaacctgaccttcatccacctgcagcacaacagactgaaggaggacgccgtgagcgccgccttcaagggcctgaagagcctggagtacctggacctgagcttcaaccagatcgccagactgcccagcggcctgcccgtgagcctgctgaccctgtacctggacaacaacaagatcagcaacatccccgacgagtacttcaagagattcaacgccctgcagtacctgagactgagccacaacgagctggccgacagcggcatccccggcaacagcttcaacgtgagcagcctggtggagctggacctgagctacaacaagctgaagaacatccccaccgtgaacgagaacctggagaactactacctggaggtgaaccagctggagaagttcgacatcaagagcttctgcaagatcctgggccccctgagctacagcaagatcaagcacctgagactggacggcaacagaatcagcgagaccagcctgccccccgacatgtacgagtgcctgagagtggccaacgaggtgaccctgaactag

SEQ ID NO: 127668 - protein, 655 aa, Artificial Sequence
  derived and/or modified sequence
MVAPKSHTDDWAPGPFSSKPQRSQLQIFSSVLQTSLLFLLMGLRASGKDSAPTVVSGILGGSVTLPLNISVDTEIENVIWIGPKNALAFARPKENVTIMVKSYLGRLDITKWSYSLCISNLTLNDAGSYKAQINQRNFEVTTEEEFTLFVYEQLQEPQVTMKSVKVSENFSCNITLMCSVKGAEKSVLYSWTPREPHASESNGGSILTVSRTPCDPDLPYICTAQNPVSQRSSLPVHVGQFCTDPGASRGGTTGETVVGVLGEPVTLPLALPACRDTEKVVWLFNTSIISKEREEAATADPLIKSRDPYKNRVWVSSQDCSLKISQLKIEDAGPYHAYVCSEASSVTSMTHVTLLIYRRLRKPKITWSLRHSEDGICRISLTCSVEDGGNTVMYTWTPLQKEAVVSQGESHLNVSWRSSENHPNLTCTASNPVSRSSHQFLSENICSGPERNTKLWIGLFLMVCLLCVGIFSWCIWKRKGRCSVPAFCSSQAEAPADTPEPTAGHTLYSVLSQGYEKLDTPLRPARQQPTPTSDSSSDSNLTTEEDEDRPEVHKPISGRYEVFDQVTQEGAGHDPAPEGQADYDPVTPYVTEVESVVGENTMYAQVFNLQGKTPVSQKEESSATIYCSIRKPQVVPPPQQNDLEIPESPTYENFT

SEQ ID NO: 127669 - DNA, 1968 bp, Artificial Sequence
  derived and/or modified sequence
atggtggcgcctaagagtcacaccgacgattgggcccctgggcctttttctagtaaacctcaacggagccagctgcagatatttagctctgttctccagacaagtttgctgttcctgctaatggggctccgcgcgtctggcaaggattccgcaccaaccgtggtgtccgggatcctgggtggcagcgtaacacttcccctgaatattagcgtagatacagagatagagaatgtaatatggatcggaccgaaaaacgctctagccttcgcgcggcctaaggagaacgtgacgataatggttaaaagctatctggggcgccttgacattaccaagtggagttacagtttgtgcatctctaatctcacccttaatgatgccgggtcttacaaggcccagattaaccagcggaattttgaagtgaccacagaagaggaattcacacttttcgtgtacgagcaactgcaggaaccccaggttacaatgaaatcggtgaaagtgtccgagaacttctcttgcaatatcacactgatgtgtagcgtcaagggcgccgaaaaatcagtgctgtactcatggacaccccgcgagccgcacgcatctgagtccaatggcggctccatactgacggtgtcgcggactccttgcgatcccgatcttccgtatatttgtacagcacagaatcctgtctcccaaagatcttctcttcccgtgcacgtgggacagttctgcacagatcccggcgcctctcgtggcgggacaactggtgaaactgtggttggtgtgctaggagaaccagtgaccctcccgctggccctccccgcatgccgcgacacagagaaggtcgtgtggctgtttaatacaagcattatctccaaggaacgagaagaagccgccacagcagaccctctcataaagtcaagggacccgtacaaaaatcgggtgtgggtgtcaagccaagactgctctctgaaaatatcccagctgaaaatagaggacgccggcccttaccatgcctacgtgtgttccgaagcctcatctgtgacaagcatgacacatgtgactctgctgatctatcgtagacttagaaaaccgaagataacctggagcctgcgacactcagaagacggcatctgcaggatctcactcacatgctctgtggaagatggaggaaacacagtgatgtacacctggactccactgcagaaagaagcagtggtgagccagggcgaatctcacctcaacgtgtcctggagatcatcggagaaccatcctaacctgacctgcaccgccagcaaccctgtgtcaaggtcctcacatcagtttttgtccgagaacatttgcagcggtcccgagcgtaacaccaaattgtggattggtctgtttcttatggtttgtctcctgtgtgtgggcatattcagttggtgcatctggaagcggaaggggaggtgtagcgtgccagcattctgcagtagtcaagccgaggctccagcagatactcctgagcctacggctgggcatacattgtactccgtactcagccaaggatacgagaaactcgatacacctctccgtccggcacggcagcagccaacccctaccagcgactcgagctctgattcaaacctcaccacagaagaagatgaagacagacctgaggtgcacaagccgatctccggcagatacgaggtgtttgaccaggtgacccaagaaggtgccggccatgaccctgcccctgagggccaggctgattacgacccggtgactccatacgtcaccgaagtagaatcggtggtgggtgaaaatacgatgtatgcacaagtgtttaaccttcagggcaaaactccagtctcccagaaagaagaatcttcagccaccatctactgttccatcagaaagcctcaggtcgtgccaccaccacagcaaaatgatctggaaatccccgaatctcccacttacgaaaattttacatag

SEQ ID NO: 127670 - DNA, 1968 bp, Artificial Sequence
  derived and/or modified sequence
atggtggcccccaagagccacacagatgactgggcccctggccccttcagcagcaagccccagaggagccagctgcagatcttcagctctgtgctgcagaccagcctgctcttcctgctgatgggcctgcgggccagcggcaaggacagcgcccccaccgtggtgtctggcatcctgggcggctctgtgaccctgcccctgaacatctctgtggacacagaaattgaaaatgtcatctggattggccccaagaatgccctggcctttgcccggcccaaggaaaatgtgaccatcatggtgaagagctacctgggccgcctggacatcaccaagtggagctacagcctgtgcatcagcaacctgaccctgaatgatgctggcagctacaaggcccagatcaaccagaggaactttgaggtgaccacagaggaggagttcaccctgtttgtgtatgagcagctgcaggagccccaggtgaccatgaagtctgtgaaggtgtctgagaacttcagctgcaacatcaccctgatgtgcagcgtgaagggagctgagaagtctgtgctgtacagctggaccccccgggagccccacgccagcgagagcaatggaggcagcatcctgactgtgtccaggaccccctgtgaccctgacctgccctacatctgcacagcccagaaccctgtgtcccagaggagcagcctgcctgtgcacgtgggccagttctgcacagatcctggggccagccggggcggcaccactggagagaccgtggtgggcgtgctgggggagcctgtgaccctgcccctggccctgcctgcctgccgggacacagagaaggtggtgtggctgttcaacaccagcatcatcagcaaggagcgggaggaggccgccacagctgaccccctcatcaagagccgggacccctacaagaacagagtgtgggtgagcagccaggactgcagcctgaagatcagccagctgaagattgaagatgctggcccctaccacgcctacgtgtgcagcgaggccagctctgtgacctccatgacccacgtgaccctgctgatctaccgccgcctgaggaagcccaagatcacctggagcctgcggcacagtgaagatggcatctgccgcatcagcctgacctgcagcgtggaggatggcggcaacacagtgatgtacacctggacccccctgcagaaggaggccgtggtgtcccagggcgagagccacctgaatgtgtcctggaggagcagcgagaaccaccccaacctgacctgcacagccagcaaccctgtgagccgcagcagccaccagttcctgtctgagaacatctgcagcggccctgagaggaacaccaagctgtggattggcctcttcctgatggtgtgcctgctgtgtgtgggcatcttctcctggtgcatctggaagaggaagggccgctgcagcgtgcctgccttctgcagcagccaggccgaggccccagctgacaccccagagcccacagctggccacaccctgtacagcgtgctgagccagggctatgagaagctggacacccccctgcggcctgcccggcagcagcccacccccaccagtgacagcagcagtgacagcaacctgaccacagaagaagatgaagatagacctgaggtgcacaagcccatcagcggccgctatgaggtgtttgaccaggtgacccaggagggcgccggccatgaccctgcccctgagggccaggccgactatgaccctgtgaccccctacgtgacagaggtggagagcgtggtgggggagaacaccatgtatgcccaggtgttcaacctgcagggcaagacccctgtgtcccagaaggaggagagcagcgccaccatctactgcagcatcaggaagccccaggtggtgcccccaccccagcagaatgacctggagatccctgagagccccacctatgagaacttcacctag

SEQ ID NO: 127671 - DNA, 2451 bp, Artificial Sequence
  derived and/or modified sequence
gctgtggtaagtgcatcctccttcagtctcagttctgaaaatagatcatcatggtggcaccaaagagtcacacagatgactgggctcctgggcctttctccagtaagccacagaggagtcagctgcaaatattctcttctgttctacagacctctctcctcttcctgctcatgggactaagagcctctggaaaggactcagccccaacagtggtgtcagggatcctagggggttccgtgactctccccctaaacatctcagtagacacagagattgagaacgtcatctggattggtcccaaaaatgctcttgctttcgcacgtcccaaagaaaatgtaaccattatggtcaaaagctacctgggccgactagacatcaccaagtggagttactccctgtgcatcagcaatctgactctgaatgatgcaggatcctacaaagcccagataaaccaaaggaattttgaagtcaccactgaggaggaattcaccctgttcgtctatgagcagctgcaggagccccaagtcaccatgaagtctgtgaaggtgtctgagaacttctcctgtaacatcactctaatgtgctccgtgaagggggcagagaaaagtgttctgtacagctggaccccaagggaaccccatgcttctgagtccaatggaggctccattcttaccgtctcccgaacaccatgtgacccagacctgccatacatctgcacagcccagaaccccgtcagccagagaagctccctccctgtccatgttgggcagttctgtacagatccaggagcctccagaggaggaacaacgggggagactgtggtaggggtcctgggagagccagtcaccctgccacttgcactcccagcctgccgggacacagagaaggttgtctggttgtttaacacatccatcattagcaaagagagggaagaagcagcaacggcagatccactcattaaatccagggatccttacaagaacagggtgtgggtctccagccaggactgctccctgaagatcagccagctgaagatagaggacgccggcccctaccatgcctacgtgtgctcagaggcctccagcgtcaccagcatgacacatgtcaccctgctcatctaccgcaggctgaggaagcccaaaatcacgtggagcctcaggcacagtgaggatggcatctgcaggatcagcctgacctgctccgtggaggacgggggaaacactgtcatgtacacatggaccccgctgcagaaggaagctgttgtgtcccaaggggaatcacacctcaatgtctcatggagaagcagtgaaaatcaccccaacctcacatgcacagccagcaaccctgtcagcaggagttcccaccagtttctttctgagaacatctgttcaggacctgagagaaacacaaagctttggattgggttgttcctgatggtttgccttctgtgcgttgggatcttcagctggtgcatttggaagcgaaaaggacggtgttcagtcccagccttctgttccagccaagctgaggccccagcggatacaccagaacccacagctggccacacgctatactctgtgctctcccaaggatatgagaagctggacactcccctcaggcctgccaggcaacagcctacacccacctcagacagcagctctgacagcaacctcacaactgaggaggatgaggacaggcctgaggtgcacaagcccatcagtggaagatatgaggtatttgaccaggtcactcaggagggcgctggacatgacccagcccctgagggccaagcagactatgatcccgtcactccatatgtcacggaagttgagtctgtggttggagagaacaccatgtatgcacaagtgttcaacttacagggaaagaccccagtttctcagaaggaagagagctcagccacaatctactgctccatacggaaacctcaggtggtgccaccaccacaacagaatgatcttgagattcctgaaagtcctacctatgaaaatttcacctgaaaggaaaagcagctgctgcctctctcctgggaccgtggggttggaaagtcagctggacctcatggggcctggggctcacagacagaagcacctcagaatttccttcagtgcctcagagatgcctggatgtggcccctccccctccttctcacccttaaggactcccaaacccattaatagttcagacacaggctccttcttggagcctatgggcttcagatgtctttgccccatttgtcacctcgcacacttatagcgtttcctcctcgaaattctaccaagactggtcaaatgttgctgaggggcctggaccagctgtcctttacaccaccttctcaacactgctgaaaagaacccaagagaattgtcacacatgacacaagatgtacataatatcatgctcactgcagtgttatttaaaataaaaggcagg

SEQ ID NO: 127672 - DNA, 1968 bp, Artificial Sequence
  derived and/or modified sequence
atggtggcccccaagagccacaccgacgactgggcccccggccccttctccagcaagccccagcgctcccagctccagatatttagtagcgtcctccagacttccttgctcttcctgttgatgggactacgggcgtccgggaaggatagtgcgcctacagtggtgtccgggattctcggtgggagtgttacacttcctttgaatatcagcgtggacaccgagatcgaaaacgtcatttggattgggccaaagaacgctttggccttcgctaggccaaaagaaaacgttaccatcatggttaagtcctacctgggtcgattggatattaccaaatggtcttattccctgtgtatcagcaacttgactctgaatgatgctggatcttacaaagctcaaatcaatcagagaaacttcgaagtaactacagaagaggaattcacgctgtttgtctacgaacagttacaggagccgcaggtgaccatgaaatctgtcaaagtgagtgagaactttagttgcaacataaccctgatgtgcagcgttaagggcgctgagaagtcagtcctgtactcatggactcccagggagcctcacgccagtgaaagtaacggcggatcgattctgaccgtttctaggactccatgcgacccagacctcccttacatctgcaccgcccaaaatcccgttagccagcggagcagcttgcccgtacacgtgggccagttctgcactgaccctggagctagtaggggagggaccacaggggagaccgtagttggggtcctcggggaacctgtcaccctccctctcgcattacctgcctgtcgagacacagagaaggtagtgtggctattcaatacaagtataatctcgaaggaacgcgaggaagcagcaactgccgacccactgatcaagtcacgtgacccatataagaaccgcgtgtgggtcagctctcaggactgctcactcaagatctctcagctgaagatagaggacgctggaccatatcacgcttacgtgtgttccgaggcaagctccgtgacaagcatgacccacgttacgctcctgatttaccggcgactgaggaaaccaaaaattacgtggagcctgagacattcagaggacgggatatgtcgtatcagcctgacatgttcagtcgaagatggggggaatacagtcatgtacacttggacacctctgcagaaagaggccgtggtatctcagggtgaaagccatctgaacgtgagctggaggtcctcagaaaaccaccctaacctcacttgcaccgcctccaaccctgtgtccagatctagccatcaattcctttcggaaaacatatgtagtggacctgaaaggaacaccaagctctggattggtttgtttctgatggtatgtcttctgtgtgttggtattttctcctggtgcatttggaaaagaaaaggccggtgcagcgtgcccgccttctgttcatcccaggccgaagcccctgctgacacgcccgaaccaacagctggccacaccctgtacagcgtgctctcacaaggttatgagaaactggacacccctttgaggccggcccgccagcagccaacgcccacctccgatagctccagtgactcgaacctgactactgaggaagatgaggaccggcctgaggtgcacaagccaatcagcggacgatatgaagtttttgatcaggtcacacaagaaggcgccggacacgacccagcccctgaagggcaggccgattatgacccggtgacgccgtatgtcacagaagtcgaaagcgtggttggcgagaatacaatgtatgcacaggtcttcaatctgcaggggaagacgcccgtgagccagaaagaggagagctctgctactatctattgctccatacggaagcctcaggttgtgcctcccccccaacagaacgatctggaaatcccagaatctccgacctacgagaacttcacttag

SEQ ID NO: 127673 - DNA, 1968 bp, Artificial Sequence
  derived and/or modified sequence
atggtcgccccaaaatcacacacagatgattgggctccgggaccattcagctctaagccccagaggtcacaactacagatcttctcctccgtgctccagaccagccttttgtttctgttaatggggctgcgggcatcaggaaaggattcagcccctacagtggtcagtggcattttggggggtagtgttactctgccgcttaacatcagtgttgataccgaaattgaaaacgttatctggatcggcccaaagaacgccctggcctttgctcgacctaaggagaatgttactatcatggtcaagtcatatctgggtaggctagacattacaaaatggtcttatagtctgtgtatttccaatctgacactcaacgacgcgggatcttataaagcacagattaatcagcgtaatttcgaggtgaccactgaagaggaatttaccctcttcgtgtatgaacagctgcaggagccacaggtcaccatgaagagtgtgaaggtctctgaaaacttcagctgtaatattactttaatgtgcagtgtaaaaggtgccgaaaaaagcgttctctacagctggacaccacgcgagcctcacgccagtgaatcaaacggcggatctattctcacagtatcacgaacgccttgcgaccctgacttaccatatatctgtactgctcagaaccccgtgtcgcagcggtctagcctcccagtgcacgtaggacagttctgtaccgatcccggtgcctcccgcggaggaaccacgggggaaactgtggtgggtgtgctcggggaacccgtgaccctccccctcgctctgccggcttgtcgcgacacagaaaaggtggtttggctcttcaacacatcgatcatctcgaaggaacgggaagaggccgctacagccgaccctctgatcaagtctagggacccatacaagaaccgcgtctgggtgtccagccaagactgtagcctcaagatctctcagctcaaaatcgaggacgcgggaccgtaccacgcctatgtgtgttctgaggcctcaagtgttacttccatgacacacgtcacactgctgatttatcggcgattgaggaagcctaagatcacatggtccctgcggcattcggaggacgggatttgtcgcattagcctcacatgtagcgtcgaagatggtggcaacaccgtcatgtatacctggactcctcttcagaaagaagcggtagtaagtcagggagaaagtcatctcaacgtttcatggcgttctagcgaaaaccaccccaacctgacctgcacggccagcaatccggtatcacgcagctcccatcagttcctgtccgaaaacatctgttccggtcctgagagaaacacaaagttgtggatcggactgtttttgatggtgtgcctgttgtgcgtcggcatcttttcatggtgcatttggaaacgtaaggggagatgctcagttcctgccttttgctccagtcaggctgaggctccagccgacaccccggagccaaccgccggacatacattatactctgtgctgtctcaaggctacgagaagctcgatacacccttgcgaccagcaaggcagcagccaacaccaacatcggattccagctctgacagcaatctgacaacggaagaggacgaggaccgcccagaggttcacaagcccattagcgggagatatgaagtcttcgaccaggttacgcaggagggagccggacatgaccccgcaccagaggggcaggcagattatgacccagtcaccccctacgtgactgaggtggaaagcgtggttggcgaaaatactatgtacgctcaggtgttcaacctccagggaaaaacccccgtgtcacagaaagaggaatcctcggcaactatctattgctccatcagaaagccacaggtcgtgcctcctccacaacaaaatgacctggagattccggaatccccgacatacgaaaattttacctag

SEQ ID NO: 127674 - DNA, 1968 bp, Artificial Sequence
  derived and/or modified sequence
atggtggcccccaagagccacaccgacgactgggcccccggccccttcagcagcaagccccagagaagccagctgcagatcttcagcagcgtgctgcagaccagcctgctgttcctgctgatgggcctgagagccagcggcaaggacagcgcccccaccgtggtgagcggcatcctgggcggcagcgtgaccctgcccctgaacatcagcgtggacaccgagatcgagaacgtgatctggatcggccccaagaacgccctggccttcgccagacccaaggagaacgtgaccatcatggtgaagagctacctgggcagactggacatcaccaagtggagctacagcctgtgcatcagcaacctgaccctgaacgacgccggcagctacaaggcccagatcaaccagagaaacttcgaggtgaccaccgaggaggagttcaccctgttcgtgtacgagcagctgcaggagccccaggtgaccatgaagagcgtgaaggtgagcgagaacttcagctgcaacatcaccctgatgtgcagcgtgaagggcgccgagaagagcgtgctgtacagctggacccccagagagccccacgccagcgagagcaacggcggcagcatcctgaccgtgagcagaaccccctgcgaccccgacctgccctacatctgcaccgcccagaaccccgtgagccagagaagcagcctgcccgtgcacgtgggccagttctgcaccgaccccggcgccagcagaggcggcaccaccggcgagaccgtggtgggcgtgctgggcgagcccgtgaccctgcccctggccctgcccgcctgcagagacaccgagaaggtggtgtggctgttcaacaccagcatcatcagcaaggagagagaggaggccgccaccgccgaccccctgatcaagagcagagacccctacaagaacagagtgtgggtgagcagccaggactgcagcctgaagatcagccagctgaagatcgaggacgccggcccctaccacgcctacgtgtgcagcgaggccagcagcgtgaccagcatgacccacgtgaccctgctgatctacagaagactgagaaagcccaagatcacctggagcctgagacacagcgaggacggcatctgcagaatcagcctgacctgcagcgtggaggacggcggcaacaccgtgatgtacacctggacccccctgcagaaggaggccgtggtgagccagggcgagagccacctgaacgtgagctggagaagcagcgagaaccaccccaacctgacctgcaccgccagcaaccccgtgagcagaagcagccaccagttcctgagcgagaacatctgcagcggccccgagagaaacaccaagctgtggatcggcctgttcctgatggtgtgcctgctgtgcgtgggcatcttcagctggtgcatctggaagagaaagggcagatgcagcgtgcccgccttctgcagcagccaggccgaggcccccgccgacacccccgagcccaccgccggccacaccctgtacagcgtgctgagccagggctacgagaagctggacacccccctgagacccgccagacagcagcccacccccaccagcgacagcagcagcgacagcaacctgaccaccgaggaggacgaggacagacccgaggtgcacaagcccatcagcggcagatacgaggtgttcgaccaggtgacccaggagggcgccggccacgaccccgcccccgagggccaggccgactacgaccccgtgaccccctacgtgaccgaggtggagagcgtggtgggcgagaacaccatgtacgcccaggtgttcaacctgcagggcaagacccccgtgagccagaaggaggagagcagcgccaccatctactgcagcatcagaaagccccaggtggtgccccccccccagcagaacgacctggagatccccgagagccccacctacgagaacttcacctag

SEQ ID NO: 127675 - protein, 1722 aa, Artificial Sequence
  derived and/or modified sequence
MRTGWATPRRPAGLLMLLFWFFDLAEPSGRAANDPFTIVHGNTGKCIKPVYGWIVADDCDETEDKLWKWVSQHRLFHLHSQKCLGLDITKSVNELRMFSCDSSAMLWWKCEHHSLYGAARYRLALKDGHGTAISNASDVWKKGGSEESLCDQPYHEIYTRDGNSYGRPCEFPFLIDGTWHHDCILDEDHSGPWCATTLNYEYDRKWGICLKPENGCEDNWEKNEQFGSCYQFNTQTALSWKEAYVSCQNQGADLLSINSAAELTYLKEKEGIAKIFWIGLNQLYSARGWEWSDHKPLNFLNWDPDRPSAPTIGGSSCARMDAESGLWQSFSCEAQLPYVCRKPLNNTVELTDVWTYSDTRCDAGWLPNNGFCYLLVNESNSWDKAHAKCKAFSSDLISIHSLADVEVVVTKLHNEDIKEEVWIGLKNINIPTLFQWSDGTEVTLTYWDENEPNVPYNKTPNCVSYLGELGQWKVQSCEEKLKYVCKRKGEKLNDASSDKMCPPDEGWKRHGETCYKIYEDEVPFGTNCNLTITSRFEQEYLNDLMKKYDKSLRKYFWTGLRDVDSCGEYNWATVGGRRRAVTFSNWNFLEPASPGGCVAMSTGKSVGKWEVKDCRSFKALSICKKMSGPLGPEEASPKPDDPCPEGWQSFPASLSCYKVFHAERIVRKRNWEEAERFCQALGAHLSSFSHVDEIKEFLHFLTDQFSGQHWLWIGLNKRSPDLQGSWQWSDRTPVSTIIMPNEFQQDYDIRDCAAVKVFHRPWRRGWHFYDDREFIYLRPFACDTKLEWVCQIPKGRTPKTPDWYNPDRAGIHGPPLIIEGSEYWFVADLHLNYEEAVLYCASNHSFLATITSFVGLKAIKNKIANISGDGQKWWIRISEWPIDDHFTYSRYPWHRFPVTFGEECLYMSAKTWLIDLGKPTDCSTKLPFICEKYNVSSLEKYSPDSAAKVQCSEQWIPFQNKCFLKIKPVSLTFSQASDTCHSYGGTLPSVLSQIEQDFITSLLPDMEATLWIGLRWTAYEKINKWTDNRELTYSNFHPLLVSGRLRIPENFFEEESRYHCALILNLQKSPFTGTWNFTSCSERHFVSLCQKYSEVKSRQTLQNASETVKYLNNLYKIIPKTLTWHSAKRECLKSNMQLVSITDPYQQAFLSVQALLHNSSLWIGLFSQDDELNFGWSDGKRLHFSRWAETNGQLEDCVVLDTDGFWKTVDCNDNQPGAICYYSGNETEKEVKPVDSVKCPSPVLNTPWIPFQNCCYNFIITKNRHMATTQDEVHTKCQKLNPKSHILSIRDEKENNFVLEQLLYFNYMASWVMLGITYRNKSLMWFDKTPLSYTHWRAGRPTIKNEKFLAGLSTDGFWDIQTFKVIEEAVYFHQHSILACKIEMVDYKEEYNTTLPQFMPYEDGIYSVIQKKVTWYEALNMCSQSGGHLASVHNQNGQLFLEDIVKRDGFPLWVGLSSHDGSESSFEWSDGSTFDYIPWKGQTSPGNCVLLDPKGTWKHEKCNSVKDGAICYKPTKSKKLSRLTYSSRCPAAKENGSRWIQYKGHCYKSDQALHSFSEAKKLCSKHDHSATIVSIKDEDENKFVSRLMRENNNITMRVWLGLSQHSVDQSWSWLDGSEVTFVKWENKSKSGVGRCSMLIASNETWKKVECEHGFGRVVCKVPLGPDYTAIAIIVATLSILVLMGGLIWFLFQRHRLHLAGFSSVRYAQGVNEDEIMLPSFHD

SEQ ID NO: 127676 - DNA, 5169 bp, Artificial Sequence
  derived and/or modified sequence
atgagaaccggctgggccacccccagaagacccgccggcctgctgatgctgctgttctggttcttcgacctggccgagcccagcggcagagccgccaacgaccccttcaccatcgtgcacggcaacaccggcaagtgcatcaagcccgtgtacggctggatcgtggccgacgactgcgacgagaccgaggacaagctgtggaagtgggtgagccagcacagactgttccacctgcacagccagaagtgcctgggcctggacatcaccaagagcgtgaacgagctgagaatgttcagctgcgacagcagcgccatgctgtggtggaagtgcgagcaccacagcctgtacggcgccgccagatacagactggccctgaaggacggccacggcaccgccatcagcaacgccagcgacgtgtggaagaagggcggcagcgaggagagcctgtgcgaccagccctaccacgagatctacaccagagacggcaacagctacggcagaccctgcgagttccccttcctgatcgacggcacctggcaccacgactgcatcctggacgaggaccacagcggcccctggtgcgccaccaccctgaactacgagtacgacagaaagtggggcatctgcctgaagcccgagaacggctgcgaggacaactgggagaagaacgagcagttcggcagctgctaccagttcaacacccagaccgccctgagctggaaggaggcctacgtgagctgccagaaccagggcgccgacctgctgagcatcaacagcgccgccgagctgacctacctgaaggagaaggagggcatcgccaagatcttctggatcggcctgaaccagctgtacagcgccagaggctgggagtggagcgaccacaagcccctgaacttcctgaactgggaccccgacagacccagcgcccccaccatcggcggcagcagctgcgccagaatggacgccgagagcggcctgtggcagagcttcagctgcgaggcccagctgccctacgtgtgcagaaagcccctgaacaacaccgtggagctgaccgacgtgtggacctacagcgacaccagatgcgacgccggctggctgcccaacaacggcttctgctacctgctggtgaacgagagcaacagctgggacaaggcccacgccaagtgcaaggccttcagcagcgacctgatcagcatccacagcctggccgacgtggaggtggtggtgaccaagctgcacaacgaggacatcaaggaggaggtgtggatcggcctgaagaacatcaacatccccaccctgttccagtggagcgacggcaccgaggtgaccctgacctactgggacgagaacgagcccaacgtgccctacaacaagacccccaactgcgtgagctacctgggcgagctgggccagtggaaggtgcagagctgcgaggagaagctgaagtacgtgtgcaagagaaagggcgagaagctgaacgacgccagcagcgacaagatgtgcccccccgacgagggctggaagagacacggcgagacctgctacaagatctacgaggacgaggtgcccttcggcaccaactgcaacctgaccatcaccagcagattcgagcaggagtacctgaacgacctgatgaagaagtacgacaagagcctgagaaagtacttctggaccggcctgagagacgtggacagctgcggcgagtacaactgggccaccgtgggcggcagaagaagagccgtgaccttcagcaactggaacttcctggagcccgccagccccggcggctgcgtggccatgagcaccggcaagagcgtgggcaagtgggaggtgaaggactgcagaagcttcaaggccctgagcatctgcaagaagatgagcggccccctgggccccgaggaggccagccccaagcccgacgacccctgccccgagggctggcagagcttccccgccagcctgagctgctacaaggtgttccacgccgagagaatcgtgagaaagagaaactgggaggaggccgagagattctgccaggccctgggcgcccacctgagcagcttcagccacgtggacgagatcaaggagttcctgcacttcctgaccgaccagttcagcggccagcactggctgtggatcggcctgaacaagagaagccccgacctgcagggcagctggcagtggagcgacagaacccccgtgagcaccatcatcatgcccaacgagttccagcaggactacgacatcagagactgcgccgccgtgaaggtgttccacagaccctggagaagaggctggcacttctacgacgacagagagttcatctacctgagacccttcgcctgcgacaccaagctggagtgggtgtgccagatccccaagggcagaacccccaagacccccgactggtacaaccccgacagagccggcatccacggcccccccctgatcatcgagggcagcgagtactggttcgtggccgacctgcacctgaactacgaggaggccgtgctgtactgcgccagcaaccacagcttcctggccaccatcaccagcttcgtgggcctgaaggccatcaagaacaagatcgccaacatcagcggcgacggccagaagtggtggatcagaatcagcgagtggcccatcgacgaccacttcacctacagcagatacccctggcacagattccccgtgaccttcggcgaggagtgcctgtacatgagcgccaagacctggctgatcgacctgggcaagcccaccgactgcagcaccaagctgcccttcatctgcgagaagtacaacgtgagcagcctggagaagtacagccccgacagcgccgccaaggtgcagtgcagcgagcagtggatccccttccagaacaagtgcttcctgaagatcaagcccgtgagcctgaccttcagccaggccagcgacacctgccacagctacggcggcaccctgcccagcgtgctgagccagatcgagcaggacttcatcaccagcctgctgcccgacatggaggccaccctgtggatcggcctgagatggaccgcctacgagaagatcaacaagtggaccgacaacagagagctgacctacagcaacttccaccccctgctggtgagcggcagactgagaatccccgagaacttcttcgaggaggagagcagataccactgcgccctgatcctgaacctgcagaagagccccttcaccggcacctggaacttcaccagctgcagcgagagacacttcgtgagcctgtgccagaagtacagcgaggtgaagagcagacagaccctgcagaacgccagcgagaccgtgaagtacctgaacaacctgtacaagatcatccccaagaccctgacctggcacagcgccaagagagagtgcctgaagagcaacatgcagctggtgagcatcaccgacccctaccagcaggccttcctgagcgtgcaggccctgctgcacaacagcagcctgtggatcggcctgttcagccaggacgacgagctgaacttcggctggagcgacggcaagagactgcacttcagcagatgggccgagaccaacggccagctggaggactgcgtggtgctggacaccgacggcttctggaagaccgtggactgcaacgacaaccagcccggcgccatctgctactacagcggcaacgagaccgagaaggaggtgaagcccgtggacagcgtgaagtgccccagccccgtgctgaacaccccctggatccccttccagaactgctgctacaacttcatcatcaccaagaacagacacatggccaccacccaggacgaggtgcacaccaagtgccagaagctgaaccccaagagccacatcctgagcatcagagacgagaaggagaacaacttcgtgctggagcagctgctgtacttcaactacatggccagctgggtgatgctgggcatcacctacagaaacaagagcctgatgtggttcgacaagacccccctgagctacacccactggagagccggcagacccaccatcaagaacgagaagttcctggccggcctgagcaccgacggcttctgggacatccagaccttcaaggtgatcgaggaggccgtgtacttccaccagcacagcatcctggcctgcaagatcgagatggtggactacaaggaggagtacaacaccaccctgccccagttcatgccctacgaggacggcatctacagcgtgatccagaagaaggtgacctggtacgaggccctgaacatgtgcagccagagcggcggccacctggccagcgtgcacaaccagaacggccagctgttcctggaggacatcgtgaagagagacggcttccccctgtgggtgggcctgagcagccacgacggcagcgagagcagcttcgagtggagcgacggcagcaccttcgactacatcccctggaagggccagaccagccccggcaactgcgtgctgctggaccccaagggcacctggaagcacgagaagtgcaacagcgtgaaggacggcgccatctgctacaagcccaccaagagcaagaagctgagcagactgacctacagcagcagatgccccgccgccaaggagaacggcagcagatggatccagtacaagggccactgctacaagagcgaccaggccctgcacagcttcagcgaggccaagaagctgtgcagcaagcacgaccacagcgccaccatcgtgagcatcaaggacgaggacgagaacaagttcgtgagcagactgatgagagagaacaacaacatcaccatgagagtgtggctgggcctgagccagcacagcgtggaccagagctggagctggctggacggcagcgaggtgaccttcgtgaagtgggagaacaagagcaagagcggcgtgggcagatgcagcatgctgatcgccagcaacgagacctggaagaaggtggagtgcgagcacggcttcggcagagtggtgtgcaaggtgcccctgggccccgactacaccgccatcgccatcatcgtggccaccctgagcatcctggtgctgatgggcggcctgatctggttcctgttccagagacacagactgcacctggccggcttcagcagcgtgagatacgcccagggcgtgaacgaggacgagatcatgctgcccagcttccacgactag

SEQ ID NO: 127677 - DNA, 5169 bp, Artificial Sequence
  derived and/or modified sequence
atgcggactggctgggcaacacctagaaggcccgccgggctccttatgctgctgttctggttcttcgatttggccgaaccaagtggtagagcagcaaatgatccttttaccatcgtccacggcaacacaggcaaatgcattaaacccgtctacggatggatcgtcgccgacgattgcgatgaaaccgaggacaagctttggaagtgggtttcccagcatagattgttccatctgcattcacagaagtgccttggtctggacattacgaaatctgtcaatgagctgaggatgttctcatgcgattcttctgccatgctatggtggaagtgtgagcaccactccctttacggtgccgcgaggtaccgcctggctcttaaagacggacatgggacggctattagtaatgctagtgatgtttggaagaaagggggcagcgaagaaagtttatgtgaccagccatatcatgagatctacactagagatgggaattcatatggacggccctgtgagtttccttttctgatcgatggtacatggcaccacgactgcatcctggatgaggatcactcaggaccctggtgcgccactactctcaattatgaatatgatagaaagtggggtatctgcttgaagccagagaacggatgcgaggataactgggagaagaacgagcagttcgggtcttgctatcagttcaacacacagacagcccttagctggaaagaggcctacgtgtcctgccaaaatcagggcgccgatttgttaagcatcaattccgcggcagagctcacatacctgaaagaaaaggagggtattgcaaagatcttctggatagggctgaatcagctttactctgcccggggctgggagtggtcagatcataagcctctcaatttcctcaattgggaccctgataggccctccgcccctaccatcggtggctcctcttgcgcgcggatggacgcggaatcaggcttatggcagtctttcagctgtgaggcacagttaccgtatgtgtgtcggaaacccctcaataacacagtagaactaaccgacgtgtggacgtattcagataccagatgcgacgctggctggcttcctaacaacggcttctgctacctgctggtgaacgagtccaacagttgggacaaggcacatgccaaatgcaaggccttctcctctgacttgattagcatccacagtctcgcagatgtggaagtggtagtgaccaagttgcacaatgaagacattaaagaagaggtgtggatcggccttaaaaatattaatattcccaccttatttcagtggtctgacggaaccgaggttacactgacatactgggatgagaacgagcctaatgttccatacaacaaaacaccaaattgtgtgtcatacctgggcgagcttgggcaatggaaggtccagtcctgtgaggagaaactgaagtatgtgtgtaaaaggaagggcgagaagctgaacgatgcgagttctgacaaaatgtgcccccctgacgaaggctggaaacgtcatggggagacctgctacaagatatatgaagatgaggtaccctttggcacaaattgcaacctaaccatcaccagtaggtttgagcaggaatatctcaatgacctcatgaaaaagtacgacaaaagtcttaggaaatatttttggacaggcttaagggatgtggactcttgcggcgagtacaactgggccaccgttgggggccggcgccgggccgtgaccttttccaactggaatttcttagaaccggcttccccagggggttgtgtggccatgtctacaggaaaaagtgtaggaaagtgggaagtaaaggactgtaggagcttcaaagccttaagcatctgcaaaaagatgtctggacctctcgggcccgaggaggcttcacctaagcccgacgatccatgcccagaaggatggcagagctttcccgcctcactgagttgttacaaggtctttcacgctgaacggatcgttcggaagagaaactgggaggaagcggagaggttctgtcaagccctcggggcccacttatcttccttctcccatgtggacgaaataaaagaattccttcactttttaacagaccagttctccggacaacactggctgtggatcgggctaaacaagaggagccccgacctccagggctcttggcagtggagcgacagaacccctgtcagcaccataatcatgccaaacgagttccaacaggattacgatattcgcgattgcgccgccgtgaaggtttttcacagaccttggcggaggggatggcatttttacgatgacagggaatttatttacctgaggccgtttgcttgcgatactaaattggaatgggtgtgtcagatcccaaaaggccgcactcccaaaactccagactggtataatcccgaccgcgcggggattcacggcccgcctttgatcattgaaggatcggagtactggttcgtggccgatctgcatttgaactacgaggaggccgtgctctactgtgccagcaatcattcctttctggccaccataaccagttttgttggcctaaaagccattaaaaacaagatcgcaaacattagcggagatggtcaaaagtggtggattcggatctccgagtggccaatcgatgaccatttcacttactcaagatacccctggcaccggtttcccgttacttttggggaagaatgtctgtacatgtcggcgaagacttggttaattgacctgggcaaacctaccgactgctctacaaagctgccattcatctgtgagaagtacaacgtgagctctcttgaaaaatactcacccgatagcgctgccaaggtgcagtgcagtgaacagtggatcccttttcagaataagtgctttctgaaaatcaagccagttagtcttaccttctcacaggcctccgacacttgccactcgtacgggggtacactaccaagtgtgttgtcccagatcgagcaggacttcatcacttcgctgctccccgacatggaggcaactctgtggattggtcttcgctggactgcctacgaaaaaatcaacaagtggacggacaacagagaactgacttacagcaatttccacccgctgcttgtttctgggaggctgcggatccccgagaacttctttgaagaagagagtcgttaccattgcgccctgatacttaatttgcaaaaaagcccttttacgggcacatggaactttacgtcttgtagcgaaagacacttcgtgtccttatgtcagaagtattctgaggtgaaaagccgccagacattacaaaatgcttcagaaacggtcaagtacctcaataatttgtacaaaattattcccaaaaccctgacctggcactccgccaaaagagagtgtctgaagagcaacatgcaactggtttctataacagatccataccagcaggcattcctgagtgttcaggcgctgttgcacaattcctctttgtggatcgggctcttttcgcaggacgacgagctcaacttcggatggagcgatggaaagcgactccatttttcaagatgggccgagaccaacggacagttggaagattgcgttgtgttggatacggatggtttctggaaaaccgttgattgcaacgataatcagccaggagcaatctgctactacagcggcaacgagactgagaaagaggtgaagccagtggattccgtaaagtgcccctccccggttttaaacaccccatggatcccctttcagaattgctgttacaatttcataattaccaagaaccgccacatggcaaccacacaggacgaggtccataccaaatgccaaaaactcaacccgaagagccatatcctctctatccgcgatgagaaggagaataatttcgtccttgaacagcttctgtactttaattatatggcatcgtgggtgatgctcggcattacgtaccggaataaaagtctaatgtggtttgataagacaccgctgagttatactcattggagagccggacggcctacaatcaagaatgagaagttcctagcaggactgtccaccgacggcttctgggacatccagacattcaaagtaatagaagaggcggtttattttcaccaacacagtatcttggcatgtaaaatcgagatggtcgattacaaagaggaatataacacgactctgccccagtttatgccttacgaggatggaatctactcagtgatacaaaagaaagtcacatggtacgaggccttaaacatgtgctctcagagcgggggacacttggcaagcgtgcataaccagaacggtcaactcttccttgaagacatcgtgaaaagagatggttttcctttgtgggtgggactaagcagccatgacggaagcgaaagctctttcgagtggtctgatggcagtacattcgattacatcccatggaaagggcaaacctcacccggcaattgcgtcctgttagatccgaagggaacctggaagcacgagaagtgtaacagtgtcaaggacggcgcgatctgttataaacccactaagagcaaaaaactctctcgcctgacctacagctctagatgcccggctgccaaagagaatggatctagatggatacagtacaaaggacattgctacaagtctgatcaggcactccactccttctcagaagccaaaaaattgtgctccaagcatgatcactccgccactatagttagcatcaaggacgaggatgagaacaagttcgtgtcgcgcctcatgcgggaaaataacaatattaccatgcgcgtttggctgggtctctcacagcattcagttgaccaaagttggtcatggctggatggcagtgaggtgacatttgtgaagtgggagaacaagtctaagagcggcgtggggagatgcagcatgcttattgcatcgaacgagacatggaagaaggttgagtgcgaacatggttttggtcgagtggtttgcaaggtgccactcggtccggactacaccgccattgcaataatagtagcgaccttgagtatcttggtcctcatgggcggactgatctggtttcttttccaacggcaccgcctacacctcgccggcttttctagcgtccgttatgcacagggcgtcaatgaagacgaaatcatgctgccttccttccacgattag

SEQ ID NO: 127678 - DNA, 6886 bp, Artificial Sequence
  derived and/or modified sequence
ccggccggaaggcttgcgccagctcaggatgaggacaggctgggcgacccctcgccgcccggcggggctcctcatgctgctcttctggttcttcgatctcgcggagccctctggccgcgcagctaatgaccccttcaccatcgtccatggaaatacgggcaagtgcatcaagccagtgtatggctggatagtagcagacgactgtgatgaaactgaggacaagttatggaagtgggtgtcccagcatcggctctttcatttgcactcccaaaagtgccttggcctcgatattaccaaatcggtaaatgagctgagaatgttcagctgtgactccagtgccatgctgtggtggaaatgtgagcaccactctctgtacggagctgcccggtaccggctggctctgaaggatggacatggcacagcaatctcaaatgcatctgatgtctggaagaaaggaggctcagaggaaagcctttgtgaccagccttatcatgagatctataccagagatgggaactcttatgggagaccttgtgaatttccattcttaattgatgggacctggcatcatgattgcattcttgatgaagatcatagtgggccatggtgtgccaccaccttaaattatgaatatgaccgaaagtggggcatctgcttaaagcctgaaaacggttgtgaagataattgggaaaagaacgagcagtttggaagttgctaccaatttaatactcagacggctctttcttggaaagaagcttatgtttcatgtcagaatcaaggagctgatttactgagcatcaacagtgctgctgaattaacttaccttaaagaaaaagaaggcattgctaagattttctggattggtttaaatcagctatactctgctagaggctgggaatggtcagaccacaaaccattaaactttctcaactgggatccagacaggcccagtgcacctactataggtggctccagctgtgcaagaatggatgctgagtctggtctgtggcagagcttttcctgtgaagctcaactgccctatgtctgcaggaaaccattaaataatacagtggagttaacagatgtctggacatactcagatacccgctgtgatgcaggctggctgccaaataatggattttgctatctgctggtaaatgaaagtaattcctgggataaggcacatgcgaaatgcaaagccttcagtagtgacctaatcagcattcattctctagcagatgtggaggtggttgtcacaaaactccataatgaggatatcaaagaagaagtgtggataggccttaagaacataaacataccaactttatttcagtggtcagatggtactgaagttactctaacatattgggatgagaatgagccaaatgttccctacaataagacgcccaactgtgtttcctacttaggagagctaggtcagtggaaagtccaatcatgtgaggagaaactaaaatatgtatgcaagagaaagggagaaaaactgaatgacgcaagttctgataagatgtgtcctccagatgagggctggaagagacatggagaaacctgttacaagatttatgaggatgaggtcccttttggaacaaactgcaatctgactatcactagcagatttgagcaagaatacctaaatgatttgatgaaaaagtatgataaatctctaagaaaatacttctggactggcctgagagatgtagattcttgtggagagtataactgggcaactgttggtggaagaaggcgggctgtaaccttttccaactggaattttcttgagccagcttccccgggcggctgcgtggctatgtctactggaaagtctgttggaaagtgggaggtgaaggactgcagaagcttcaaagcactttcaatttgcaagaaaatgagtggaccccttgggcctgaagaagcatcccctaagcctgatgacccctgtcctgaaggctggcagagtttccccgcaagtctttcttgttataaggtattccatgcagaaagaattgtaagaaagaggaactgggaagaagctgaacgattctgccaagcccttggagcacacctttctagcttcagccatgtggatgaaataaaggaatttcttcactttttaacggaccagttcagtggccagcattggctgtggattggtttgaataaaaggagcccagatttacaaggatcctggcaatggagtgatcgtacaccagtgtctactattatcatgccaaatgagtttcagcaggattatgacatcagagactgtgctgctgtcaaggtatttcataggccatggcgaagaggctggcatttctatgatgatagagaatttatttatttgaggccttttgcttgtgatacaaaacttgaatgggtgtgccaaattccaaaaggccgtactccaaaaacaccagactggtacaatccagaccgtgctggaattcatggacctccacttataattgaaggaagtgaatattggtttgttgctgatcttcacctaaactatgaagaagccgtcctgtactgtgccagcaatcacagctttcttgcaactataacatcttttgtgggactaaaagccatcaaaaacaaaatagcaaatatatctggtgatggacagaagtggtggataagaattagcgagtggccaatagatgatcattttacatactcacgatatccatggcaccgctttcctgtgacatttggagaggaatgcttgtacatgtctgccaagacttggcttatcgacttaggtaaaccaacagactgtagtaccaagttgcccttcatctgtgaaaaatataatgtttcttcgttagagaaatacagcccagattctgcagctaaagtgcaatgttctgagcaatggattccttttcagaataagtgttttctaaagatcaaacccgtgtctctcacattttctcaagcaagcgatacctgtcactcctatggtggcacccttccttcagtgttgagccagattgaacaagactttattacatccttgcttccggatatggaagctactttatggattggtttgcgctggactgcctatgaaaagataaacaaatggacagataacagagagctgacgtacagtaactttcacccattattggttagtgggaggctgagaataccagaaaatttttttgaggaagagtctcgctaccactgtgccctaatactcaacctccaaaaatcaccgtttactgggacgtggaattttacatcctgcagtgaacgccactttgtgtctctctgtcagaaatattcagaagttaaaagcagacagacgttgcagaatgcttcagaaactgtaaagtatctaaataatctgtacaaaataatcccaaagactctgacttggcacagtgctaaaagggagtgtctgaaaagtaacatgcagctggtgagcatcacggacccttaccagcaggcattcctcagtgtgcaggcgctccttcacaactcttccttatggatcggactcttcagtcaagatgatgaactcaactttggttggtcagatgggaaacgtcttcattttagtcgctgggctgaaactaatgggcaactcgaagactgtgtagtattagacactgatggattctggaaaacagttgattgcaatgacaatcaaccaggtgctatttgctactattcaggaaatgagactgaaaaagaggtcaaaccagttgacagtgttaaatgtccatctcctgttctaaatactccgtggataccatttcagaactgttgctacaatttcataataacaaagaataggcatatggcaacaacacaggatgaagttcatactaaatgccagaaactgaatccaaaatcacatattctgagtattcgagatgaaaaggagaataactttgttcttgagcaactgctgtacttcaattatatggcttcatgggtcatgttaggaataacttatagaaataagtctcttatgtggtttgataagaccccactgtcatatacacattggagagcaggaagaccaactataaaaaatgagaagtttttggctggtttaagtactgacggcttctgggatattcaaacctttaaagttattgaagaagcagtttattttcaccagcacagcattcttgcttgtaaaattgaaatggttgactacaaagaagaatataatactacactgccacagtttatgccatatgaagatggtatttacagtgttattcaaaaaaaggtaacatggtatgaagcattaaacatgtgttctcaaagtggaggtcacttggcaagcgttcacaaccaaaatggccagctctttctggaagatattgtaaaacgtgatggatttccactatgggttgggctctcaagtcatgatggaagtgaatcaagttttgaatggtctgatggtagtacatttgactatatcccatggaaaggccaaacatctcctggaaattgtgttctcttggatccaaaaggaacttggaaacatgaaaaatgcaactctgttaaggatggtgctatttgttataaacctacaaaatctaaaaagctgtcccgtcttacatattcatcaagatgtccagcagcaaaagagaatgggtcacggtggatccagtacaagggtcactgttacaagtctgatcaggcattgcacagtttttcagaggccaaaaaattgtgttcaaaacatgatcactctgcaactatcgtttccataaaagatgaagatgagaataaatttgtgagcagactgatgagggaaaataataacattaccatgagagtttggcttggattatctcaacattctgttgaccagtcttggagttggttagatggatcagaagtgacatttgtcaaatgggaaaataaaagtaagagtggtgttggaagatgtagcatgttgatagcttcaaatgaaacttggaaaaaagttgaatgtgaacatggttttggaagagttgtctgcaaagtgcctctgggccctgattacacagcaatagctatcatagttgccacactaagtatcttagttctcatgggcggactgatttggttcctcttccaaaggcaccgtttgcacctggcgggtttctcatcagttcgatatgcacaaggagtgaatgaagatgagattatgcttccttctttccatgactaaattcttctaaaagttttctaatttgcactaatgtgttatgagaaattagtcacttaaaatgtcccagtgtcagtatttactctgctccaaagtagaactcttaaatactttttcagttgtttagatcttaggcatgtgctggtatccacagttaattccctgctaaatgccatgtttatcaccctaattaatagaatggaggggactccaaagctggaactgaagtccaaattgtttgtacagtaatatgtttaatgttcattttctctgtatgaatgtgattggtaactaggatatgtatattttaatagaatttttaacaaaacttcttagaaaattaaaataggcatattactaggtgacatgtctactttttaatttttaagagcatccggccaaatgcaaaattagtacctcaaagtaaaaattgaactgtaaactctatcagcattgtttcaaaatagtcatttttagcactggggaaaaataaacaataagacatgcttactttttaatttttatttttttgagactgagtctctctctgttgcccaggctggagtacaatggcgtgatctcggctcactgcaaatctccgcctcccaggttcaagcgattctcctgcctcagcctcctgagtagctgggattacaggcaactgccaccatgcccggctaatttttgtatttttagtagagatggggtttcaccatgttggccaggctggtctcgaactcgtgaccgcaggtgatcctcccgcctcggcctcccaaagtgctgggattacaggcatgagccaccgcgcctggcctctgcttactttttatatagcaaaatgattcctcttggcaagatgtttcttatattattccaaagttatttcataccattattatgtaaatatgaagagtttttttctgtttataattgtttataaaacaatgacttttaaagatttagtgcttaacattttcccaagtgtgggaacattatttttagattgagtaggtaccttgtagcagtgtgctttgcattttctgatgtattacatgactgtttcttttgtaaagagaatcaactaggtatttaagactgataattttacaatttatatgcttcacatagcatgtcaacttttgactaagaattttgttttacttttttaacatgtgttaaacagagaaagggtccatgaaggaaagtgtatgagttgcatttgtaaaaatgagactttttcagtggaactctaaaccttgtgatgactactaacaaatgtaaaattatgagtgattaagaaaacattgctttgtggttatcactttaagttttgacacctagattatagtcttagtaatagcatccactggaaaaggtgaaaatgttttattcggcatttaacttacatttgtactttatttttgtataaaatccatagatttattttacatttagagtatttacactatgataaagttgtaaataattttctaagacagtttttatatagtctacagttgtcctgatttcttattgaatttgttagactagttctcttgtcctgtgatctgtgtacaattttagtcactaagactttcctccaagaactaagccaacttgatgtgaaaagcacagctgtatataatggtgatgtcataataaagttgttttatcttttaagtaaaagtaaaa

SEQ ID NO: 127679 - DNA, 5169 bp, Artificial Sequence
  derived and/or modified sequence
atgaggacaggctgggccaccccaagaagacctgctggcctgctgatgctgctcttctggttctttgacctggccgagcccagcggccgggccgccaatgaccccttcaccatcgtgcacggcaacacaggcaagtgcatcaagcctgtgtatggctggatcgtggctgatgactgtgatgaaacagaggacaagctgtggaagtgggtgtcccagcacaggctcttccacctgcacagccagaagtgcctgggcctggacatcaccaagtctgtgaatgagctgaggatgttcagctgtgacagcagcgccatgctgtggtggaagtgtgagcaccacagcctgtatggagctgcccgctaccgcctggccctgaaggatggccatggaacagccatcagcaatgccagtgatgtgtggaagaagggcggcagcgaggagagcctgtgtgaccagccctaccacgagatctacaccagagatggcaacagctatggccggccctgtgagttccccttcctgattgatggcacctggcaccacgactgcatcctggatgaggaccacagcggcccctggtgtgccaccaccctgaactatgaatatgacaggaagtggggcatctgcctgaagccagaaaatggctgtgaggacaactgggagaagaatgagcagtttggcagctgctaccagttcaacacccagacagccctgtcctggaaggaggcctacgtgtcctgccagaaccagggcgctgacctgctgagcatcaacagcgctgctgagctgacctacctgaaggagaaggagggcatcgccaagatcttctggattggcctgaaccagctgtacagcgcccggggctgggagtggagcgaccacaagcccctgaacttcctgaactgggaccctgaccggcccagcgcccccaccatcggcggcagcagctgtgccaggatggatgctgagagcggcctgtggcagagcttcagctgtgaggcccagctgccctacgtgtgcaggaagcccctgaacaacacagtggagctgacagatgtgtggacctacagcgacacccgctgtgatgctggctggctgcccaacaacggcttctgctacctgctggtgaatgaaagcaacagctgggacaaggcccacgccaagtgcaaggccttcagcagtgacctgatcagcatccacagcctggctgatgtggaggtggtggtgaccaagctgcacaatgaagacatcaaggaggaggtgtggattggcctgaagaacatcaacatccccaccctcttccagtggagcgatggaacagaggtgaccctgacctactgggatgaaaatgagcccaacgtgccctacaacaagacccccaactgtgtgtcctacctgggggagctgggccagtggaaggtgcagagctgtgaggagaagctgaagtatgtgtgcaagaggaagggggagaagctgaatgatgccagcagtgacaagatgtgccccccagatgagggctggaagagacatggagagacctgctacaagatctatgaagatgaggtgcccttcggcaccaactgcaacctgaccatcaccagcagatttgagcaggagtacctgaatgacctgatgaagaagtatgacaagagcctgaggaagtacttctggacaggcctgagagatgtggacagctgtggggagtacaactgggccaccgtgggcggcagaagaagagctgtgaccttcagcaactggaacttcctggagcccgccagccctgggggctgtgtggccatgagcacaggcaagtctgtgggcaagtgggaggtgaaggactgccgctccttcaaggccctgagcatctgcaagaagatgagcggccccctgggccctgaggaggccagccccaagccagatgacccctgcccagagggctggcagagcttccctgccagcctgagctgctacaaggtgttccacgccgagagaattgtgaggaagaggaactgggaggaggccgagcgcttctgccaggccctgggcgcccacctgagcagcttcagccacgtggatgagatcaaggagttcctgcacttcctgacagaccagttcagcggccagcactggctgtggattggcctgaacaagaggagcccagacctgcagggctcctggcagtggagcgacaggacccctgtgtccaccatcatcatgcccaatgagttccagcaggactatgacatccgggactgtgccgctgtgaaggtgttccaccggccctggaggcggggctggcacttctatgatgaccgggagttcatctacctgcggccctttgcctgtgacaccaagctggagtgggtgtgccagatccccaagggccgcacccccaagaccccagactggtacaacccagacagagctggcatccacggccccccactcatcatcgagggcagcgagtactggtttgtggccgacctgcacctgaactatgaggaggccgtgctgtactgtgccagcaaccacagcttcctggccaccatcaccagctttgtgggcctgaaggccatcaagaacaagatcgccaacatctctggagatggccagaagtggtggatccgcatcagcgagtggcccattgatgaccacttcacctacagccgctacccctggcaccgcttccctgtgaccttcggggaggagtgcctgtacatgtctgccaagacctggctgattgacctgggcaagcccacagactgcagcaccaagctgcccttcatctgtgagaagtacaacgtgagcagcctggagaagtacagcccagattctgctgccaaggtgcagtgcagcgagcagtggatccccttccagaacaagtgcttcctgaagatcaagcctgtgtccctgaccttcagccaggccagtgacacctgccacagctatggaggcaccctgcccagcgtgctgagccagatcgagcaggacttcatcaccagcctgctgcctgacatggaggccaccctgtggattggcctgcgctggacagcctatgagaagatcaacaagtggacagacaaccgggagctgacctacagcaacttccaccccctgctggtgtctggccgcctgcgcatccctgagaacttctttgaggaggagagccgctaccactgtgccctgatcctgaacctgcagaagagccccttcaccggcacctggaacttcaccagctgcagcgagcggcactttgtgtccctgtgccagaagtacagcgaggtgaagagccggcagaccctgcagaatgccagcgagaccgtgaagtacctgaacaacctgtacaagatcatccccaagaccctgacctggcacagcgccaagcgggagtgcctgaagagcaacatgcagctggtgtccatcacagacccctaccagcaggccttcctgtctgtgcaggccctgctgcacaacagcagcctgtggattggcctcttcagccaggatgatgagctgaactttggctggagcgatggcaagaggctgcacttcagccgctgggccgagaccaacggccagctggaggactgtgtggtgctggacacagatggcttctggaagacagtggactgcaatgacaaccagcccggggccatctgctactacagcggaaatgaaacagagaaggaggtgaagcctgtggacagcgtgaagtgccccagccctgtgctgaacaccccctggatccccttccagaactgctgctacaacttcatcatcaccaagaacagacacatggccaccacccaggatgaggtgcacaccaagtgccagaagctgaaccccaagagccacatcctgagcatcagagatgagaaggagaacaactttgtgctggagcagctgctgtacttcaactacatggcctcctgggtgatgctgggcatcacctacagaaacaagagcctgatgtggtttgacaagacccccctgagctacacccactggagggctggccggcccaccatcaagaatgagaagttcctggccggcctgagcacagatggcttctgggacatccagaccttcaaggtgattgaggaggccgtgtacttccaccagcacagcatcctggcctgcaagattgagatggtggactacaaggaggagtacaacaccaccctgccccagttcatgccctatgaagatggcatctacagcgtcatccagaagaaggtgacctggtatgaggccctgaacatgtgcagccagagcggcggccacctggcctctgtgcacaaccagaatggccagctgttcctggaggacatcgtgaagagagatggcttccccctgtgggtgggcctgagcagccatgatggcagcgagagcagctttgagtggagcgatggcagcacctttgactacatcccctggaagggccagaccagccctggcaactgtgtgctgctggaccccaagggcacctggaagcatgagaagtgcaacagcgtgaaggatggagccatctgctacaagcccaccaagagcaagaagctgagccggctgacctacagcagccgctgcccagctgccaaggaaaatggcagccgctggatccagtacaagggccactgctacaagagtgaccaggccctgcacagcttcagcgaggccaagaagctgtgcagcaagcatgaccacagcgccaccatcgtgtccatcaaggatgaagatgagaacaagtttgtgtcccggctgatgagggagaacaacaacatcaccatgagggtgtggctgggcctgagccagcacagcgtggaccagagctggagctggctggatggcagcgaggtgacctttgtgaagtgggagaacaagagcaagagcggcgtgggccgctgcagcatgctgattgccagcaatgagacctggaagaaggtggagtgtgagcacggcttcggccgggtggtgtgcaaggtgcccctgggccctgactacacagccatcgccatcatcgtggccaccctgagcatcctggtgctgatgggcggcctcatctggttcctgttccagaggcaccggctgcacctggccggcttcagctctgtgcgctatgcccagggcgtgaatgaagatgagatcatgctgcccagcttccatgactag

SEQ ID NO: 127680 - DNA, 5169 bp, Artificial Sequence
  derived and/or modified sequence
atgcggaccggctgggccaccccccggcggcccgccggcctgctgatgcttttgttttggttcttcgacctggccgagcccagtggccgggctgctaacgacccttttaccatagtccacggcaatacaggcaagtgcatcaaacctgtatatgggtggatcgtcgccgacgattgtgatgagaccgaggataagctctggaagtgggtctctcaacacagactcttccacctccactctcagaagtgtctcgggcttgatattactaaaagcgtcaacgaattacgtatgttttcttgcgattcatcggctatgctttggtggaaatgcgaacaccactctctttacggtgcagccaggtacaggctggctctgaaggacgggcacggtaccgccatcagcaacgcgagtgacgtgtggaagaaagggggtagcgaagaaagcctttgtgatcaaccataccacgagatttacacgcgggacggcaatagctatggccgtccctgcgaattcccttttctgatagatggaacatggcaccacgactgcatcctggacgaagatcatagcggcccatggtgcgccaccaccctgaattatgagtacgacagaaaatgggggatttgcctgaagcctgaaaacgggtgcgaggacaattgggaaaaaaacgaacagttcggtagctgttaccagttcaacacgcagaccgccctcagctggaaggaggcttacgtttcttgtcaaaaccagggagccgatctcttgagcatcaattccgctgcagagctgacatatcttaaggagaaagagggtatagcaaaaatattttggattgggcttaatcagctttacagtgcccgcggctgggaatggtccgatcataagccgctgaattttctgaattgggaccctgataggccatctgccccaaccattggaggaagttcatgtgcaaggatggacgctgagtccggactctggcagtctttctcgtgtgaggcccagcttccatatgtgtgtagaaagcctctaaacaatacggtcgagctgacagatgtgtggacctatagcgatactagatgcgatgctgggtggctccctaataatggattctgctatctactcgtaaatgaaagcaactcgtgggacaaagcgcacgcgaagtgtaaggctttctcctccgacctgattagcattcattctctggccgacgtggaggtcgtggtgaccaaactacacaacgaagacatcaaggaagaggtgtggataggcctcaagaacattaacatacccactttgtttcaatggtccgacggcacagaagtgactttgacatactgggatgagaacgagcccaacgtcccttacaacaagactccaaactgtgtcagctatctcggtgaacttggccaatggaaagtgcagtcatgcgaggagaagttgaaatatgtttgcaagaggaagggggagaaactgaacgatgcctcctctgataaaatgtgtccccccgacgagggctggaaacgccatggagagacatgttataaaatctatgaggacgaagtccctttcggaactaattgtaatcttactatcacttccagattcgagcaggagtatctcaacgacctgatgaagaaatatgacaaaagtctgcgcaagtatttttggacgggcctgagagacgtggactcttgcggggaatacaattgggcaaccgtgggcggacggagaagggctgtgacgttttccaactggaattttctggaacctgcatctcccgggggttgcgtagctatgtctactggaaagagtgttggaaaatgggaggtcaaggactgccgctctttcaaagcactgagcatctgtaaaaagatgagcggtccgctgggtcccgaggaggcctctcctaaacctgatgacccctgccctgaagggtggcagtcatttcccgctagtctgagttgttataaggtgtttcatgcagaacgcatcgtgcgaaaacggaattgggaggaagctgagagattttgtcaggccttgggggcgcacctaagctccttcagccacgttgatgagattaaagaattcttacatttcctgactgatcagttcagtgggcagcattggctctggatcggattgaataagcgctcccccgacttacagggcagttggcagtggagcgataggacaccagtatcaacaatcatcatgcctaacgagtttcagcaagattacgatatccgcgactgtgccgccgtgaaagtatttcacagaccttggcgaagagggtggcacttctatgacgatcgagagttcatttatttgcgcccatttgcctgtgacacaaaacttgaatgggtatgccagatccccaagggaagaactcccaaaacacctgactggtataatcctgatcgggccgggattcatggtcctcccctgatcatagaaggctcagagtattggttcgttgccgacttgcatctgaattatgaagaagctgtactgtactgtgcctctaaccatagctttttggctaccatcaccagctttgtgggccttaaagccatcaagaacaagatagccaacatctcgggcgacggccaaaaatggtggattcggataagtgagtggccaatagatgaccatttcacctactcccgatacccttggcaccgcttccctgtcaccttcggggaggagtgtctctacatgagtgctaaaacgtggctcatcgaccttggaaaaccaacagattgctctaccaagcttccattcatatgcgaaaaatacaacgtgagcagccttgagaagtatagtccagattctgccgccaaggtgcaatgcagcgaacaatggattccattccaaaataaatgctttttaaagattaagcccgtgtccctcacattctcacaggccagcgacacatgccattcttacggcggaacccttccctcggtcctgagccagatcgaacaagattttatcacaagcttgctgcccgatatggaagccaccctctggattggattacgttggaccgcatacgaaaaaattaataagtggacagataaccgagagctgacatactcaaatttccacccacttttggtgtcaggccgtctgcgaatacccgaaaacttcttcgaagaggagtctaggtatcactgtgccctcatactgaacttgcagaaatcaccgtttacgggtacctggaattttacttcctgttccgagagacacttcgttagcttgtgccaaaagtactctgaagtcaagagcagacagactctgcagaacgccagcgaaactgtcaagtacctcaacaacctttacaaaatcattcccaaaacccttacctggcacagcgccaagcgggaatgcctgaaaagcaacatgcagctggtctccatcacggatccctaccagcaggcattcctttccgtacaggctctgcttcacaacagcagcctgtggatcgggctgtttagccaggacgacgaactgaactttggctggagcgatggcaagcgactgcacttctctaggtgggccgaaaccaacgggcagctcgaagattgcgttgtcctggatactgatggattctggaaaacagtcgactgcaatgacaaccagccaggagcaatttgttattattcagggaacgagactgaaaaggaagtgaaacctgtggattctgtgaaatgtccttcccctgtcctgaatactccgtggatcccgtttcagaactgttgttacaactttataattacgaaaaatcgccatatggccaccacccaggacgaagtgcacaccaaatgtcagaaactgaaccccaagagccatatcctctctatccgtgacgaaaaggaaaacaattttgtgctcgagcagctactatacttcaactatatggccagttgggttatgcttggcattacttacaggaataagtccttaatgtggtttgataaaacccccttgagctatactcactggagggcgggccgtccaaccatcaagaacgagaaattccttgccggactgtccaccgacggattctgggatatccagactttcaaagtgatagaggaggctgtgtattttcaccagcacagcattcttgcctgcaagatcgaaatggttgattataaagaggaatacaacaccacattacctcagtttatgccctacgaagacggcatttattccgtgatacagaagaaggtgacgtggtacgaggctctgaatatgtgcagtcagtcaggcggccacctcgccagcgtgcacaaccagaacgggcagctgttcctggaagacatcgtcaaacgcgacggctttcccttgtgggtagggctatcatcccacgacggctcggagtcctctttcgagtggtcagacggaagcaccttcgactacattccatggaaaggccaaacctctcccggcaattgcgtgctcctggatccgaaaggaacttggaagcatgagaagtgtaactctgtgaaagatggcgcaatatgctataagccaacaaagagcaagaagctgtctcggttgacctactctagtagatgtcccgcggccaaagagaacggaagccggtggatacaatacaaagggcactgctataaatcagaccaagcactccactccttcagtgaagccaaaaaactgtgcagcaaacatgatcattctgcgacgattgtttctattaaagacgaggacgagaataagttcgtctcgcggctaatgcgggaaaataataatatcacaatgcgcgtctggctgggcctgtcacagcattccgtagaccagagctggagctggctggacggatccgaggtcacttttgtgaagtgggaaaataaatcaaaatccggagttggtcggtgtagcatgctgatagcttctaatgaaacatggaaaaaggttgagtgcgaacacggttttggaagggtagtatgtaaggtgcctctcggtcccgactacactgccatcgccattatcgttgcaactctctcaattttggtgctgatgggcggcctgatctggtttctttttcagcgccacagactgcacttggctgggttcagcagtgtgaggtacgctcagggggtcaacgaggacgaaattatgctcccatcattccacgactag

SEQ ID NO: 127681 - DNA, 5169 bp, Artificial Sequence
  derived and/or modified sequence
atgaggactggttgggcaacccctagacgcccagctggattactgatgctactgttctggttttttgacttagcagaaccctccggccgagccgctaacgacccattcactattgtgcacggaaacacaggtaaatgcattaagccagtgtatggctggatagtggcagacgactgtgacgagacagaagacaagttatggaagtgggtctcacagcacaggctctttcatctgcactcccagaaatgcctggggcttgacattaccaagagcgtgaacgagctgcgaatgttctcctgcgatagctctgctatgctgtggtggaagtgcgagcaccatagcctgtacggcgctgctcgatataggcttgccctgaaagatggacacggcactgctatcagtaacgccagtgacgtgtggaagaagggagggtctgaggaaagtctgtgtgatcagccctaccatgaaatctacaccagggacggcaactcctatggcagaccatgcgagttcccgttcctcattgacggtacctggcatcacgattgtattctcgatgaggaccattcgggcccatggtgcgcaactacccttaactacgagtacgaccgtaagtggggtatctgcctcaaaccagaaaatggctgtgaggataactgggagaaaaacgaacagtttggaagctgttatcagttcaacactcagaccgcactctcctggaaagaggcctatgtcagctgccagaaccagggcgcagacctgcttagtataaactcagctgcagagcttacatatctcaaggaaaaggaaggcatcgccaaaatattttggataggcctcaatcagctgtactccgctcgcggttgggagtggtcggaccacaaaccactcaatttcctgaattgggaccccgaccgtccatcggccccaaccattggcggatcgtcttgtgctcggatggatgcagaatctggtctgtggcagagctttagttgcgaggcacaactgccgtatgtgtgcagaaagcctttaaacaacaccgtggagcttacagacgtgtggacctattctgacacaagatgtgatgccggatggttgcccaataatgggttctgttacctcctcgttaacgagagtaatagttgggacaaagcacatgctaagtgcaaggccttcagcagcgaccttataagcattcattcccttgcagatgtggaggtggttgtgaccaaacttcacaacgaggatatcaaggaggaggtgtggattggattaaaaaacatcaacattcccacactcttccagtggagcgatggaactgaggtcacgttaacctactgggacgagaacgaaccgaatgtaccatacaacaagacccctaactgtgtcagctatcttggtgaattgggtcagtggaaagtccagagctgcgaagaaaaactaaagtatgtgtgcaaaagaaaaggggaaaagctcaacgatgctagtagtgataagatgtgtccgcctgatgagggttggaagaggcacggtgaaacctgctacaagatttacgaagatgaggtgccatttgggaccaactgcaaccttaccattaccagtaggtttgaacaggaatacttgaatgacttgatgaagaagtatgataaaagccttcgtaagtacttttggaccggattaagagatgtggacagttgtggagagtacaactgggccaccgtggggggtcgacggcgtgcggtcacttttagtaactggaatttcctggagcctgcaagcccgggtggatgcgtggctatgtctaccggaaagtctgttggtaagtgggaggtcaaagattgccggagcttcaaggcgctcagtatttgcaaaaagatgagtggtccattggggccagaagaggcgtcacctaaacccgacgacccatgtcccgaaggatggcaaagcttccctgcttctctgagctgttataaggtcttccacgcagaacgcatagtgaggaaaaggaactgggaggaagcggaacggttctgtcaggcactaggagcacatctttcttccttctcacacgttgacgagatcaaagagttcctccatttcctcactgaccagttctccggacagcactggctgtggatcgggctgaataagagatctcccgacctgcaggggtcctggcaatggtctgatcgcacgcctgttagtacgattatcatgcccaatgagtttcaacaggactacgatatccgggactgcgccgctgttaaggtctttcatcgcccatggcgccgtgggtggcatttttacgacgacagggagttcatctatctgcgtcctttcgcatgcgacacaaaacttgaatgggtttgccagatccccaagggcaggacgccgaagacacctgactggtacaaccctgatcgggctggaattcatggacctccccttatcatcgaagggtcagaatattggttcgtggcggatctgcatctgaattacgaggaggcagttctatactgtgctagtaatcactcttttctggctaccattacctcatttgtgggtttgaaagctatcaaaaataagatcgccaatatatcaggagacggacagaaatggtggattcgtataagtgaatggccgatcgacgatcacttcacgtatagccggtacccttggcacaggtttcccgtgacatttggcgaggagtgcctatacatgtcggcaaaaacatggctcatagatctcgggaaacccaccgattgttctaccaaacttccgtttatttgcgagaaatataacgtatcatctttagagaagtattcaccagattctgccgctaaggtacagtgctccgagcagtggatccctttccagaacaaatgctttctgaagattaagccagtcagtttgactttcagccaggcttccgatacttgccactcctatggaggcaccctgcccagcgtcctttctcagattgaacaggacttcatcactagcctgcttccagatatggaggccactctttggataggtttgagatggacagcatacgaaaagataaacaaatggactgataaccgggaactcacatactccaattttcatcccttattggtatcagggaggcttcgaatcccagaaaacttcttcgaagaagagagccgctaccactgcgccctaatactaaacctccagaagagccctttcacaggcacctggaatttcacatcttgtagcgagcgccactttgtctctctttgccagaagtattcagaggtgaagtcgcgccagacgttacagaacgcatccgaaaccgttaaatatttaaacaacctttacaagatcatcccaaaaaccctgacatggcactctgccaaaagagaatgtctgaagtctaatatgcagctggttagtatcacagatccttaccagcaggcttttctgagtgttcaggccctgctccataatagctccttgtggattggtctgttcagtcaggacgatgaactgaatttcggctggtcagatggaaagcggctgcacttttcaaggtgggcagagacaaatgggcagctggaggattgtgttgtgctggacaccgacggcttttggaagacagtggactgcaacgacaatcaacccggagccatctgttattattccggaaacgagacggagaaggaagtcaagccggtcgatagcgttaaatgtccttcgcctgtactgaacaccccttggattccgtttcagaactgctgttataatttcattattacaaaaaatcgccacatggctaccactcaagacgaagtccacaccaagtgccagaagttaaaccctaagtcgcatattctgagtattcgcgacgagaaagagaacaatttcgtcctcgaacagctgctgtattttaactacatggccagctgggtgatgctcggaatcacatatagaaacaagtccctaatgtggtttgataagactccactaagttacacacactggcgtgccggtcgacccacaatcaagaacgagaaatttctggcgggtctgtcgacagacggcttttgggacatccaaacgtttaaagtaatagaggaggccgtgtacttccaccagcattcaatcctagcctgcaagatagagatggtcgactataaggaagagtataacactactctcccgcagtttatgccttatgaggacggcatttatagtgtcatacagaagaaagttacctggtacgaggctctcaacatgtgcagccaaagcggagggcatttagcctctgtacacaatcagaatggtcagctttttctcgaagatatcgtgaagagggacgggtttccgctgtgggtaggactctcctctcacgatggctctgagtcgagttttgaatggtctgatggatccactttcgactacataccttggaagggccagacttcacccggaaattgtgtgctgctggaccccaagggcacttggaagcatgagaagtgcaacagcgtgaaggatggggctatatgttacaagccaaccaagagtaagaagttgtccaggctgacttattcaagtcggtgccccgcagctaaagaaaacggctccaggtggatccagtataagggacactgttataaaagtgaccaggcattgcattctttctcggaggcaaaaaaactgtgcagcaagcatgatcactcagcgactatagtgtcgattaaggacgaggacgaaaacaagttcgtatcacgcctcatgagagagaacaataatatcaccatgcgggtctggctcggattgagccagcatagcgttgatcagagctggtcctggctggacggcagcgaggtaactttcgtcaagtgggagaacaaatccaaatctggggtcgggaggtgttctatgctgattgcttctaacgagacgtggaaaaaggtcgagtgtgagcacggttttggtcgagtggtgtgtaaagtgcccctcggcccagactacactgctatagcaattattgtggcaactctgagcattcttgtgctgatggggggactgatctggtttctgtttcaaaggcaccgcttgcacttggccggttttagcagcgtgcgttatgcccagggagtgaacgaggacgaaatcatgctcccttcatttcacgactac

SEQ ID NO: 127682 - protein, 128 aa, Artificial Sequence
  derived and/or modified sequence
MDAVAVYHGKISRETGEKLLLATGLDGSYLLRDSESVPGVYCLCVLYHGYIYTYRVSQTETGSWSAETAPGVHKRYFRKIKNLISAFQKPDQGIVIPLQYPVEKKSSARSTQGTTGIREDPDVCLKAP

SEQ ID NO: 127683 - protein, 58 aa, Artificial Sequence
  derived and/or modified sequence
MDAVAVYHGKISRETGEKLLLATGLDGSYLLRDSESVPGVYCLCVLHHWGYIKFINKL

SEQ ID NO: 127684 - DNA, 387 bp, Artificial Sequence
  derived and/or modified sequence
atggatgctgttgccgtctatcacggaaagatatcacgtgagacaggagaaaagttgctactggcaactggcctggatggttcttacctccttcgtgactccgagtccgtgccaggtgtgtattgcctgtgcgtcctttatcacgggtatatctatacgtatagggtgtctcagaccgagaccggatcatggagcgccgagactgcaccaggagtgcacaagcgctactttcggaagatcaagaatctcatctctgcttttcagaagccagaccaggggatagtgattcctcttcagtaccctgttgagaaaaagtcctccgcacgttctacgcaggggaccaccgggattagagaagatcctgatgtatgcctgaaggccccatag

SEQ ID NO: 127685 - DNA, 387 bp, Artificial Sequence
  derived and/or modified sequence
atggatgctgtggccgtgtaccacggcaagatcagccgggagactggagagaagctgctgctggccaccggcctggatggcagctacctgctgcgggacagcgagagcgtgcctggggtgtactgcctgtgtgtgctgtaccacggctacatctacacctacagagtgtcccagacagaaacaggctcctggagcgctgagacagcccctggggtgcacaagcgctacttcaggaagatcaagaacctgatcagcgccttccagaagccagaccagggcatcgtcatccccctgcagtaccctgtggagaagaagagcagcgcccggagcacccagggcaccaccggcatcagagaagatcctgatgtgtgcctgaaggccccctag

SEQ ID NO: 127686 - DNA, 387 bp, Artificial Sequence
  derived and/or modified sequence
atggacgccgtggccgtgtaccacggcaagatcagccgggagaccggagaaaagcttttgcttgctacagggctagacggatcatacctgcttagggactctgagagcgttcccggtgtatattgcttatgcgtgttgtaccacggatatatttatacatatagagtatcgcaaacagaaaccgggtcttggagcgccgagacagcacccggagtgcacaagcgatattttcgcaaaataaagaatcttatctcagcttttcaaaagccagaccaagggatcgtgattcccctgcagtatcctgtcgagaagaaatcctcagcccgatctacacagggtaccacgggtatccgggaggatcccgatgtgtgtctgaaggctccatag

SEQ ID NO: 127687 - DNA, 387 bp, Artificial Sequence
  derived and/or modified sequence
atggacgccgtcgcagtctaccacggaaaaataagcagagaaactggggaaaaactactactagcaaccggacttgacggctcttatctgctcagagattccgaaagcgtgcctggtgtgtattgcctttgcgtgctgtaccatggctacatttatacctacagggtctcacagactgaaacgggttcctggtcagccgaaacggctcccggagtgcacaagcggtacttccgcaaaatcaagaacctgatcagcgcgttccagaagccagaccaaggtatcgtcatccccctgcagtatcccgtggaaaagaaaagctctgccaggtcgactcagggcactaccggtattcgcgaagaccctgatgtgtgcctcaaagcgccatag

SEQ ID NO: 127688 - DNA, 2450 bp, Artificial Sequence
  derived and/or modified sequence
aaatccttcttccaatgttcctcccctctctgtatgaaccctgtgttggggggcagaagatggaagcccttggcaagctcgatcgaaccaagctactaaattgctgagctcgttttaactgaagtgtgagaaggaggtttaaggcaagtagacaacatcctgttgttggggtgcttctctcttttttgcacatctggctgaactgggagtcaggtggttgacttgtgcctggctgcagtagcagcggcatctcccttgcacagttctcctcctcggcctgcccaagagtccaccaggccatggacgcagtggctgtgtatcatggcaaaatcagcagggaaaccggcgagaagctcctgcttgccactgggctggatggcagctatttgctgagggacagcgagagcgtgccaggcgtgtactgcctatgtgtgctgtatcacggttacatttatacataccgagtgtcccagacagaaacaggttcttggagtgctgagacagcacctggggtacataaaagatatttccggaaaataaaaaatctcatttcagcatttcagaagccagatcaaggcattgtaatacctctgcagtatccagttgagaagaagtcctcagctagaagtacacaaggtactacagggataagagaagatcctgatgtctgcctgaaagccccatgaagaaaaataaaacaccttgtactttattttctataatttaaatatatgctaagtcttatatattgtagataatacagttcggtgagctacaaatgcatttctaaagccattgtagtcctgtaatggaagcatctagcatgtcgtcaaagctgaaatggacttttgtacatagtgaggagctttgaaacgaggattgggaaaaagtaattccgtaggttattttcagttattatatttacaaatgggaaacaaaaggataatgaatactttataaaggattaatgtcaattcttgccaaatataaataaaaataatcctcagtttttgtgaaaagctccatttttagtgaaatattattttatagctactaattttaaaatgtcttgcttgattgtatggtgggaagttggctggtgtcccttgtctttgccaagttctccactagctatggtgtcataggctcttttgggatttttgaagctgtatactgtgtgctaaaacaagcactaaacaaagagtgaaggatttatgtttaattctgaaagcaaccttcttgcctagtgttctgatattggacagtaaaatccacagaccaacctggagttgaaaatcttataatttaaaatatgctctaaacatgtttatcgtatttgatgctacaggatttgaaattgtattacaaatccaatgaaatgagtttttcttttcatttacctctgccccagttgtttctactacatggaagacctcattttgaagggaaatttcagcagctgcagctcatgagtaactgatttgtaacaagcctccttttaaagtaaccctacaaaaccactggaaagtttatggttgtattattttttaaaaaaattccaagtgattgaaacctacacgagatacagaattttatgcggcattttcttctcacatttatatttttgtgattttgtgattgattatatgtcactttgctacagggctcacagaattcattcactcaacaaacataatagggcgctgagggcatagaagtaaaaacacctggtccctgctctcagttcactgtcttgttggacgagaaaacaataacgataaaagacagtgaaagaaaataacgataaaagacagtgaaagaaaataacaataaaagacaaggaaaaaataacaatgaaagttgataagtacatgataagcgaggttccccgtgtgtaggtagatctggtctttagaggcagatagataggtcagtgcaaatactctggtccatgggccatatgaaaaggctaagcttcactgtaaaataataactgggaattctggattgtgtatgggtgttggtgaacttggttttaattagtgaactgctgagagacagagctattctccatgtactggcaagacctgatttctgagcatttaatatggatgccgtgggagtacaaaagtggagtgtggcctgagtaatgcattatgggtggtttaccatttcttgaggtaaaagcatcacatgaacttgtaaaggaatttaaaaatcctactttcataataagttgcataggtttaataatttttaattatatggcttgagtttaaattgtaataggcgtaactaattttaactctataatgtgttcattctggaataatcctaaacatatgaattatgtttgcatgttcacttccaagagcctttttttgaaaaaaagctttttttgaatcatcaagtctttcacatttaaataaagtgtttgaaagctttattta

SEQ ID NO: 127689 - DNA, 387 bp, Artificial Sequence
  derived and/or modified sequence
atggacgccgtggccgtgtaccacggcaagatcagcagagagaccggcgagaagctgctgctggccaccggcctggacggcagctacctgctgagagacagcgagagcgtgcccggcgtgtactgcctgtgcgtgctgtaccacggctacatctacacctacagagtgagccagaccgagaccggcagctggagcgccgagaccgcccccggcgtgcacaagagatacttcagaaagatcaagaacctgatcagcgccttccagaagcccgaccagggcatcgtgatccccctgcagtaccccgtggagaagaagagcagcgccagaagcacccagggcaccaccggcatcagagaggaccccgacgtgtgcctgaaggccccctag

SEQ ID NO: 127690 - protein, 314 aa, Artificial Sequence
  derived and/or modified sequence
MAPPQVLAFGLLLAAATATFAAAQEECVCENYKLAVNCFVNNNRQCQCTSVGAQNTVICSKLAAKCLVMKAEMNGSKLGRRAKPEGALQNNDGLYDPDCDESGLFKAKQCNGTSMCWCVNTAGVRRTDKDTEITCSERVRTYWIIIELKHKAREKPYDSKSLRTALQKEITTRYQLDPKFITSILYENNVITIDLVQNSSQKTQNDVDIADVAYYFEKDVKGESLFHSKKMDLTVNGEQLDLDPGQTLIYYVDEKAPEFSMQGLKAGVIAVIVVVVIAVVAGIVVLVISRKKRMAKYEKAEIKEMGEMHRELNA

SEQ ID NO: 127691 - DNA, 945 bp, Artificial Sequence
  derived and/or modified sequence
atggcacctccgcaggtgctggctttcggactcctgctggctgccgctacggccacattcgcagccgcccaagaggagtgtgtgtgtgagaactacaagcttgccgttaattgcttcgtgaataacaatcggcaatgccagtgtacctccgtcggagcccaaaataccgtaatttgcagcaaactcgccgccaaatgtctggttatgaaggcggagatgaatggcagcaaactcggaaggcgcgctaagcccgaaggcgctttacagaataatgacgggttgtatgacccagactgcgatgaatctgggctgtttaaggctaaacaatgcaacgggacgagcatgtgttggtgtgttaacactgctggggttagaagaaccgataaagacaccgaaataacctgttcagaaagagtacgaacttattggatcatcatagagctgaagcacaaagcccgcgagaagccctatgatagtaagagcctgaggaccgccttgcagaaagaaatcactactagataccagttagatccgaaattcatcacgagtattctctacgaaaataacgtcataacaatagacctcgtgcaaaattcctcacagaagacccagaatgacgttgatatcgccgacgtggcttactacttcgagaaggacgttaagggagagtcattattccactccaaaaaaatggatcttactgtgaacggggagcagctggacctcgacccgggccagacactcatctattatgttgatgaaaaagcccccgagttctcaatgcagggactaaaagctggagtcatcgccgtgatagtggtggttgttattgcagtggtggccggcatcgttgtactggtgatatccagaaaaaagagaatggcaaaatacgagaaggccgagatcaaagagatgggggagatgcacagagagttaaatgcctag

SEQ ID NO: 127692 - DNA, 945 bp, Artificial Sequence
  derived and/or modified sequence
atggccccaccccaggtgctggccttcggcctgctgctggccgccgccacagccacctttgctgctgcccaggaggagtgtgtgtgtgagaactacaagctggccgtgaactgctttgtgaacaacaaccggcagtgccagtgcacctctgtgggcgcccagaacacagtcatctgcagcaagctggccgccaagtgcctggtgatgaaggccgagatgaatggcagcaagctgggccggcgggccaagccagagggcgccctgcagaacaatgatggcctgtatgaccctgactgtgatgagagcggcctcttcaaggccaagcagtgcaatggcacctccatgtgctggtgtgtgaacacagctggggtgagaagaacagacaaggacacagagatcacctgcagcgagcgggtgaggacctactggatcatcatcgagctgaagcacaaggcccgggagaagccctatgacagcaagagcctgaggacagccctgcagaaggagatcaccacccgctaccagctggaccccaagttcatcaccagcatcctgtatgaaaataatgtcatcaccatcgacctggtgcagaacagcagccagaagacccagaatgatgtggacattgctgatgtggcctactactttgagaaggatgtgaagggggagagcctcttccacagcaagaagatggacctgactgtgaatggagagcagctggacctggaccccggccagaccctcatctactacgtggatgagaaggcccctgagttctccatgcagggcctgaaggccggcgtgattgctgtgattgtggtggtggtgattgctgtggtggccggcatcgtggtgctggtgatcagcaggaagaagaggatggccaagtatgagaaggccgagatcaaggagatgggagagatgcaccgggagctgaatgcctag

SEQ ID NO: 127693 - DNA, 945 bp, Artificial Sequence
  derived and/or modified sequence
atggcccccccccaggtgctggccttcggcctgctgctggccgccgctacagcaacctttgcggccgcacaggaggaatgcgtctgtgagaattacaagctggcagtgaattgtttcgtcaacaataatcgccaatgtcagtgtacctccgtaggcgctcaaaacaccgttatctgcagtaagcttgccgccaaatgtctggtgatgaaagccgagatgaatggctccaagttggggcgtcgggccaaaccagagggcgctctccagaacaacgacggcttgtatgatccagactgcgatgagtctgggctttttaaggcgaagcaatgtaacggcaccagcatgtgctggtgtgtgaacaccgccggcgtccggagaactgataaggatactgagataacatgcagtgagagggtgaggacctactggatcattatagagctgaagcataaggcgcgggagaagccatacgacagcaagtcactgcgcactgccttacagaaggagattacaacccggtatcagctggacccaaagtttatcacctctatcctgtacgaaaacaacgtaattaccatcgatctggtacaaaacagcagccaaaagacccaaaatgacgtcgatatcgcagacgtggcgtactatttcgagaaggatgtgaaaggtgagagcctgttccacagtaagaagatggacctcaccgtcaacggcgagcaactcgacctggatccgggtcagaccttgatctattatgttgatgaaaaagcccctgagttctccatgcaggggctgaaggccggcgtgatagctgtgatcgtcgtggtggtgattgctgttgtcgccggcatagttgtattggtgatctcaaggaaaaaacgcatggcaaaatatgaaaaggcagagataaaggaaatgggagaaatgcaccgggaactgaacgcctag

SEQ ID NO: 127694 - DNA, 945 bp, Artificial Sequence
  derived and/or modified sequence
atggcccctccccaggttttggcttttgggctactgttagccgctgccactgccacattcgccgcagcacaggaagagtgcgtttgcgaaaactataaactggccgtcaattgctttgtgaataataatcgccagtgccaatgcaccagtgtgggggctcagaacacagtgatatgcagtaagcttgccgcaaaatgcttggttatgaaggctgagatgaatggctcaaaactgggcaggcgagccaaacctgaaggagcccttcagaataacgatggcctttatgaccccgactgtgacgagtctgggcttttcaaagctaagcaatgcaacggaactagtatgtgttggtgtgtcaatacagccggagtgcgcagaacagataaggatacagagataacttgctcagagcgggtccggacctattggatcattattgagctgaagcacaaggcccgtgaaaagccatatgactctaagtcactgcggacggcactgcagaaggaaatcacgaccaggtaccagctggaccccaaattcatcacctcgatactgtacgagaacaacgtcatcaccattgatcttgtgcagaactcctcccagaaaacacagaatgatgtcgatatcgccgatgtggcgtactattttgagaaagatgtgaagggcgaaagcctgtttcactccaaaaagatggatctcaccgtgaacggggagcagctcgatcttgatccaggacagacccttatttactacgttgacgaaaaggcaccagaattcagtatgcagggactgaaagccggagtgattgccgttatagttgtcgttgtgatcgctgttgtcgcgggaatcgtagtgctcgtgattagtaggaagaagcgcatggccaagtacgagaaagccgaaattaaggagatgggagagatgcaccgggaactgaacgcctag

SEQ ID NO: 127695 - DNA, 945 bp, Artificial Sequence
  derived and/or modified sequence
atggcccccccccaggtgctggccttcggcctgctgctggccgccgccaccgccaccttcgccgccgcccaggaggagtgcgtgtgcgagaactacaagctggccgtgaactgcttcgtgaacaacaacagacagtgccagtgcaccagcgtgggcgcccagaacaccgtgatctgcagcaagctggccgccaagtgcctggtgatgaaggccgagatgaacggcagcaagctgggcagaagagccaagcccgagggcgccctgcagaacaacgacggcctgtacgaccccgactgcgacgagagcggcctgttcaaggccaagcagtgcaacggcaccagcatgtgctggtgcgtgaacaccgccggcgtgagaagaaccgacaaggacaccgagatcacctgcagcgagagagtgagaacctactggatcatcatcgagctgaagcacaaggccagagagaagccctacgacagcaagagcctgagaaccgccctgcagaaggagatcaccaccagataccagctggaccccaagttcatcaccagcatcctgtacgagaacaacgtgatcaccatcgacctggtgcagaacagcagccagaagacccagaacgacgtggacatcgccgacgtggcctactacttcgagaaggacgtgaagggcgagagcctgttccacagcaagaagatggacctgaccgtgaacggcgagcagctggacctggaccccggccagaccctgatctactacgtggacgagaaggcccccgagttcagcatgcagggcctgaaggccggcgtgatcgccgtgatcgtggtggtggtgatcgccgtggtggccggcatcgtggtgctggtgatcagcagaaagaagagaatggccaagtacgagaaggccgagatcaaggagatgggcgagatgcacagagagctgaacgcctag

SEQ ID NO: 127696 - DNA, 1724 bp, Artificial Sequence
  derived and/or modified sequence
aactgcagcgccggggctgggggaggggagcctactcactcccccaactcccgggcggtgactcatcaacgagcaccagcggccagaggtgagcagtcccgggaaggggccgagaggcggggccgccaggtcgggcaggtgtgcgctccgccccgccgcgcgcacagagcgctagtccttcggcgagcgagcaccttcgacgcggtccggggaccccctcgtcgctgtcctcccgacgcggacccgcgtgccccaggcctcgcgctgcccggccggctcctcgtgtcccactcccggcgcacgccctcccgcgagtcccgggcccctcccgcgcccctcttctcggcgcgcgcgcagcatggcgcccccgcaggtcctcgcgttcgggcttctgcttgccgcggcgacggcgacttttgccgcagctcaggaagaatgtgtctgtgaaaactacaagctggccgtaaactgctttgtgaataataatcgtcaatgccagtgtacttcagttggtgcacaaaatactgtcatttgctcaaagctggctgccaaatgtttggtgatgaaggcagaaatgaatggctcaaaacttgggagaagagcaaaacctgaaggggccctccagaacaatgatgggctttatgatcctgactgcgatgagagcgggctctttaaggccaagcagtgcaacggcacctccatgtgctggtgtgtgaacactgctggggtcagaagaacagacaaggacactgaaataacctgctctgagcgagtgagaacctactggatcatcattgaactaaaacacaaagcaagagaaaaaccttatgatagtaaaagtttgcggactgcacttcagaaggagatcacaacgcgttatcaactggatccaaaatttatcacgagtattttgtatgagaataatgttatcactattgatctggttcaaaattcttctcaaaaaactcagaatgatgtggacatagctgatgtggcttattattttgaaaaagatgttaaaggtgaatccttgtttcattctaagaaaatggacctgacagtaaatggggaacaactggatctggatcctggtcaaactttaatttattatgttgatgaaaaagcacctgaattctcaatgcagggtctaaaagctggtgttattgctgttattgtggttgtggtgatagcagttgttgctggaattgttgtgctggttatttccagaaagaagagaatggcaaagtatgagaaggctgagataaaggagatgggtgagatgcatagggaactcaatgcataactatataatttgaagattatagaagaagggaaatagcaaatggacacaaattacaaatgtgtgtgcgtgggacgaagacatctttgaaggtcatgagtttgttagtttaacatcatatatttgtaatagtgaaacctgtactcaaaatataagcagcttgaaactggctttaccaatcttgaaatttgaccacaagtgtcttatatatgcagatctaatgtaaaatccagaacttggactccatcgttaaaattatttatgtgtaacattcaaatgtgtgcattaaatatgcttccacagtaaaatctgaaaaactgatttgtgattgaaagctgcctttctatttacttgagtcttgtacatacatacttttttatgagctatgaaataaaacattttaaactgaatttcttaactttga

SEQ ID NO: 127697 - protein, 20 aa, Artificial Sequence
  derived and/or modified sequence
SPSNETPKKKKKRFSFKKSG

SEQ ID NO: 127698 - protein, 332 aa, Artificial Sequence
  derived and/or modified sequence
MGAQFSKTAAKGEAAAERPGEAAVASSPSKANGQENGHVKVNGDASPAAAESGAKEELQANGSAPAADKEEPAAAGSGAASPSAAEKGEPAAAAAPEAGASPVEKEAPAEGEAAEPGSPTAAEGEAASAASSTSSPKAEDGATPSPSNETPKKKKKRFSFKKSFKLSGFSFKKNKKEAGEGGEAEAPAAEGGKDEAAGGAAAAAAEAGAASGEQAAAPGEEAAAGEEGAAGGDPQEAKPQEAAVAPEKPPASDETKAAEEPSKVEEKKAEEAGASAAACEAPSAAGPGAPPEQEAAPAEEPAAAAASSACAAPSQEAQPECSPEAPPAEAAE

SEQ ID NO: 127699 - DNA, 999 bp, Artificial Sequence
  derived and/or modified sequence
atgggcgcccagttcagcaagaccgccgccaagggcgaggccgccgccgagagacccggcgaggccgccgtggccagcagccccagcaaggccaacggccaggagaacggccacgtgaaggtgaacggcgacgccagccccgccgccgccgagagcggcgccaaggaggagctgcaggccaacggcagcgcccccgccgccgacaaggaggagcccgccgccgccggcagcggcgccgccagccccagcgccgccgagaagggcgagcccgccgccgccgccgcccccgaggccggcgccagccccgtggagaaggaggcccccgccgagggcgaggccgccgagcccggcagccccaccgccgccgagggcgaggccgccagcgccgccagcagcaccagcagccccaaggccgaggacggcgccacccccagccccagcaacgagacccccaagaagaagaagaagagattcagcttcaagaagagcttcaagctgagcggcttcagcttcaagaagaacaagaaggaggccggcgagggcggcgaggccgaggcccccgccgccgagggcggcaaggacgaggccgccggcggcgccgccgccgccgccgccgaggccggcgccgccagcggcgagcaggccgccgcccccggcgaggaggccgccgccggcgaggagggcgccgccggcggcgacccccaggaggccaagccccaggaggccgccgtggcccccgagaagccccccgccagcgacgagaccaaggccgccgaggagcccagcaaggtggaggagaagaaggccgaggaggccggcgccagcgccgccgcctgcgaggcccccagcgccgccggccccggcgccccccccgagcaggaggccgcccccgccgaggagcccgccgccgccgccgccagcagcgcctgcgccgcccccagccaggaggcccagcccgagtgcagccccgaggccccccccgccgaggccgccgagtag

SEQ ID NO: 127700 - DNA, 999 bp, Artificial Sequence
  derived and/or modified sequence
atgggggcccagttctctaagacggcagctaaaggcgaggccgccgctgaaagacctggtgaggcagccgtggcatcatcgccatccaaagccaacggacaggaaaacgggcatgtgaaggtgaacggagacgcctcacccgccgccgcagagtctggcgcaaaggaggaactgcaggcaaacggaagtgccccggccgctgataaggaggagccagcagctgcaggatcgggagccgccagcccgtccgccgcggagaagggtgaaccagcagccgcagctgcgcctgaggcaggcgcttcccccgtagagaaagaagccccagccgagggggaagccgccgaacctggcagccccacagcagctgagggagaagccgcctctgctgcttcttctaccagttcgccaaaagctgaagatggcgccacccctagtcctagtaacgaaacacctaaaaaaaaaaagaagcgattctccttcaagaaatccttcaaattgtccggcttctcgtttaagaaaaacaagaaagaagcaggcgagggcggggaggccgaggcccccgctgccgagggggggaaggatgaagctgcaggaggagctgctgctgctgcagctgaagctggcgccgcctctggcgagcaggctgccgcccctggagaagaagcagctgctggcgaagagggcgctgcaggtggagacccccaggaggccaaaccccaagaggccgccgtggcccccgaaaagccgcccgcttctgacgaaacgaaagctgctgaagagccatcaaaggtcgaagaaaagaaggctgaagaagccggggcgtctgctgccgcgtgtgaggctccgagcgcggccggcccaggggccccaccggaacaggaagcagcccctgcagaagaaccagctgctgctgccgccagtagtgcctgcgccgcgccctcccaggaagcacagccagaatgctcacctgaggcccctcctgctgaggctgctgagtag

SEQ ID NO: 127701 - DNA, 999 bp, Artificial Sequence
  derived and/or modified sequence
atgggcgcccagttcagcaagacagctgccaagggggaggccgctgctgagaggcctggagaggccgctgtggccagcagccccagcaaggccaacggccaggagaatggccacgtgaaggtgaatggagatgccagccctgctgctgctgagagcggggccaaggaggagctgcaggccaatggaagtgccccagctgctgacaaggaggagcctgctgctgctggcagcggggccgccagccccagcgctgctgagaagggggagcctgctgctgctgctgcccctgaggccggggccagccctgtggagaaggaggccccagctgagggggaggccgctgagcccggcagccccacagctgctgagggggaggccgccagcgctgccagcagcaccagcagccccaaggcagaagatggagccacccccagccccagcaatgagacccccaagaagaagaagaagcgcttctccttcaagaagagcttcaagctgagcggcttctccttcaagaagaacaagaaggaggccggggagggcggggaggccgaggccccagctgctgagggcggcaaggatgaggccgccggcggcgctgctgctgctgctgctgaggccggggccgccagcggggagcaggccgccgcccctggagaggaggccgccgccggggaggagggcgccgccggcggggacccccaggaggccaagccccaggaggccgctgtggcccctgagaagcccccagccagtgatgagaccaaggctgctgaggagcccagcaaggtggaggagaagaaggccgaggaggccggggccagcgctgctgcctgtgaggcccccagcgctgctggccctggggcccctcctgagcaggaggccgccccagctgaggagcctgctgctgctgctgccagcagcgcctgtgccgcccccagccaggaggcccagcctgagtgcagccctgaggcccccccagctgaggccgctgagtag

SEQ ID NO: 127702 - DNA, 4273 bp, Artificial Sequence
  derived and/or modified sequence
cccgcatcttattagcaaccagggagatttctccattttcctcttgtctacagtgcggctacaaatctgggatttttttattacttctttttttttcgaactacacttgggctcctttttttgtgctcgacttttccaccctttttccctccctcctgtgctgctgctttttgatctcttcgactaaaatttttttatccggagtgtatttaatcggttctgttctgtcctctccaccacccccacccccctccctccggtgtgtgtgccgctgccgctgttgccgccgccgctgctgctgctcgccccgtcgttacaccaacccgaggctctttgtttcccctcttggatctgttgagtttctttgttgaagaagccagcatgggtgcccagttctccaagaccgcagcgaagggagaagccgccgcggagaggcctggggaggcggctgtggcctcgtcgccttccaaagcgaacggacaggagaatggccacgtgaaggtaaacggcgacgcttcgcccgcggccgccgagtcgggcgccaaggaggagctgcaggccaacggcagcgccccggccgccgacaaggaggagcccgcggccgccgggagcggggcggcgtcgccctccgcggccgagaaaggtgagccggccgccgccgctgcccccgaggccggggccagcccggtagagaaggaggcccccgcggaaggcgaggctgccgagcccggctcgcccacggccgcggagggagaggccgcgtcggccgcctcctcgacttcttcgcccaaggccgaggacggggccacgccctcgcccagcaacgagaccccgaaaaaaaaaaagaagcgcttttccttcaagaagtctttcaagctgagcggcttctccttcaagaagaacaagaaggaggctggagaaggcggtgaggctgaggcgcccgctgccgaaggcggcaaggacgaggccgccgggggcgcagctgcggccgccgccgaggcgggcgcggcctccggggagcaggcagcggcgccgggcgaggaggcggcagcgggcgaggagggggcggcgggtggcgacccgcaggaggccaagccccaggaggccgctgtcgcgccagagaagccgcccgccagcgacgagaccaaggccgccgaggagcccagcaaggtggaggagaaaaaggccgaggaggccggggccagcgccgccgcctgcgaggccccctccgccgccgggcccggcgcgcccccggagcaggaggcagcccccgcggaggagcccgcggccgccgcagcctcgtcagcctgcgcagccccctcacaggaggcccagcccgagtgcagtccagaagcccccccagcggaggcggcagagtaaaagagcaagcttttgtgagataatcgaagaacttttctcccccgtttgtttgttggagtggtgccaggtactggttttggagaacttgtctacaaccagggattgattttaaagatgtctttttttattttacttttttttaagcaccaaattttgttgttttttttttttctcccctccccacagatcccatctcaaatcattctgttaaccaccattccaacaggtcgaggagagcttaaacaccttcttcctctgccttgtttctcttttattttttattttttcgcatcagtattaatgtttttgcatactttgcatctttattcaaaagtgtaaactttctttgtcaatctatggacatgcccatatatgaaggagatgggtgggtcaaaaagggatatcaaatgaagtgataggggtcacaatggggaaattgaagtggtgcataacattgccaaaatagtgtgccactagaaatggtgtaaaggctgtcttttttttttttttttaaagaaaagttattaccatgtattttgtgaggcaggtttacaacactacaagtcttgagttaagaaggaaagaggaaaaaagaaaaaacaccaatacccagatttaaaaaaaaaaaaacgatcatagtcttaggagttcatttaaaccataggaacttttcacttatctcatgttagctgtaccagtcagtgattaagtagaactacaagttgtataggctttattgtttattgctggtttatgaccttaataaagtgtaattatgtattaccagcagggtgtttttaactgtgactattgtataaaaacaaatcttgatatccagaagcacatgaagtttgcaactttccaccctgcccatttttgtaaaactgcagtcatcttggaccttttaaaacacaaattttaaactcaaccaagctgtgataagtggaatggttactgtttatactgtggtatgtttttgattacagcagataatgctttcttttccagtcgtctttgagaataaaggaaaaaaaaatcttcagatgcaatggttttgtgtagcatcttgtctatcatgttttgtaaatactggagaagctttgaccaatttgacttagagatggaatgtaactttgcttacaaaaattgctattaaactcctgcttaaggtgttctaattttctgtgagcacactaaaagcgaaaaataaatgtgaataaaatgtacaaatttgttgtgtttttttatgttctaataatactgagacttctaggtcttaggttaatttttaggaagatcttgcatgccatcaggagtaaattttattgtggttcttaatctgaagttttcaagctctgaaattcataatccgcagtgtcagattacgtagaggaagatcttacaacattccatgtcaaatctgttaccatttattggcatttagttttcatttaagaattgaacataattatttttattgtagctatatagcatgtcagattaaatcatttacaacaaaaggggtgtgaacctaagactatttaaatgtcttatgagaaaatttcataaagccattctcttgtcattcaggtccagaaacaaattttaaactgagtgagagtctatagaatccatactgcagatgggtcatgaaatgtgaccaaatgtgtttcaaaaattgatggtgtattacctgctattgtaattgcttagtgcttggctaatttccaaattattgcataatatgttctaccttaagaaaacaggtttatgtaacaaagtaatggtgttgaatggatgatgtcagttcatgggcctttagcatagttttaagcatcatttttttttttttttttgaaagtgtgttagcatcttgttactcaaaggataagacagacaataatacttcactgaatattaataatctttactagtttacctcctctgctctttgccacccgataactggatatcttttccttcaaaggaccctaaactgattgaaatttaagatatgtatcaaaaacattatttcatttaatgcacatctgttttgctgtttttgagcagtgtgcagtttagggttcatgataaatcattgaaccacatgtgtaacaactgaatgccaaatcttaaactcattagaaaaataacaaattaggttttgacacgcattcttaattggaataatggatcaaaaatagtggttcatgaccttaccaaacacccttgctactaataaaatcaaataacacttagaagggtatgtatttttagttagggtttcttgatcttggaggatgtttgaaagttaaaaattgaatttggtaaccaaaggactgatttatgggtctttcctatcttaaccaacgttttcttagttacctagatggccaagtacagtgcctggtatgtagtaagactcagtaaaaaagtggatttttaaaaataactcccaaagtgaatagtcaaaaatcctgttagcaaactgttatatattgctaagtttgttcttttaacagctggaatttattaagatgcattattttgattttattcactgcctaaaacactttgggtggtattgatggagttggtggattttcctccaagtgattaaatgaaatttgacgtatcttttcatccaaagttttgtacatcatgttttctaacggaaaaaaatgttaatatggcttttttgtattactaaaaatagctttgagattaaggaaaaataaataactcttgtacagttcagtattgtctattaaatctgtattggcagtatgtataatggcatttgctgtggttacaaaatacttcctctgggttataataatcatttgatccaattcctattgcttgtaaaataaagttttaccagttgatataa

SEQ ID NO: 127703 - DNA, 999 bp, Artificial Sequence
  derived and/or modified sequence
atgggcgcccagttcagcaagaccgccgccaagggcgaggccgccgctgaacggcctggtgaggctgccgtggcctcctcccccagcaaggctaacggccaggagaacggacatgtgaaagtgaatggcgacgcctcccccgccgccgccgagtcaggggctaaagaggagcttcaggccaacggcagcgccccagccgccgataaggaagaacctgctgcggcagggtcaggagccgcatctccttcagccgccgagaaaggggaaccagctgccgcagccgcacctgaggcaggggcatccccggtcgagaaggaagcgccagccgaaggtgaagccgctgagccgggcagtcccaccgcagcagagggagaggcagcctccgctgcaagctctacgagttcccccaaggctgaggatggtgccacaccttccccgtctaatgaaactcctaaaaagaagaagaagaggttctcgttcaagaagagttttaagctgtctggctttagtttcaagaaaaacaaaaaagaggcgggagagggcggcgaagccgaggcacctgcagctgaaggaggaaaagacgaagctgccggaggagcggctgccgctgctgctgaagccggcgccgcctctggagagcaggccgcggctcctggcgaggaagctgccgccggcgaagaaggagccgcaggaggcgacccccaagaggctaaaccacaggaggccgctgtggcgccagaaaagccaccagccagcgacgaaactaaagccgcagaagagccctccaaggtggaagaaaaaaaggctgaggaagcaggtgcgtctgccgccgcctgtgaggccccaagcgctgccgggcccggcgcacccccagagcaggaggctgctcccgctgaggagcccgcagctgcagcggcaagtagtgcatgcgccgctccatcgcaggaggcccaacccgagtgcagccctgaggcgcctcctgccgaggctgccgagtag

SEQ ID NO: 127704 - DNA, 999 bp, Artificial Sequence
  derived and/or modified sequence
atgggtgctcaattcagcaagactgcagccaagggggaggccgctgcggaacggcctggcgaagcagccgtcgctagcagtcccagtaaagcaaatggccaggaaaacggacatgtcaaagtaaacggagatgcaagccctgccgctgctgaaagcggggcaaaggaggagctgcaggcaaacgggtctgctccagctgctgataaagaggagcctgccgcagccggatccggagcggcatcaccatcagctgccgagaaaggggaacccgcagcagcggctgcacccgaggccggagcatccccggttgaaaaggaggcccctgctgagggagaggctgcagagccgggaagtcctaccgccgctgaaggcgaggcggcttcagctgctagtagcacaagctcacccaaagcagaagacggtgcaacccccagtccatccaacgaaacgcccaagaaaaagaagaagcgctttagtttcaagaagtcttttaagctgagcggcttttcctttaaaaaaaacaagaaagaagcgggtgagggcggagaggcggaggccccagctgccgagggaggcaaggacgaggccgcaggcggagccgctgctgccgctgcagaagctggggctgcatccggcgaacaggcagcagccccaggcgaggaagctgcagccggtgaagaaggcgctgcagggggtgatccccaggaggctaagccccaggaagcagctgtggctcctgagaaacctcccgcttctgatgagactaaagctgctgaagagccatctaaggtcgaagaaaaaaaagctgaagaggccggagcttctgctgcagcatgtgaggccccatcggctgcaggcccaggagccccacctgaacaagaggccgctcccgcagaggagcctgctgctgccgctgcctcttcagcttgtgcagccccttctcaagaagcccagcccgagtgctcgcccgaggcaccaccggcagaagcagccgagtag

SEQ ID NO: 127705 - protein, 221 aa, Artificial Sequence
  derived and/or modified sequence
MAAAVRMNIQMLLEAADYLERREREAEHGYASMLPYNNKDRDALKRRNKSKKNNSSSRSTHNEMEKNRRAHLRLCLEKLKGLVPLGPESSRHTTLSLLTKAKLHIKKLEDCDRKAVHQIDQLQREQRHLKRQLEKLGIERIRMDSIGSTVSSERSDSDREEIDVDVESTDYLTGDLDWSSSSVSDSDERGSMQSLGSDEGYSSTSIKRIKLQDSHKACLGL

SEQ ID NO: 127706 - DNA, 5587 bp, Artificial Sequence
  derived and/or modified sequence
gagtcggggataaacactccgcggcggtggcggctgctgctctgctccgggttctgtcactgtgtcggcggtgcccagctcactggccccctccctctcttgtcgagcgtggttgccagagaggctccctcagccctgctccgcggggtccacagcgggctccacagcgggctccatagcgggctccacagcggtccggcggcggcagcgagcccgtgggcagtgggggttggtcccgtggctccggcccccggtgcagaatggcggcggcggttcggatgaacatccagatgctgctggaggcggccgactatctggagcggcgggagagagaagctgaacatggttatgcctccatgttaccatacaataacaaggacagagatgccttaaaacggaggaacaaatccaaaaagaataacagcagtagcagatcaactcacaatgaaatggagaagaatagacgggctcatcttcgcttgtgcctggagaagttgaaggggctggtgccacttggacccgaatcaagtcgacacactacgttgagtttattaacaaaagccaaattgcacataaagaaacttgaagattgtgacagaaaagccgttcaccaaatcgaccagcttcagcgagagcagcgacacctgaagaggcagctggagaagctgggcattgagaggatccggatggacagcatcggctccaccgtctcctcggagcgctccgactccgacagggaagaaatcgacgttgacgtggagagcacggactatctcacaggtgatctggactggagcagcagcagtgtgagcgactctgacgagcggggcagcatgcagagcctcggcagtgatgagggctattccagcaccagcatcaagagaataaagctgcaggacagtcacaaggcgtgtcttggtctctaagagagtgggcactgcggctgtctccttgaaggttctccctgttggttctgattaggtaacgtattggacctgcccacaactcccttgcacgtaaacttcagtgtcccaccttgaccaaaatcagctttgtaactgttttcaaggaggtgcttaggattgtgggtttctgattgcatccactagcttctctttttctcgccataaaaatttgtctctgagagactatacattccaatcaatttgaagcatccaagaattcttagaccgaataagcaatgtccacatctcagcaatccccctctttgctctcctcgtgtcctctcccagacctttcttccagttttctggcttactgtgttacttgcctaggaggaatgtccaagtgtgtcttgtacttaggaaactgaaggaaacaaacttttgaaattgagatcctgatctcagaactccaaagtaagctttgaaagcagcatttaagagcacttaaccatggacctcaccaccagtgaggaagtcaggaatacctctagaaaacacgcccttcacaccgcgcatgctcattcccccgacgcgccgcgtgtggatgggagcagtatttctcactttaaaatggacaccttgatagtgtgtctctggggttgcacagctcatcaaagttccaaattgtttgttctcacaaacaaaacggtacaatctatttttgtgcgatgttcttgggacctcgctgtgttctgctatctcgaggcacattctcccctccaactttgttaatgctacttgtctctggaacatttttttttcctacctcagagataaatgagatctccatttcccacttaacacagtgattatccttttttccccccccaaaatagtgacatttggtccaattataatctattttcctattgaactttcagcaataactgagctgtggcactagcagagctagtagccattatcagtgaaagaaaaagtccacatttctactctctgttgcaggtgaacaggagaggatggtacactgttactagaactcctctccttattgattatttttggacacacccagaaacttctttatggaggcttttgggttgatagtttaaaaggctgatttttctttttggttatgatttctcccttaagtggtctccgactttgtagcatttttatttaagctaaaacagagcacatgtatatgtacataagacacattaaatctataaatactatttattcattttatataaactaatgtaatggaaaacaaattcttatgactttgtggttttatagatgttctagaaactttgtatgtaggtatctacaaaattagttcattcccctgaatatttttgcattcatatttttgaggtcttgatgttttcagcctctggcgaatctttttcattgaatttgaaccatttgtaaaatctgtgatgctgaagcagagtgtgtcacaaagtgatgagaacattactaaaatccacggacgcactgcgacctaagggctcaacggctgactcggcagcgggcagccaccccacgctcccctgcggtcactcgcacaccacagcctgaagctcccccagcgcctgcacctcgcacacagctaaggtcaaagttcaaacgcactccacacggaagctcattctatacccgaagagcagtctcagaaagcaagattacttttgtgttttttaaaaaatgattctttaatgtatttttctaaacattctgattggaagtagtggattcctaaatgattccaaagtcacctgtaattcttctgtttttgttttgttctgtcttttcttcattttggctttgggtggggggaggggcaggtgacacaaaggattttttttttttttttttaatttttggaatcttttccaataaccagctaaagatttgcactgaaatacaacttgtatgccttttgcatttttaaagcctgcttcctggatttaagcagagtgatagtgttcaaagagccagttcagcctgtaacatatttgaaaaagatatgtctgcactttgaggtcccttttgaatgccattcactagacctctcaagcattttgtttcattgctacatccaagcgcctcacaagtccacaatgcgggacagcatcaaaagctcaagactttggaaaaagcttgtgggcttgcactgggggagggaagggaacaaaatttgtgtacttctttgtttaatttagaaataaggcatccaagagatgccattattttctgtgtttcaattgttgtgcctttgagttaaactgcatttttgtcttttggttgaaatctgaaatgtactgtcccaatataaaacagtaattatttgacctttgcactgtttgtctggtccttttcagtttgattgcatataaatgtggaacttgatagatctctatatttttaatgcacttgtgataaactggcagcagggttagacattactttcaaagcttgaggtagaccgagtcagcatgctagacaggcttctctctctaaccaaaactgtaatcttcaggaccagcaaactcagcccaaggcagctaatccccccaaccccatcctccgcgccccgtgcggctgatcggcagccctgattcgccaatttgtcctctctcattcactgatccaccagcctgactgctaagagctatagtctttttagttgttttgtctttttaagcaagatgaaaacctttctattagggattttggggttgggaggggatgggcagagatataaaccccagcctttaagactttgacaattgtacgtaaatacagatgtgtataaatataggcacatgcatatttttatgtgaaagttgattttaaaaaactaaaaaaatctaaactgcactcttattgataccatcataacgcaagtgggaaaaataagagtacgcagtctaatttaatttcatgcagtgggaaaatatatatgtgtgcttctgtaacatcctgaaaacatagctttccatcccctgttggctttgaatggtgggccgagcacccaggtcgtctgtattttggttttcttttgctaagcagagatcttgaattcttcaaggtgctgatagcaactgctggctcctttctgtagtcacacacctaatgctagtttagtgattcaaaatgcatcacatttttaggcaggacctagattttccctgtcaacctaagatgaaaataatttcagtgttgattcagaactgaacattaagtaggccctcgtcctgcagttggccacttgagtgttttgttttgtttttattttttaaggtgggcattttcctttaacctctactttttcaaaagcaacaaaggggcctcaacctgagtttcctatgggcctctcttctgcatccccaaagcggccaagagcaaatcctgggggataagaaaaaagtgtaaactaggtaggattgtgatgctcaaaataaccatctagcaatatcttggagcttgagaatagattttgtgggcttatttcttcttgcctcttccccatcctttcaagagagaacttatttttgaaaagtatctatatatacacacacacacacacacacacatattattatttaggtttttataccatactgtattggcgagaataccactatcattgtcctttacagtctatttcttcccccaagtcttggtctttttttattttctattttttcatgaaccacacaggagactttaacatcctggtcttttctgtttcttctttgtttccccaagtttgtctgtccccctttgccttccctgagtgttgaacatcaggtagtaaaaggctaaacgcaatttcttgcatgtcaatctattctttttctatgtttgactctgatgcagtgtgtttagcgtgtctagtagctggctactcctatttaaaaactcttcctggtagaagacaacccaaagacccttttcgatgaggtggtttctcattctacatcctctgatctctatagactgtaggatgctttgctttcaaagataactgggttagagggtggggtgtgcaataggtgatttatcatggtttttttcattatcaatattacatggatgattttctcagattcttctgaaagaagaaattgacaggcactgctagattcagctattgaatggctgaagagattgagtatttgaccttctctcaaaatcataaagtgagaattcataaggcacccaatgttaagatttatccagatttttacattttgatttcttctctctgtggggtggcaagttgagggagcattcttcattttagcttttacctgacaaccaaacttgcctttaccccatccctagaattggtgctcttggaatattgctgttaccatcatttttggggggccatcttcctaatgctacacacagcctgacaggggagcagcagatgaaagggtatgctattctgtttccagatgtttctttatgtaaatatgacgccaatgtaaatcctgtgtcaagatcatagagaatggtgctttttactacagttagcacatgcatttttagaaactactacatgttttagagaatctttgctgtgtatatgtaaactgtattgttcaactgttaacaaataataaattatttcattattaaagaaa

SEQ ID NO: 127707 - DNA, 103 bp, Artificial Sequence
  derived and/or modified sequence
aaacgcagaaacaaatcaacgaaagaacgaagcaatgaaagacaaagcaacaaaagaatggagtaagaaagcacactccacaaagtggaagcaggctgggaca

SEQ ID NO: 127708 - DNA, 666 bp, Artificial Sequence
  derived and/or modified sequence
atggctgccgcagtgaggatgaatatccagatgttgctggaagctgctgactatctggaacgcagggagagggaagctgaacacgggtacgcctctatgctgccatataataataaagaccgggatgctctgaaaagaaggaacaagagcaaaaagaacaactcatcatctcggtccactcataatgaaatggaaaagaacagacgagcacacttgaggctgtgtttggagaagctcaagggtcttgtgccattgggacctgagagcagtcggcacacaactctttccctactcaccaaggctaagctccacattaaaaagctcgaggattgcgaccgcaaggcagtacatcagatcgatcagctgcagcgggaacagcgacatttaaaaaggcagctggagaaactcggaattgagcggatcagaatggacagtatcggatccactgtgagttctgaacgcagcgattctgaccgggaagaaattgacgtggacgtggaaagcaccgattacctgacaggcgacctggactggtcttcttcttcggtgtcagattcggatgagcgcgggtctatgcagtccttgggctctgatgaggggtactccagcacctctataaagcgcataaagctgcaggatagccacaaggcatgcctgggtctgtag

SEQ ID NO: 127709 - DNA, 666 bp, Artificial Sequence
  derived and/or modified sequence
atggctgctgctgtgaggatgaacatccagatgctgctggaggccgctgactacctggagcggcgggagcgggaggccgagcacggctacgcctccatgctgccctacaacaacaaggacagagatgccctgaagagaagaaacaagagcaagaagaacaacagcagcagccgcagcacccacaatgagatggagaagaacagaagagcccacctgcggctgtgcctggagaagctgaagggcctggtgcccctgggccctgagagcagccgccacaccaccctgagcctgctgaccaaggccaagctgcacatcaagaagctggaggactgtgacaggaaggctgtgcaccagattgaccagctgcagcgggagcagaggcacctgaagaggcagctggagaagctgggcatcgagcgcatccgcatggacagcatcggcagcacagtgagcagcgagaggagtgacagcgaccgggaggagattgatgtggatgtggagagcacagactacctgactggagacctggactggagcagcagctctgtgtctgacagtgatgagcggggctccatgcagagcctgggcagtgatgagggctacagcagcaccagcatcaagaggatcaagctgcaggacagccacaaggcctgcctgggcctgtag

SEQ ID NO: 127710 - DNA, 666 bp, Artificial Sequence
  derived and/or modified sequence
atggccgccgccgtgcggatgaacatccagatgctgctggaggccgctgactacttagagcgccgggaacgggaggcagagcatgggtatgctagtatgctgccctacaacaacaaagatcgagatgccctgaaacgccgaaacaagagcaagaagaacaactcatcctcacgctcaacccataatgagatggagaagaatagacgtgcgcacctgaggttgtgtctggaaaagctgaaagggcttgtgccattgggtcccgaatccagtcgacatacaactctctccttgctgaccaaagctaagctgcacattaagaagctggaggattgtgaccgaaaggcggtccatcagatcgatcagctgcagcgagaacagcgccatctgaagaggcaactggagaaactgggcatagagcgtattagaatggatagcatcgggtccaccgtgtccagcgagcgatcggattccgaccgggaggagattgatgtggacgtggagagtacagactatctgactggtgacctggactggagcagctcttcagtctcagactctgatgaaagaggtagcatgcagagcctcggaagcgatgaagggtacagttctacaagtatcaagcggatcaagttgcaggacagccacaaggcgtgtctcgggctgtag

SEQ ID NO: 127711 - DNA, 666 bp, Artificial Sequence
  derived and/or modified sequence
atggcggcagcagtacgcatgaacatccagatgctactggaggctgccgactatctggaaagacgggagagggaagctgagcatgggtatgcctccatgctcccctataataacaaagatcgggatgctttgaagagaaggaacaagtccaagaaaaacaactctagcagccgatccactcacaatgaaatggagaagaatagaagggctcaccttagactctgcctggagaaactaaagggcctcgtgccgttaggccctgagtcgtctagacatactaccttaagccttttaacgaaggccaaactgcacatcaagaaattggaggattgcgatcgcaaggccgtccatcaaatcgaccagctccagagggaacaacgccatctgaaacgccagttggaaaagttaggtatcgagagaatacggatggactccattgggtccaccgtgagcagtgaaaggtctgactctgaccgagaagaaattgatgttgatgtcgagtccactgattacctgacaggagacctcgactggtcttcatctagcgtcagcgactctgacgagcgtggcagtatgcagtcacttgggagcgacgaaggatacagctctacttcaattaaaaggattaaacttcaagacagccacaaagcatgcttgggactgtag

SEQ ID NO: 127712 - DNA, 666 bp, Artificial Sequence
  derived and/or modified sequence
atggccgccgccgtgagaatgaacatccagatgctgctggaggccgccgactacctggagagaagagagagagaggccgagcacggctacgccagcatgctgccctacaacaacaaggacagagacgccctgaagagaagaaacaagagcaagaagaacaacagcagcagcagaagcacccacaacgagatggagaagaacagaagagcccacctgagactgtgcctggagaagctgaagggcctggtgcccctgggccccgagagcagcagacacaccaccctgagcctgctgaccaaggccaagctgcacatcaagaagctggaggactgcgacagaaaggccgtgcaccagatcgaccagctgcagagagagcagagacacctgaagagacagctggagaagctgggcatcgagagaatcagaatggacagcatcggcagcaccgtgagcagcgagagaagcgacagcgacagagaggagatcgacgtggacgtggagagcaccgactacctgaccggcgacctggactggagcagcagcagcgtgagcgacagcgacgagagaggcagcatgcagagcctgggcagcgacgagggctacagcagcaccagcatcaagagaatcaagctgcaggacagccacaaggcctgcctgggcctgtag

SEQ ID NO: 127713 - protein, 205 aa, Artificial Sequence
  derived and/or modified sequence
MALQLSREQGITLRGSAEIVAEFFSFGINSILYQRGIYPSETFTRVQKYGLTLLVTTDLELIKYLNNVVEQLKDWLYKCSVQKLVVVISNIESGEVLERWQFDIECDKTAKDDSAPREKSQKAIQDEIRSVIRQITATVTFLPLLEVSCSFDLLIYTDKDLVVPEKWEESGPQFITNSEEVRLRSFTTTIHKVNSMVAYKIPVND

SEQ ID NO: 127714 - DNA, 618 bp, Artificial Sequence
  derived and/or modified sequence
atggctctccagttgtcacgggagcagggcatcaccttgagggggtccgccgagatagtggccgagttttttagtttcggtatcaatagcattctgtaccaaagggggatctacccatccgagacatttaccagggttcagaaatacggcctgacattacttgtcacaaccgacttggaactgataaagtatcttaacaacgtggtcgagcaacttaaggattggctgtacaaatgcagcgtccagaagctggtggtggttataagcaacatcgagtccggcgaggttctggaaaggtggcagttcgacatcgagtgcgacaaaacagctaaagacgattccgctccacgggagaagtctcagaaagccattcaggacgaaatccgaagcgttattcgtcagataactgctactgtcacctttctgccattgctggaggtgtcatgtagcttcgatctattgatatacacggataaggatctcgtcgtgcccgaaaagtgggaggagtccggcccgcagtttataacaaactctgaagaagtgagattgaggtcttttactaccacaatccataaagttaactcaatggtggcttacaagatcccggtgaatgactag

SEQ ID NO: 127715 - DNA, 618 bp, Artificial Sequence
  derived and/or modified sequence
atggccctgcagctgagccgggagcagggcatcaccctgcggggcagcgctgagatcgtggccgagttcttctcctttggcatcaacagcatcctgtaccagaggggcatctaccccagcgagaccttcaccagggtgcagaagtatggcctgaccctgctggtgaccacagacctggagctgatcaagtacctgaacaacgtggtggagcagctgaaggactggctgtacaagtgcagcgtgcagaagctggtggtggtgatcagcaacattgaaagtggagaggtgctggagcgctggcagtttgatattgaatgtgacaagacagccaaggatgacagcgccccccgggagaagagccagaaggccatccaggatgagatccgcagcgtcatccggcagatcacagccaccgtgaccttcctgcccctgctggaggtgtcctgcagctttgacctgctgatctacacagacaaggacctggtggtgcctgagaagtgggaggagagcggcccccagttcatcaccaacagcgaggaggtgcggctgcgctccttcaccaccaccatccacaaggtgaacagcatggtggcctacaagatccctgtgaatgactag

SEQ ID NO: 127716 - DNA, 1654 bp, Artificial Sequence
  derived and/or modified sequence
ggaatcgtcatcttcttccctcggccccaactagtagaccacgaccagaagacacatcctaacctacacctaccgtagtgtcacacccggcacagcgcgaccaggtccaccaactgcgcctgcgcgaaccggccgctcccgcgacatcacaggaaggctgagagaaagggcaggtccccgctgcgtggggctgggcttaaaggctcgtcgcgcctgcgcaaaggacctgacgacgtgctgcgtcgttacttttgaaacgcttggcggggaagtgctgttggagccgctgtggttgctgtccgcggagtggaagcgcgtgcttttgtttgtgtccctggccatggcgctgcagctctcccgggagcagggaatcaccctgcgcgggagcgccgaaatcgtggccgagttcttctcattcggcatcaacagcattttatatcagcgtggcatatatccatctgaaacctttactcgagtgcagaaatacggactcaccttgcttgtaactactgatcttgagctcataaaatacctaaataatgtggtggaacaactgaaagattggttatacaagtgttcagttcagaaactggttgtagttatctcaaatattgaaagtggtgaggtcctggaaagatggcagtttgatattgagtgtgacaagactgcaaaagatgacagtgcacccagagaaaagtctcagaaagctatccaggatgaaatccgttcagtgatcagacagatcacagctacggtgacatttctgccactgttggaagtttcttgttcatttgatctgctgatttatacagacaaagatttggttgtacctgaaaaatgggaagagtcgggaccacagtttattaccaattctgaggaagtccgccttcgttcatttactactacaatccacaaagtaaatagcatggtggcctacaaaattcctgtcaatgactgaggatgacatgaggaaaataatgtaattgtaattttgaaatgtggttttcctgaaatcaagtcatctatagttgatatgttttatttcattggttaatttttacatggagaaaaccaaaatgatacttactgaactgtgtgtaattgttccttttatttttttggtacctatttgacttaccatggagttaacatcatgaatttattgcacattgttcaaaaggaaccaggaggtttttttgtcaacattgtgatgtatattcctttgaagatagtaactgtagatggaaaaacttgtgctataaagctagatgctttcctaaatcagatgttttggtcaagtagtttgactcagtataggtagggagatatttaagtataaaatacaacaaaggaagtctaaatattcagaatctttgttaaggtcctgaaagtaactcataatctataaacaatgaaatattgctgtatagctccttttgaccttcatttcatgtatagttttccctattgaatcagtttccaattatttgactttaatttatgtaacttgaacctatgaagcaatggatatttgtactgtttaatgttctgtgatacagaactcttaaaaatgttttttcatgtgttttataaaatcaagttttaagtgaaagtgaggaaataaagttaagtttgttttaaatttgtcttaaaa

SEQ ID NO: 127717 - DNA, 618 bp, Artificial Sequence
  derived and/or modified sequence
atggccctgcagctgagccgggagcagggcatcaccctgcggggcagtgccgagattgtggctgagttctttagttttggaatcaactctatcctttatcaacgcgggatctaccctagcgaaaccttcactcgcgtccagaagtacggtctgaccctattagtcacaaccgatcttgagctgatcaaatatctcaacaacgtggtagagcagttaaaggattggctctacaaatgctcagttcagaaactcgtggttgtcatttcaaacatcgagtccggcgaagttctggagcgttggcagtttgacattgaatgcgacaagaccgctaaagacgactctgcaccccgagaaaagagtcaaaaggccattcaggatgagatccggtcagtcattagacagatcacagccactgtgaccttcctgccactccttgaagtcagctgctcctttgatttgctgatctatacagacaaagacctggtggttcccgagaagtgggaagaatccggaccacaatttattacgaattcagaggaagtgcggctcagatccttcaccaccacaatccacaaagtcaattcaatggtggcatataaaataccagttaacgattag

SEQ ID NO: 127718 - DNA, 618 bp, Artificial Sequence
  derived and/or modified sequence
atggccctgcagcttagtcgggaacaggggataacactgaggggcagcgcagagatcgttgccgagttttttagcttcggcattaatagtatcctttatcaacgagggatatatccgagcgaaacatttactagggttcagaagtatggcctgactcttttagtcaccacggatttggagctcatcaagtatctgaacaatgttgtggagcagcttaaggactggctgtacaaatgttcagtgcagaagttggtcgtcgtgatttctaatattgagtcaggtgaggttctagagagatggcaatttgatatcgaatgtgacaaaactgccaaggacgattcagcgcctcgcgaaaagtcacagaaggcaatccaagacgagatccgctctgtgattcggcaaatcacagcgaccgttacattcttgccactgttggaggtgtcatgctctttcgacttgctaatctacacagataaggacctggtcgttcctgagaagtgggaggaaagcggaccacagtttatcacaaacagcgaagaagttcgcctcaggagcttcaccaccaccattcacaaagttaactctatggtcgcttacaagatccctgtgaacgactag

SEQ ID NO: 127719 - DNA, 618 bp, Artificial Sequence
  derived and/or modified sequence
atggccctgcagctgagcagagagcagggcatcaccctgagaggcagcgccgagatcgtggccgagttcttcagcttcggcatcaacagcatcctgtaccagagaggcatctaccccagcgagaccttcaccagagtgcagaagtacggcctgaccctgctggtgaccaccgacctggagctgatcaagtacctgaacaacgtggtggagcagctgaaggactggctgtacaagtgcagcgtgcagaagctggtggtggtgatcagcaacatcgagagcggcgaggtgctggagagatggcagttcgacatcgagtgcgacaagaccgccaaggacgacagcgcccccagagagaagagccagaaggccatccaggacgagatcagaagcgtgatcagacagatcaccgccaccgtgaccttcctgcccctgctggaggtgagctgcagcttcgacctgctgatctacaccgacaaggacctggtggtgcccgagaagtgggaggagagcggcccccagttcatcaccaacagcgaggaggtgagactgagaagcttcaccaccaccatccacaaggtgaacagcatggtggcctacaagatccccgtgaacgactag

SEQ ID NO: 127720 - protein, 663 aa, Artificial Sequence
  derived and/or modified sequence
RSRGAEATESKLSGGFRWTQKTSPTQGDSAITHSLYRMIFLTALPLFWIMISASRGGHWGAWMPSSISAFEGTCVSIPCRFDFPDELRPAVVHGVWYFNSPYPKNYPPVVFKSRTQVVHESFQGRSRLLGDLGLRNCTLLLSNVSPELGGKYYFRGDLGGYNQYTFSEHSVLDIVNTPNIVVPPEVVAGTEVEVSCMVPDNCPELRPELSWLGHEGLGEPAVLGRLREDEGTWVQVSLLHFVPTREANGHRLGCQASFPNTTLQFEGYASMDVKYPPVIVEMNSSVEAIEGSHVSLLCGADSNPPPLLTWMRDGTVLREAVAESLLLELEEVTPAEDGVYACLAENAYGQDNRTVGLSVMYAPWKPTVNGTMVAVEGETVSILCSTQSNPDPILTIFKEKQILSTVIYESELQLELPAVSPEDDGEYWCVAENQYGQRATAFNLSVEFAPVLLLESHCAAARDTVQCLCVVKSNPEPSVAFELPSRNVTVNESEREFVYSERSGLVLTSILTLRGQAQAPPRVICTARNLYGAKSLELPFQGAHRLMWAKIGPVGAVVAFAILIAIVCYITQTRRKKNVTESPSFSAGDNPPVLFSSDFRISGAPEKYESERRLGSERRLLGLRGEPPELDLSYSHSDLGKRPTKDSYTLTEELAEYAEIRVK

SEQ ID NO: 127721 - protein, 626 aa, Artificial Sequence
  derived and/or modified sequence
MIFLTALPLFWIMISASRGGHWGAWMPSSISAFEGTCVSIPCRFDFPDELRPAVVHGVWYFNSPYPKNYPPVVFKSRTQVVHESFQGRSRLLGDLGLRNCTLLLSNVSPELGGKYYFRGDLGGYNQYTFSEHSVLDIVNTPNIVVPPEVVAGTEVEVSCMVPDNCPELRPELSWLGHEGLGEPAVLGRLREDEGTWVQVSLLHFVPTREANGHRLGCQASFPNTTLQFEGYASMDVKYPPVIVEMNSSVEAIEGSHVSLLCGADSNPPPLLTWMRDGTVLREAVAESLLLELEEVTPAEDGVYACLAENAYGQDNRTVGLSVMYAPWKPTVNGTMVAVEGETVSILCSTQSNPDPILTIFKEKQILSTVIYESELQLELPAVSPEDDGEYWCVAENQYGQRATAFNLSVEFAPVLLLESHCAAARDTVQCLCVVKSNPEPSVAFELPSRNVTVNESEREFVYSERSGLVLTSILTLRGQAQAPPRVICTARNLYGAKSLELPFQGAHRLMWAKIGPVGAVVAFAILIAIVCYITQTRRKKNVTESPSFSAGDNPPVLFSSDFRISGAPEKYESERRLGSERRLLGLRGEPPELDLSYSHSDLGKRPTKDSYTLTEELAEYAEIRVK

SEQ ID NO: 127722 - DNA, 1992 bp, Artificial Sequence
  derived and/or modified sequence
aggtctaggggggctgaggccacggagagcaaactgagtggcggtttccgctggacgcagaaaacctcacctactcaaggcgattctgctatcacgcatagcttgtacagaatgatctttctgacagcgctcccactattctggatcatgatcagtgccagcagaggagggcattggggagcctggatgccctcttcgatctccgcgtttgaaggtacatgtgtgagtattccatgccgcttcgatttccctgatgaacttagaccggctgtggtgcatggggtatggtatttcaactcgccatacccaaaaaattacccacccgtggtctttaagagccgcactcaggtggtgcatgaaagttttcaaggcaggtccaggttgctgggcgacttaggattgcgcaattgtaccctccttctttccaacgtctctcccgagcttggaggcaaatactactttcggggagatcttgggggatataatcagtacactttttccgaacactctgtcttagacatcgtgaatactccaaacatcgtggttcctcccgaggtggtggcgggcaccgaagtcgaagtgagctgcatggttccagacaactgccccgagctgagacccgagctatcatggcttggtcacgaaggcctgggggaacctgccgtcctgggtagacttagggaggacgaaggaacctgggtgcaagtgtccctgctgcattttgtgcctactcgagaggccaacggccaccgtcttggctgtcaggcttcttttccaaataccactctgcagttcgaagggtatgcaagcatggacgtgaagtacccccctgtgatcgtggagatgaatagtagcgtcgaggcaattgagggatcccacgtgagtctcttgtgcggcgcagacagcaatccacccccactcctgacgtggatgcgagacggcacagtattgcgcgaagctgttgctgaaagcctcctgctggaacttgaggaggtgaccccagctgaagacggtgtttacgcatgtttggctgagaatgcctatggccaggataaccgtactgtcggtcttagtgttatgtacgcaccttggaagccaaccgttaatggtacaatggtcgccgttgaaggagaaactgtgtctatcctgtgtagcacccagtctaatccagacccaattctgaccatcttcaaggaaaagcagatcctgtctaccgttatttacgaatctgaacttcagctggaactgccggcagtttcccctgaggatgatggagaatattggtgtgtcgccgaaaaccaatacggccaaagggcaactgctttcaaccttagtgtcgaattcgcgccagtgctgctcctggagtctcactgtgctgcagcccgcgatacagtccaatgcttatgtgtcgtaaagtccaatcccgagccctcagttgcgtttgagttgcctagtagaaacgtcaccgtcaatgagagcgagcgagagtttgtgtactccgagcggtcaggtctcgtgctgactagcattctgaccctgagaggacaggcccaggcacctccgagagtcatttgtactgctcgcaatctctacggggcaaagagtctggagctgccattccagggagcacaccgccttatgtgggccaagatcggacctgtgggggccgtggttgctttcgctattcttatcgccatagtgtgttacattacccagacccgaagaaaaaagaacgtgacagaatcccctagtttttctgccggagacaacccacctgttctgttttccagcgacttccgaatatccggagcccctgagaagtatgagagcgagaggagattgggtagcgagcgtcggttgctaggattaagaggagaaccgccagaattggatctcagctacagtcacagtgatttagggaagaggcccacaaaggactcatacacccttacagaagaactggccgaatacgccgagataagagtaaagtag

SEQ ID NO: 127723 - DNA, 1881 bp, Artificial Sequence
  derived and/or modified sequence
atgatctttttgaccgccctgcccctcttctggatcatgatttccgccagtcgaggcggccactggggagcttggatgccaagctctattagcgctttcgaagggacctgcgtgtccatcccttgtaggtttgacttccctgacgaactcagaccggctgtggtgcacggagtctggtacttcaattctccataccctaaaaattacccacctgtagtgttcaaaagtcgaactcaggtcgtgcatgagtcattccagggccgttcgcgcttactgggggatctaggcctgcggaactgtacactgctgctttccaacgtctccccagagctggggggtaaatactatttccggggagatctgggtggttacaaccaatacactttctccgaacatagcgtgctggacattgtgaataccccgaacatagtggtgccacctgaggtagtggccggaactgaagtcgaggtctcttgtatggtgccagataattgtcctgagctgcgccccgagctgtcctggctgggtcatgaagggttgggagagcctgccgtgctgggtcgcctgagggaagatgaaggaacctgggtgcaggtgtctttactgcacttcgttccgactagagaagctaatggccatcgcctaggctgccaggcaagctttccaaatactacactacagttcgaaggttatgcttcaatggacgtgaagtaccccccagttatcgtcgagatgaacagttctgtcgaggccatcgaaggaagtcatgttagtctgctgtgtggcgctgatagcaatccacctcctctccttacgtggatgagggacgggacagtgttgcgggaagctgtggctgagagtcttctgctggaattagaggaagttacaccagccgaagacggggtgtatgcatgtcttgcagaaaatgcttatggccaggataacaggacagtgggcttaagcgtcatgtatgcaccttggaagccgaccgtgaatggcactatggtggcggtagaaggcgaaacggtatccatattgtgcagtacccaaagtaaccctgacccaattttaactatctttaaggaaaagcagatcctaagtacggtaatttacgagagtgagctgcaacttgagttgcccgcggtatcccccgaagacgatggagaatactggtgcgtcgccgagaatcagtacggacagagggctactgcgttcaacctgtctgtggagtttgcccccgtgctcttgctggagtcccactgcgctgccgcccgtgacacagtgcagtgcctttgcgtggtcaagtcaaatccggagccctctgtggcatttgagttgccttctcggaatgtcaccgtgaacgagagcgaaagagagtttgtctattcagaaaggtcaggcctggtactcacttctatcttgacccttaggggtcaggcccaggcaccgcccagagttatttgcacagcgcgaaatctatacggggcgaaaagccttgaattacccttccagggtgcccaccgcctgatgtgggctaaaataggacctgtcggggcagtcgtggcttttgccatattgatagccatcgtttgctatattacccagaccaggcgaaaaaagaatgtaactgaaagtccttctttttcagctggagacaacccccctgttcttttctccagtgacttccgcatttccggagccccagaaaaatacgagtccgagagacgattaggaagcgagagacgcttgctgggcctgcggggagagcccccagaactggacctgtcctatagccattctgacctcggcaagcgacccaccaaggactcatataccttaacagaggaacttgccgaatatgccgaaataagggtcaagtag

SEQ ID NO: 127724 - DNA, 1992 bp, Artificial Sequence
  derived and/or modified sequence
cgcagcagaggagctgaggccacagagagcaagctgagcggcggcttccgctggacccagaagaccagccccacccagggcgacagcgccatcacccacagcctgtacaggatgatcttcctgacagccctgcccctcttctggatcatgatcagcgccagccggggcggccactggggcgcctggatgcccagcagcatcagcgcctttgagggcacctgtgtgtccatcccctgccgctttgacttcccagatgagctgcggcctgctgtggtgcatggagtgtggtacttcaacagcccctaccccaagaactacccacctgtggtgttcaagagcaggacccaggtggtgcatgagagcttccagggccgcagccggctgctgggggacctgggcctgaggaactgcaccctgctgctgagcaatgtgtccccagagctgggcggcaagtactacttccggggggacctgggcggctacaaccagtacaccttcagcgagcacagcgtgctggacatcgtgaacacccccaacatcgtggtgcccccagaggtggtggccggcacagaggtggaggtgtcctgcatggtgcctgacaactgcccagagctgcggcctgagctgtcctggctgggccacgagggcctgggggagcctgctgtgctgggccgcctgcgggaggatgagggcacctgggtgcaggtgtccctgctgcactttgtgcccacccgggaggccaacggccaccggctgggctgccaggccagcttccccaacaccaccctgcagtttgagggctacgcctccatggatgtgaagtacccacctgtgattgtggagatgaacagctctgtggaggccatcgagggcagccacgtgtccctgctgtgtggggctgacagcaaccccccacccctgctgacctggatgagagatggcaccgtgctgcgggaggccgtggccgagagcctgctgctggagctggaggaggtgaccccagcagaagatggagtgtatgcctgcctggctgaaaatgcctacggccaggacaacagaacagtgggcctgtctgtgatgtatgccccctggaagcccaccgtgaatggcaccatggtggccgtggagggggagaccgtgtccatcctgtgcagcacccagagcaacccagaccccatcctgaccatcttcaaggagaagcagatcctgagcaccgtcatctatgagagcgagctgcagctggagctgcctgctgtgtccccagaagatgatggagagtactggtgtgtggccgagaaccagtatggccagagggccacagccttcaacctgtctgtggagtttgcccctgtgctgctgctggagagccactgtgccgccgcccgggacacagtgcagtgcctgtgtgtggtgaagagcaaccctgagcccagcgtggcctttgagctgcccagcagaaatgtgacagtgaatgaaagtgagcgggagtttgtgtacagcgagaggagcggcctggtgctgaccagcatcctgaccctgcggggccaggcccaggccccacccagggtcatctgcacagccaggaacctgtatggagccaagagcctggagctgcccttccagggcgcccaccggctgatgtgggccaagattggccctgtgggcgctgtggtggcctttgccatcctgattgccatcgtgtgctacatcacccagaccaggaggaagaagaatgtgacagagagccccagcttctctgctggggacaacccccctgtgctcttcagcagtgacttccgcatcagcggggcccctgagaagtatgagagcgagcggcggctgggcagcgagcggcggctgctgggcctgcggggggagcccccagagctggacctgagctacagccacagcgacctgggcaagaggcccaccaaggacagctacaccctgacagaggagctggccgagtatgcagagatccgggtgaagtag

SEQ ID NO: 127725 - DNA, 1881 bp, Artificial Sequence
  derived and/or modified sequence
atgatcttcctgacagccctgcccctcttctggatcatgatcagcgccagcagaggaggccactggggcgcctggatgcccagcagcatcagcgcctttgagggcacctgtgtgtccatcccctgccgctttgacttcccagatgagctgcggcctgctgtggtgcacggcgtgtggtacttcaacagcccctaccccaagaactacccacctgtggtgttcaagagcaggacccaggtggtgcatgagagcttccagggccgcagccggctgctgggggacctgggcctgaggaactgcaccctgctgctgagcaatgtgtccccagagctgggcggcaagtactacttccggggggacctgggcggctacaaccagtacaccttcagcgagcacagcgtgctggacatcgtgaacacccccaacatcgtggtgcccccagaggtggtggccggcacagaggtggaggtgtcctgcatggtgcctgacaactgcccagagctgcggcctgagctgtcctggctgggccacgagggcctgggggagcctgctgtgctgggccgcctgagagaagatgagggcacctgggtgcaggtgtccctgctgcactttgtgcccacccgggaggccaacggccaccggctgggctgccaggccagcttccccaacaccaccctgcagtttgagggctacgcctccatggatgtgaagtacccacctgtgattgtggagatgaacagctctgtggaggccatcgagggcagccacgtgtccctgctgtgtggggctgacagcaaccccccacccctgctgacctggatgagagatggcaccgtgctgcgggaggccgtggccgagagcctgctgctggagctggaggaggtgaccccagcagaagatggagtgtatgcctgcctggccgagaatgcctacggccaggacaacagaacagtgggcctgtctgtgatgtatgccccctggaagcccaccgtgaatggcaccatggtggccgtggagggggagaccgtgtccatcctgtgcagcacccagagcaacccagaccccatcctgaccatcttcaaggagaagcagatcctgagcaccgtcatctatgaaagtgagctgcagctggagctgcctgctgtgtccccagaagatgatggagagtactggtgtgtggccgagaaccagtatggccagagggccacagccttcaacctgtctgtggagtttgcccctgtgctgctgctggagagccactgtgccgccgcccgggacacagtgcagtgcctgtgtgtggtgaagagcaaccctgagcccagcgtggcctttgagctgcccagcagaaatgtgacagtgaatgaaagtgagcgggagtttgtgtacagcgagaggagcggcctggtgctgaccagcatcctgaccctgcggggccaggcccaggccccacccagggtcatctgcacagccaggaacctgtatggagccaagagcctggagctgcccttccagggcgcccaccggctgatgtgggccaagattggccctgtgggcgctgtggtggcctttgccatcctgattgccatcgtgtgctacatcacccagaccaggaggaagaagaatgtgacagagagccccagcttctctgctggggacaacccccctgtgctcttcagcagtgacttccgcatcagcggggcccctgagaagtatgaaagtgaaagaaggctgggcagcgagcggcggctgctgggcctgcggggggagcccccagagctggacctgagctacagccacagcgacctgggcaagaggcccaccaaggacagctacaccctgacagaggagctggccgagtatgcagagatccgggtgaagtag

SEQ ID NO: 127726 - DNA, 2390 bp, Artificial Sequence
  derived and/or modified sequence
aagtgggggcctagaccctggaaggcaggggactgcgagctgggctggcggagcagaggtgcagaagcaactgagtccaagttgtctggcggcttcaggtggacccagaagacgtccccaactcagggagattcagcgatcactcactcgctgtacagaatgatattcctcacggcactgcctctgttctggattatgatttcagcctcccgagggggtcactggggtgcctggatgccctcgtccatctcggccttcgaaggcacgtgcgtctccatcccctgccgctttgacttcccggatgagctgcggcccgctgtggtgcatggtgtctggtacttcaatagcccctaccccaagaactaccccccggtggtcttcaagtcgcgcacccaagtagtccacgagagcttccagggccgcagccgcctcctgggggacctgggcctgcgaaactgcaccctcctgctcagcaacgtcagccccgagctgggcgggaagtactacttccgtggggacctgggcggctacaaccagtacaccttctcagagcacagcgtcctggatatcgtcaacacccccaacatcgtggtgcccccagaggtggtggcaggcacggaggtggaggtcagctgcatggtgccggacaactgcccagagctgcgccctgagctgagctggctgggccacgaggggctgggggagcccgctgtgctgggccggctgcgggaggacgagggcacctgggtgcaggtgtcactgctgcacttcgtgcccacgagggaggccaacggccacaggctgggctgccaggcctccttccccaacaccaccctgcagttcgagggctacgccagcatggacgtcaagtaccccccggtgattgtggagatgaactcctcggtggaggccatcgagggctcccacgtgagcctgctctgtggggctgacagcaaccccccgccgctgctgacctggatgcgggacgggacagtcctccgggaggcggtggccgagagcctgctcctggagctggaggaggtgacccccgccgaagacggcgtctatgcctgcctggccgagaatgcctatggccaggacaaccgcaccgtggggctcagtgtcatgtatgcaccctggaagccaacagtgaacgggacaatggtggccgtagagggggagacggtctctatcttgtgctccacacagagcaacccggaccctattctcaccatcttcaaggagaagcagatcctgtccacggtcatctacgagagcgagctgcagctggagctgccggccgtgtcacccgaggatgatggagagtactggtgtgtggctgagaaccagtatggccagagggccaccgccttcaacctgtctgtggagttcgcccctgtgctcctcctggagtcccactgcgcggcagcccgagacacggtgcagtgcctgtgcgtggtgaagtccaacccggagccgtccgtggcctttgagctgccatcgcgcaatgtgaccgtgaacgagagcgagcgggagttcgtgtactcggagcgcagcggcctcgtgctcaccagcatcctcacgctgcgggggcaggcccaggccccgccccgcgtcatctgcaccgcgaggaacctctatggcgccaagagcctggagctgcccttccagggagcccatcgactgatgtgggccaagatcgggcctgtgggcgccgtggtcgcctttgccatcctgattgccatcgtctgctacattacccagacacgcaggaaaaagaacgtgacagagagccccagcttctcggcaggggacaaccctcccgtcctgttcagcagcgacttccgcatctctggggcaccagagaagtacgagagcgagaggcgcctgggatctgagaggaggctgctgggccttcggggtgagcccccagagctggacctgagctattctcactcggacctggggaaacggcccaccaaggacagctacacgctgacggaggagctagctgagtatgctgaaatccgggtcaagtgaaggagctgggggcagcctgcgtggctgacccccctcaggaccctcgctggcccccactggctgtgggctcccttcctcccaaaagtatcgggggctggggcaggaggggagtgaggcaggtgacagtgaggtcctgggggcctgacctccccctccttcccagctgcccctccctgccagcacccccacgccctcattacggctcctctctaacctcctttaccctcatctgtctggaggggagctctgtctgtccgtgttatttattgctacttcctgcctggtctcctgcccccacacctggccctggggcctgtacaaaagggacatgaaataaatgccccaaagcc

SEQ ID NO: 127727 - DNA, 2426 bp, Artificial Sequence
  derived and/or modified sequence
cctagaccctggaaggcaggggactgcgagctgggctggcggagcagaggtgcagaagcaactgagtccaagttgtctggcggcttcaggtggacccagaagacgtccccaactcagggagattcagcgatcactcactcgctgtacagaatgatattcctcacggcactgcctctgttctggattatgatttcagcctcccgagggggtcactggggtgcctggatgccctcgtccatctcggccttcgaaggcacgtgcgtctccatcccctgccgctttgacttcccggatgagctgcggcccgctgtggtgcatggtgtctggtacttcaatagcccctaccccaagaactaccccccggtggtcttcaagtcgcgcacccaagtagtccacgagagcttccagggccgcagccgcctcctgggggacctgggcctgcgaaactgcaccctcctgctcagcaacgtcagccccgagctgggcgggaagtactacttccgtggggacctgggcggctacaaccagtacaccttctcagagcacagcgtcctggatatcgtcaacacccccaacatcgtggtgcccccagaggtggtggcaggcacggaggtggaggtcagctgcatggtgccggacaactgcccagagctgcgccctgagctgagctggctgggccacgaggggctgggggagcccgctgtgctgggccggctgcgggaggacgagggcacctgggtgcaggtgtcactgctgcacttcgtgcccacgagggaggccaacggccacaggctgggctgccaggcctccttccccaacaccaccctgcagttcgagggctacgccagcatggacgtcaagtaccccccggtgattgtggagatgaactcctcggtggaggccatcgagggctcccacgtgagcctgctctgtggggctgacagcaaccccccgccgctgctgacctggatgcgggacgggacagtcctccgggaggcggtggccgagagcctgctcctggagctggaggaggtgacccccgccgaagacggcgtctatgcctgcctggccgagaatgcctatggccaggacaaccgcaccgtggggctcagtgtcatgtatgcaccctggaagccaacagtgaacgggacaatggtggccgtagagggggagacggtctctatcttgtgctccacacagagcaacccggaccctattctcaccatcttcaaggagaagcagatcctgtccacggtcatctacgagagcgagctgcagctggagctgccggccgtgtcacccgaggatgatggagagtactggtgtgtggctgagaaccagtatggccagagggccaccgccttcaacctgtctgtggagttcgcccctgtgctcctcctggagtcccactgcgcggcagcccgagacacggtgcagtgcctgtgcgtggtgaagtccaacccggagccgtccgtggcctttgagctgccatcgcgcaatgtgaccgtgaacgagagcgagcgggagttcgtgtactcggagcgcagcggcctcgtgctcaccagcatcctcacgctgcgggggcaggcccaggccccgccccgcgtcatctgcaccgcgaggaacctctatggcgccaagagcctggagctgcccttccagggagcccatcgactgatgtgggccaagatcgggcctgtgggcgccgtggtcgcctttgccatcctgattgccatcgtctgctacattacccagacacgcaggaaaaagaacgtgacagagagccccagcttctcggcaggggacaaccctcccgtcctgttcagcagcgacttccgcatctctggggcaccagagaagtacgagtccaaagaggtttctaccctggaatctcactgagtgccccaggagagcgagaggcgcctgggatctgagaggaggctgctgggccttcggggtgagcccccagagctggacctgagctattctcactcggacctggggaaacggcccaccaaggacagctacacgctgacggaggagctagctgagtatgctgaaatccgggtcaagtgaaggagctgggggcagcctgcgtggctgacccccctcaggaccctcgctggcccccactggctgtgggctcccttcctcccaaaagtatcgggggctggggcaggaggggagtgaggcaggtgacagtgaggtcctgggggcctgacctccccctccttcccagctgcccctccctgccagcacccccacgccctcattacggctcctctctaacctcctttaccctcatctgtctggaggggagctctgtctgtccgtgttatttattgctacttcctgcctggtctcctgcccccacacctggccctggggcctgtacaaaagggacatgaaataaatgccccaaagcc

SEQ ID NO: 127728 - DNA, 2380 bp, Artificial Sequence
  derived and/or modified sequence
ctagaccctggaaggcaggggactgcgagctgggctggcggagcagaggtgcagaagcaactgagtccaagttgtctggcggcttcaggtggacccagaagacgtccccaactcagggagattcagcgatcactcactcgctgtacagaatgatattcctcacggcactgcctctgttctggattatgatttcagcctcccgagggggtcactggggtgcctggatgccctcgtccatctcggccttcgaaggcacgtgcgtctccatcccctgccgctttgacttcccggatgagctgcggcccgctgtggtgcatggtgtctggtacttcaatagcccctaccccaagaactaccccccggtggtcttcaagtcgcgcacccaagtagtccacgagagcttccagggccgcagccgcctcctgggggacctgggcctgcgaaactgcaccctcctgctcagcaacgtcagccccgagctgggcgggaagtactacttccgtggggacctgggcggctacaaccagtacaccttctcagagcacagcgtcctggatatcgtcaacacccccaacatcgtggtgcccccagaggtggtggcaggcacggaggtggaggtcagctgcatggtgccggacaactgcccagagctgcgccctgagctgagctggctgggccacgaggggctgggggagcccgctgtgctgggccggctgcgggaggacgagggcacctgggtgcaggtgtcactgctgcacttcgtgcccacgagggaggccaacggccacaggctgggctgccaggcctccttccccaacaccaccctgcagttcgagggctacgccagcatggacgtcaagtaccccccggtgattgtggagatgaactcctcggtggaggccatcgagggctcccacgtgagcctgctctgtggggctgacagcaaccccccgccgctgctgacctggatgcgggacgggacagtcctccgggaggcggtggccgagagcctgctcctggagctggaggaggtgacccccgccgaagacggcgtctatgcctgcctggccgagaatgcctatggccaggacaaccgcaccgtggggctcagtgtcatgtatgcaccctggaagccaacagtgaacgggacaatggtggccgtagagggggagacggtctctatcttgtgctccacacagagcaacccggaccctattctcaccatcttcaaggagaagcagatcctgtccacggtcatctacgagagcgagctgcagctggagctgccggccgtgtcacccgaggatgatggagagtactggtgtgtggctgagaaccagtatggccagagggccaccgccttcaacctgtctgtggagttcgcccctgtgctcctcctggagtcccactgcgcggcagcccgagacacggtgcagtgcctgtgcgtggtgaagtccaacccggagccgtccgtggcctttgagctgccatcgcgcaatgtgaccgtgaacgagagcgagcgggagttcgtgtactcggagcgcagcggcctcgtgctcaccagcatcctcacgctgcgggggcaggcccaggccccgccccgcgtcatctgcaccgcgaggaacctctatggcgccaagagcctggagctgcccttccagggagcccatcgactgatgtgggccaagatcgggcctgtgggcgccgtggtcgcctttgccatcctgattgccatcgtctgctacattacccagacacgcaggaaaaagaacgtgacagagagccccagcttctcggcaggggacaaccctcccgtcctgttcagcagcgacttccgcatctctggggcaccagagaagtacgagagcgagaggcgcctgggatctgagaggaggctgctgggccttcggggtgagcccccagagctggacctgagctattctcactcggacctggggaaacggcccaccaaggacagctacacgctgacggaggagctagctgagtatgctgaaatccgggtcaagtgaaggagctgggggcagcctgcgtggctgacccccctcaggaccctcgctggcccccactggctgtgggctcccttcctcccaaaagtatcgggggctggggcaggaggggagtgaggcaggtgacagtgaggtcctgggggcctgacctccccctccttcccagctgcccctccctgccagcacccccacgccctcattacggctcctctctaacctcctttaccctcatctgtctggaggggagctctgtctgtccgtgttatttattgctacttcctgcctggtctcctgcccccacacctggccctggggcctgtacaaaagggacatgaaataaatgccccaaagcc

SEQ ID NO: 127729 - DNA, 2323 bp, Artificial Sequence
  derived and/or modified sequence
agaggtgcagaagcaactgagtccaagttgtctggcggcttcaggtggacccagaagacgtccccaactcagggagattcaggtaacggctgacaggtgctggggacctaaaggctttggcccctgagcaggttggagcctcccgagggggtcactggggtgcctggatgccctcgtccatctcggccttcgaaggcacgtgcgtctccatcccctgccgctttgacttcccggatgagctgcggcccgctgtggtgcatggtgtctggtacttcaatagcccctaccccaagaactaccccccggtggtcttcaagtcgcgcacccaagtagtccacgagagcttccagggccgcagccgcctcctgggggacctgggcctgcgaaactgcaccctcctgctcagcaacgtcagccccgagctgggcgggaagtactacttccgtggggacctgggcggctacaaccagtacaccttctcagagcacagcgtcctggatatcgtcaacacccccaacatcgtggtgcccccagaggtggtggcaggcacggaggtggaggtcagctgcatggtgccggacaactgcccagagctgcgccctgagctgagctggctgggccacgaggggctgggggagcccgctgtgctgggccggctgcgggaggacgagggcacctgggtgcaggtgtcactgctgcacttcgtgcccacgagggaggccaacggccacaggctgggctgccaggcctccttccccaacaccaccctgcagttcgagggctacgccagcatggacgtcaagtaccccccggtgattgtggagatgaactcctcggtggaggccatcgagggctcccacgtgagcctgctctgtggggctgacagcaaccccccgccgctgctgacctggatgcgggacgggacagtcctccgggaggcggtggccgagagcctgctcctggagctggaggaggtgacccccgccgaagacggcgtctatgcctgcctggccgagaatgcctatggccaggacaaccgcaccgtggggctcagtgtcatgtatgcaccctggaagccaacagtgaacgggacaatggtggccgtagagggggagacggtctctatcttgtgctccacacagagcaacccggaccctattctcaccatcttcaaggagaagcagatcctgtccacggtcatctacgagagcgagctgcagctggagctgccggccgtgtcacccgaggatgatggagagtactggtgtgtggctgagaaccagtatggccagagggccaccgccttcaacctgtctgtggagttcgcccctgtgctcctcctggagtcccactgcgcggcagcccgagacacggtgcagtgcctgtgcgtggtgaagtccaacccggagccgtccgtggcctttgagctgccatcgcgcaatgtgaccgtgaacgagagcgagcgggagttcgtgtactcggagcgcagcggcctcgtgctcaccagcatcctcacgctgcgggggcaggcccaggccccgccccgcgtcatctgcaccgcgaggaacctctatggcgccaagagcctggagctgcccttccagggagcccatcgactgatgtgggccaagatcgggcctgtgggcgccgtggtcgcctttgccatcctgattgccatcgtctgctacattacccagacacgcaggaaaaagaacgtgacagagagccccagcttctcggcaggggacaaccctcccgtcctgttcagcagcgacttccgcatctctggggcaccagagaagtacgagagcgagaggcgcctgggatctgagaggaggctgctgggccttcggggtgagcccccagagctggacctgagctattctcactcggacctggggaaacggcccaccaaggacagctacacgctgacggaggagctagctgagtatgctgaaatccgggtcaagtgaaggagctgggggcagcctgcgtggctgacccccctcaggaccctcgctggcccccactggctgtgggctcccttcctcccaaaagtatcgggggctggggcaggaggggagtgaggcaggtgacagtgaggtcctgggggcctgacctccccctccttcccagctgcccctccctgccagcacccccacgccctcattacggctcctctctaacctcctttaccctcatctgtctggaggggagctctgtctgtccgtgttatttattgctacttcctgcctggtctcctgcccccacacctggccctggggcctgtacaaaagggacatgaaataaatgccccaaagcc

SEQ ID NO: 127730 - DNA, 1992 bp, Artificial Sequence
  derived and/or modified sequence
cggagccggggcgccgaggccaccgagagcaagctgagcggcggctttcggtggacccagaagacgtcccctacacagggggacagtgccatcactcactcgctgtaccggatgatcttcctaactgcactgcctctgttctggatcatgatttctgcctcacgaggagggcactggggagcctggatgccctcatccatttctgctttcgagggcacctgtgtcagcattccttgcagattcgactttcccgacgagctgcggcctgctgtggtgcatggggtatggtacttcaacagtccttaccctaaaaactaccccccagtggtcttcaagagccggacccaggttgtgcacgagagcttccagggtaggtccaggctgctgggcgatttgggcttgcgcaattgtactcttctcttatctaatgtctccccagaactgggcggaaagtattattttagaggcgacctcggaggatacaatcagtataccttcagcgaacatagcgtgttagacatagtgaatacccctaatattgtggttcctcctgaagtggttgccgggaccgaggtggaggtgtcttgtatggtgcccgataactgtccggagctgagacctgagctatcctggctcgggcatgagggccttggagaaccggccgtgctgggccgcctgagggaagacgagggcacctgggtccaggtctcgctgctgcattttgttcctacccgcgaagcaaatggacataggctggggtgccaagcttctttcccgaataccactcttcaattcgagggttatgcaagtatggacgtgaaatatccacccgtgattgtggagatgaacagctcagtggaagccattgagggatcacatgtgagtctactctgtggcgccgactccaaccctccaccgctcctcacctggatgagagatgggacagtgctgagggaagctgtggccgaatccttgctcctggagctagaagaagttactcccgcggaagacggggtctatgcttgcctcgcagaaaacgcctatggccaggataaccgaactgtgggactctcagtgatgtacgcaccatggaagcctacagtaaacggaactatggttgccgtggagggcgagaccgtgagcattctgtgttcgacacaatccaacccagaccccatactgaccatcttcaaagagaagcaaattctgtcaacggttatctacgagtcagaactgcagctggaactacccgcagtgtcgcccgaggacgacggagagtactggtgtgtcgccgaaaatcagtatggtcagcgcgcaacagcgtttaacctgtcagtagagttcgccccagtcctactactggagagccactgcgctgctgcaagggatactgtgcagtgcctgtgcgtggtcaagagtaacccagaaccctctgtggccttcgaattgccatccaggaatgttacagtgaatgaaagcgaacgagaatttgtatactccgagcgatccggactcgtcctgacttccatcctgactttgcgcggtcaggctcaggcgcctccgcgcgttatatgcacagcaaggaacctgtacggcgccaaatccctcgaactcccctttcaaggtgcccataggcttatgtgggccaagatcgggcccgttggcgcagtggttgcttttgctattctgatagctatcgtttgttacatcacccagacacggcgcaaaaagaacgtcactgagagtccatccttttctgctggcgataaccctccggtactgttctcaagcgactttcggattagcggcgctcccgaaaaatacgagtccgaaagacgcctgggaagcgaacgacggctcctgggccttagaggtgaacctccagaactggatctgtcatatagccacagcgatctggggaagcgcccaactaaagactcttacacactcaccgaggagcttgcagaatacgctgagataagggtgaagtag

SEQ ID NO: 127731 - DNA, 1881 bp, Artificial Sequence
  derived and/or modified sequence
atgatcttcctgaccgccctgcccctgttctggatcatgatcagcgctagtcgaggaggacattggggagcctggatgccatcatccatttctgcgtttgagggcacatgcgttagcattccttgtaggttcgacttccccgacgagctgagacctgccgtggtgcacggtgtgtggtactttaacagcccttatcctaaaaactacccccctgtggtgttcaaaagtcgaacacaggtcgtgcacgagtcttttcagggacggtctcgcctcctcggcgacttgggattgaggaactgcacactgttacttagtaatgtcagtcctgagcttggcggaaagtactattttcgcggggatctcggcgggtataatcagtatactttttccgagcatagcgtgttggatatcgtcaatacccctaacatcgtggtgcctcccgaggtcgtggccggaaccgaggtggaagtctcctgtatggttcctgacaattgcccagagttaagacccgaactcagttggttgggtcacgagggccttggcgaaccggctgtgctggggaggctgcgagaagatgaaggaacttgggtgcaggtcagccttttacatttcgtgcctacaagggaagccaatgggcatagactggggtgtcaagcctcctttccgaacacaacactgcagttcgagggttacgcgtctatggatgtaaagtatcctccggttattgtcgagatgaattcctctgtggaagcgatagagggctctcatgtcagtctcctttgtggggcggactcaaacccaccgccactcttgacgtggatgagagatggtaccgtgctgcgggaagcggtggctgaatccctgctgctcgaactggaggaagtaacaccagcagaagacggagtttacgcctgtctcgccgaaaatgcttacggacaagacaatcggaccgtgggcctatctgtgatgtatgccccatggaagcccactgtcaatgggacaatggtggcagttgagggtgagaccgtgtccatcttatgctcgacacagagcaatcccgacccaatattgacgattttcaaggaaaaacagatactcagtactgtcatttatgagtctgagttgcagctggaactaccagccgtgtcccccgaggacgacggagagtattggtgcgtggccgagaatcaatatggacagcgcgctactgccttcaacttaagtgttgaattcgctccagtactgttgttggagagccactgtgccgccgctagggacactgtgcaatgcctttgcgtggtgaagtctaaccccgaaccctcagtggcatttgagctcccaagccggaatgttacagtaaatgaatcagaaagagagtttgtgtactcagaacgatccggcctcgtcctgacgtcgatactgaccctgcgcggtcaggctcaagctccccctcgcgttatctgcaccgcgaggaatctatacggagccaagtcactggaacttccatttcagggcgcccatcgcctgatgtgggccaagataggtccggtgggggcagttgtggcctttgcaatccttatcgctattgtatgctatattacacagacccgcaggaagaagaatgttactgagtctccaagcttttccgccggtgataatcccccagtgctcttttcctccgatttccggataagtggagcacctgaaaagtatgagtctgaacgaaggctcggttcggagcgcaggctgttgggactgcgtggcgagcctccagagttagacctgtcctatagccactccgacttgggcaagcggccgacaaaggatagttacacgctgaccgaggaattagcagagtacgccgagatccgggtgaagtag

SEQ ID NO: 127732 - DNA, 1992 bp, Artificial Sequence
  derived and/or modified sequence
cgaagccggggagctgaagcaacagagtccaaactttcaggtggattcaggtggacccagaaaacaagtccgactcagggggatagcgctatcactcattccctctacaggatgattttcctgaccgctctgccccttttttggatcatgatatctgcttcacgagggggtcattggggcgcttggatgccctcctccatttccgcgttcgaaggcacttgcgtttcgatcccttgtcgctttgactttccagacgagctgaggcctgctgtggtacatggggtctggtactttaattctccataccctaagaactatcccccagtggtgtttaagtcaagaacgcaagttgtccacgagtcctttcaggggagatcccgcctcttgggagatctgggcctgcgaaattgcaccctgctactctcaaacgtttcccctgaactcggcggtaaatattattttcgcggtgacctaggcggatacaaccaatacacattttccgaacactccgtgttggacatagtgaatacaccaaacattgtagtgcccccagaggtggttgccggaaccgaggtcgaggtcagttgcatggtgcctgataattgcccagaactgagacccgaactgtcctggctgggccacgaagggcttggggagccagccgtgctcggtagactgcgtgaggacgaaggcacctgggtgcaggtgagcttactccatttcgtgcccacgagggaggccaatggacacaggttgggatgtcaagcttccttcccgaacaccactctccagttcgaaggttacgcctcaatggatgtcaagtatcctcccgtgatcgtcgaaatgaactcttctgtcgaggctatagaggggtctcacgtgagtttgctgtgtggcgctgacagcaatcccccaccgttactgacgtggatgcgagatggaacggtcctgcgcgaagcagtagctgagagtctcctcctcgaattggaggaggtaacacctgccgaggatggcgtttatgcttgtctggctgagaacgcatacggccaggataataggactgtgggactctcagttatgtatgcaccctggaagccaaccgtaaacggcacgatggtagccgtagaaggcgagactgtttccatcttgtgttctactcagtccaacccagatccaatcctgacaatttttaaagagaaacagatcctaagcaccgtaatatacgaatcggaactgcaactggagctccctgctgtgtccccagaggacgatggtgagtactggtgcgtggcagaaaatcagtatggccaaagagcaacagcttttaatctttcagtagagtttgcaccagtcctgcttctggaaagccattgtgcggctgcccgtgacactgtacaatgtctatgtgtggtgaagtccaatcctgagccttctgtcgcctttgagctgccatctaggaacgtgactgttaacgaaagcgaacgggagtttgtgtatagtgagcgatcaggtctcgtgctgaccagtattctcaccttgcggggacaggcgcaggctccacctagagtcatatgtacggccagaaatctttacggggcaaagagcttggagcttcccttccagggcgcacacagacttatgtgggccaagataggcccagtgggagctgtcgtggccttcgcaatccttatcgccatcgtttgttatatcacacagacccggagaaaaaagaacgtgacggagagccctagcttttctgccggtgataacccccctgtgctcttctcaagcgatttccgcattagcggagctccagagaaatatgagtcggaacgaaggttaggcagtgaacggagacttcttggactccgaggagaaccaccagagctggacctcagttactcccatagcgatctgggaaagcgaccaacgaaagattcgtacactcttaccgaggaattggcggagtacgcagagattcgggtcaagtag

SEQ ID NO: 127733 - DNA, 1881 bp, Artificial Sequence
  derived and/or modified sequence
atgatattcctcacagcactgccattgttctggatcatgattagcgcttcacgcggtgggcactggggtgcctggatgccttctagcatttccgccttcgagggtacatgcgtgtcaatcccatgccgttttgactttcctgacgaactgcgcccagcggttgtgcacggagtctggtatttcaatagtccctatccaaaaaactatcctcccgtggttttcaaatcccggacacaggtagtccacgagtccttccaaggccgaagcagactcctgggcgacctcggtctgaggaactgtactctccttctcagcaacgtatcacctgaactcggcggtaaatattacttccgtggggatctcggtggctataatcagtacacgttctcagagcacagtgtcctggatatcgtgaatacaccgaatatcgtggtgccccctgaagtcgtggctggcacggaggtggaggtatcttgtatggtccctgacaattgcccagaactacgccctgaacttagttggctgggacacgaaggcctcggtgaaccagcggtgctcggcaggctgagggaagacgaaggaacctgggtacaagtctcactgctccatttcgtgcccactagggaggctaacgggcatcgtctggggtgccaggcgtcctttcccaatactacgcttcaatttgaagggtatgcttccatggatgttaaatacccccctgtgattgtggaaatgaacagtagcgtggaagccatcgagggtagtcacgtctcgttgctctgtggtgcagatagcaacccacctccactgctgacatggatgagagacgggaccgtattacgggaggctgtggctgagtctctgctcctggaactggaagaagtcacccccgctgaagacggggtctatgcctgcctagccgaaaacgcgtacggccaagacaaccgaacagtaggcctgtctgtcatgtacgctccgtggaaaccaacagtgaatggcactatggtggccgtggagggcgagactgtctctatcctctgcagtactcagagcaatccggaccctatattaaccatattcaaggaaaaacaaatcctgagcacagtgatttacgagtctgagctacagctcgagctgcctgcagtctcaccagaagatgatggtgaatactggtgcgtggccgaaaatcagtacggccagcgtgccactgcctttaacctgtcggtggagttcgctcccgtgctgctcctggaaagccactgtgcggctgccagggacacggtgcagtgtctgtgcgtggtgaagtctaatcccgagccctcagtggcattcgagctgcctagcagaaacgtgactgtgaacgagagcgaacgcgagttcgtgtattccgagaggtccggcctggtactcacatccattctcacattgcgaggtcaagcccaggcaccaccaagggtgatctgcaccgcaaggaacctgtacggcgctaagtcactcgagctcccattccagggcgcacatcggcttatgtgggcaaaaatcggtccagtgggcgctgtggtcgctttcgctattctgatcgcaatcgtgtgttatatcactcagaccagacgtaagaaaaatgttaccgaatcaccctctttttccgccggtgataacccccctgtcctgttttcaagcgatttccggatcagcggtgccccagaaaagtacgagagtgagaggcggctcggctctgaaaggaggctgctgggattaagaggtgaaccccctgaactggatctgtcctatagccactcagacctgggcaagagaccaacaaaggattcatacactctgactgaggagctcgcagagtacgcagagatacgggttaaatag

SEQ ID NO: 127734 - DNA, 1992 bp, Artificial Sequence
  derived and/or modified sequence
agaagcagaggcgccgaggccaccgagagcaagctgagcggcggcttcagatggacccagaagaccagccccacccagggcgacagcgccatcacccacagcctgtacagaatgatcttcctgaccgccctgcccctgttctggatcatgatcagcgccagcagaggcggccactggggcgcctggatgcccagcagcatcagcgccttcgagggcacctgcgtgagcatcccctgcagattcgacttccccgacgagctgagacccgccgtggtgcacggcgtgtggtacttcaacagcccctaccccaagaactacccccccgtggtgttcaagagcagaacccaggtggtgcacgagagcttccagggcagaagcagactgctgggcgacctgggcctgagaaactgcaccctgctgctgagcaacgtgagccccgagctgggcggcaagtactacttcagaggcgacctgggcggctacaaccagtacaccttcagcgagcacagcgtgctggacatcgtgaacacccccaacatcgtggtgccccccgaggtggtggccggcaccgaggtggaggtgagctgcatggtgcccgacaactgccccgagctgagacccgagctgagctggctgggccacgagggcctgggcgagcccgccgtgctgggcagactgagagaggacgagggcacctgggtgcaggtgagcctgctgcacttcgtgcccaccagagaggccaacggccacagactgggctgccaggccagcttccccaacaccaccctgcagttcgagggctacgccagcatggacgtgaagtacccccccgtgatcgtggagatgaacagcagcgtggaggccatcgagggcagccacgtgagcctgctgtgcggcgccgacagcaaccccccccccctgctgacctggatgagagacggcaccgtgctgagagaggccgtggccgagagcctgctgctggagctggaggaggtgacccccgccgaggacggcgtgtacgcctgcctggccgagaacgcctacggccaggacaacagaaccgtgggcctgagcgtgatgtacgccccctggaagcccaccgtgaacggcaccatggtggccgtggagggcgagaccgtgagcatcctgtgcagcacccagagcaaccccgaccccatcctgaccatcttcaaggagaagcagatcctgagcaccgtgatctacgagagcgagctgcagctggagctgcccgccgtgagccccgaggacgacggcgagtactggtgcgtggccgagaaccagtacggccagagagccaccgccttcaacctgagcgtggagttcgcccccgtgctgctgctggagagccactgcgccgccgccagagacaccgtgcagtgcctgtgcgtggtgaagagcaaccccgagcccagcgtggccttcgagctgcccagcagaaacgtgaccgtgaacgagagcgagagagagttcgtgtacagcgagagaagcggcctggtgctgaccagcatcctgaccctgagaggccaggcccaggccccccccagagtgatctgcaccgccagaaacctgtacggcgccaagagcctggagctgcccttccagggcgcccacagactgatgtgggccaagatcggccccgtgggcgccgtggtggccttcgccatcctgatcgccatcgtgtgctacatcacccagaccagaagaaagaagaacgtgaccgagagccccagcttcagcgccggcgacaacccccccgtgctgttcagcagcgacttcagaatcagcggcgcccccgagaagtacgagagcgagagaagactgggcagcgagagaagactgctgggcctgagaggcgagccccccgagctggacctgagctacagccacagcgacctgggcaagagacccaccaaggacagctacaccctgaccgaggagctggccgagtacgccgagatcagagtgaagtag

SEQ ID NO: 127735 - DNA, 1881 bp, Artificial Sequence
  derived and/or modified sequence
atgatcttcctgaccgccctgcccctgttctggatcatgatcagcgccagcagaggcggccactggggcgcctggatgcccagcagcatcagcgccttcgagggcacctgcgtgagcatcccctgcagattcgacttccccgacgagctgagacccgccgtggtgcacggcgtgtggtacttcaacagcccctaccccaagaactacccccccgtggtgttcaagagcagaacccaggtggtgcacgagagcttccagggcagaagcagactgctgggcgacctgggcctgagaaactgcaccctgctgctgagcaacgtgagccccgagctgggcggcaagtactacttcagaggcgacctgggcggctacaaccagtacaccttcagcgagcacagcgtgctggacatcgtgaacacccccaacatcgtggtgccccccgaggtggtggccggcaccgaggtggaggtgagctgcatggtgcccgacaactgccccgagctgagacccgagctgagctggctgggccacgagggcctgggcgagcccgccgtgctgggcagactgagagaggacgagggcacctgggtgcaggtgagcctgctgcacttcgtgcccaccagagaggccaacggccacagactgggctgccaggccagcttccccaacaccaccctgcagttcgagggctacgccagcatggacgtgaagtacccccccgtgatcgtggagatgaacagcagcgtggaggccatcgagggcagccacgtgagcctgctgtgcggcgccgacagcaaccccccccccctgctgacctggatgagagacggcaccgtgctgagagaggccgtggccgagagcctgctgctggagctggaggaggtgacccccgccgaggacggcgtgtacgcctgcctggccgagaacgcctacggccaggacaacagaaccgtgggcctgagcgtgatgtacgccccctggaagcccaccgtgaacggcaccatggtggccgtggagggcgagaccgtgagcatcctgtgcagcacccagagcaaccccgaccccatcctgaccatcttcaaggagaagcagatcctgagcaccgtgatctacgagagcgagctgcagctggagctgcccgccgtgagccccgaggacgacggcgagtactggtgcgtggccgagaaccagtacggccagagagccaccgccttcaacctgagcgtggagttcgcccccgtgctgctgctggagagccactgcgccgccgccagagacaccgtgcagtgcctgtgcgtggtgaagagcaaccccgagcccagcgtggccttcgagctgcccagcagaaacgtgaccgtgaacgagagcgagagagagttcgtgtacagcgagagaagcggcctggtgctgaccagcatcctgaccctgagaggccaggcccaggccccccccagagtgatctgcaccgccagaaacctgtacggcgccaagagcctggagctgcccttccagggcgcccacagactgatgtgggccaagatcggccccgtgggcgccgtggtggccttcgccatcctgatcgccatcgtgtgctacatcacccagaccagaagaaagaagaacgtgaccgagagccccagcttcagcgccggcgacaacccccccgtgctgttcagcagcgacttcagaatcagcggcgcccccgagaagtacgagagcgagagaagactgggcagcgagagaagactgctgggcctgagaggcgagccccccgagctggacctgagctacagccacagcgacctgggcaagagacccaccaaggacagctacaccctgaccgaggagctggccgagtacgccgagatcagagtgaagtag

SEQ ID NO: 127736 - protein, 319 aa, Artificial Sequence
  derived and/or modified sequence
MPRGQKSKLRAREKRRKARDETRGLNVPQVTEAEEEEAPCCSSSVSGGAASSSPAAGIPQEPQRAPTTAAAAAAGVSSTKSKKGAKSHQGEKNASSSQASTSTKSPSEDPLTRKSGSLVQFLLYKYKIKKSVTKGEMLKIVGKRFREHFPEILKKASEGLSVVFGLELNKVNPNGHTYTFIDKVDLTDEESLLSSWDFPRRKLLMPLLGVIFLNGNSATEEEIWEFLNMLGVYDGEEHSVFGEPWKLITKDLVQEKYLEYKQVPSSDPPRFQFLWGPRAYAETSKMKVLEFLAKVNGTTPCAFPTHYEEALKDEEKAGV

SEQ ID NO: 127737 - DNA, 960 bp, Artificial Sequence
  derived and/or modified sequence
atgcctcgcgggcagaaaagtaagctgcgagcaagggagaagaggcggaaagcccgcgacgagactagaggcctaaatgtgcctcaagtcacggaagcagaagaggaagaagcaccttgttgttcgtcttcggtctcaggaggagctgcctcaagtagccccgccgcaggtatccctcaggagccacaaagggcccccactacagccgcagccgcagcggctggcgtaagtagcaccaaaagtaaaaagggcgcaaagtcccatcagggagaaaagaatgcctcaagttctcaggctagtactagtaccaagagtccctctgaggacccccttactagaaaaagtggttcccttgtgcagtttctgttatacaaatacaagataaagaagagcgtgaccaagggcgagatgctgaagattgtcggcaaaaggtttagggaacattttcctgagatcttaaagaaggcttcagagggcttgtctgtagtgttcgggctcgagctgaataaggtgaatccaaacggacatacctacactttcattgataaagtagacttgaccgacgaggagagcctgctgtcttcctgggacttccctagaaggaaattactgatgccccttctgggcgtaattttcctgaatggcaatagtgctaccgaggaggagatttgggagttcttaaatatgctcggggtgtatgatggtgaagagcattcagtctttggagaaccgtggaaactgattaccaaagacctggtgcaggagaaatatctggagtacaagcaagtgccgagctccgaccccccaagattccaattcctttggggaccacgagcatacgcagagactagtaagatgaaggtacttgaatttttggcaaaagtcaacgggacaactccctgtgcctttcctactcactacgaagaggcacttaaagacgaggagaaggccggggtgtag

SEQ ID NO: 127738 - DNA, 960 bp, Artificial Sequence
  derived and/or modified sequence
atgccccggggccagaagagcaagctgcgggcccgggagaagaggaggaaggccagagatgagacccggggcctgaatgtgccccaggtgacagaagctgaggaggaggaggccccctgctgcagcagctctgtgtctgggggcgccgccagcagcagccctgctgctggcatcccccaggagccccagagggcccccaccacagctgctgctgctgctgctggggtgagcagcaccaagagcaagaagggggccaagagccaccagggcgagaagaatgccagcagcagccaggccagcaccagcaccaagagccccagcgaggaccccctgaccaggaagagcggcagcctggtgcagttcctgctgtacaagtacaagatcaagaagtctgtgaccaagggggagatgctgaagatcgtgggcaagcgcttccgggagcacttccctgagatcctgaagaaggccagcgagggcctgtctgtggtgtttggcctggagctgaacaaggtgaaccccaacggccacacctacaccttcatcgacaaggtggacctgacagatgaggagagcctgctgagctcctgggacttccccaggaggaagctgctgatgcccctgctgggcgtcatcttcctgaatggaaattctgccacagaggaggagatctgggagttcctgaacatgctgggcgtgtatgatggagaggagcacagcgtgtttggagagccctggaagctgatcaccaaggacctggtgcaggagaagtacctggagtacaagcaggtgcccagcagtgaccccccacgcttccagttcctgtggggcccccgggcctatgcagagaccagcaagatgaaggtgctggagttcctggccaaggtgaatggcaccaccccctgtgccttccccacccactatgaggaggccctgaaggatgaggagaaggccggcgtgtag

SEQ ID NO: 127739 - DNA, 1610 bp, Artificial Sequence
  derived and/or modified sequence
ctgacttccgctttggaggcgaggacccgagcgagtgtagggggtgcggcgtctggtcagccaggggtgaattctcaggactggtcggcagtcaagccatcatgcctcgtggtcagaagagtaagctccgtgcccgtgagaaacgccgcaaggcccgagatgagacccggggtctcaatgttcctcaggtcactgaagcagaggaagaagaggccccctgctgttcctcttctgtttctgggggtgctgcttcaagctctcctgctgctggcattccccaggagcctcagagagccccaaccactgccgctgctgcggctgcgggtgtttcatccacaaaatctaaaaaaggtgccaagagccaccaaggtgagaaaaatgcaagttcctcccaggcctcaacatccactaagagcccaagcgaagatcctctaaccaggaagtcagggtcgttggtgcagttcctgttgtacaagtataaaataaaaaagtccgttacaaagggagaaatgctgaaaattgttggcaaaaggttcagggagcacttccctgagatcctcaagaaagcctctgagggcctcagtgttgtctttggccttgagctgaataaagtcaaccccaacggccacacttacaccttcatcgacaaggtagacctcactgatgaggaatccctgctcagttcctgggactttcccaggagaaagcttctgatgcctctcctgggtgtgatcttcttaaatggcaactcagctactgaggaagagatctgggaattcctgaatatgttgggagtctatgatggagaggagcactcagtctttggggaaccctggaagctcatcaccaaagatctggtgcaggaaaaatatctggagtacaagcaggtgcccagcagtgatcccccacgctttcaattcctgtggggtccgagagcctatgctgaaaccagcaagatgaaagtcctggagtttttggccaaggtaaatggtaccaccccctgtgccttcccaacccattacgaagaagctttgaaagatgaagagaaagccggagtctgagccagagttgtagccaggccttgcactactgccatagccaatcaatctcccaaagccaagtttacctgctgttctcacccccaatgaggtcttaggcagattctttactttgtaattcaaaaggcctgttaacctttgttcttgttatgcatgaataacttgttgactttttttttttctctttttcaactagtgtttcaacaggtttatttagattcagaatgtaaatttacaaatgatatagatcaccctgttattgctgtttttcagggacagtagaaagtgttttgttttttgagtgaaacaacttattaataaaaatccttaaatcacttttgtaatccaggacaagaaaatgtggcattagagtagaaatatctttggaaatgtgaaagaccccatagtgaaatatttgggatcagaagccagaggtgtaaaagtggtcaattcttggtttacttcatttaatctttcttttcataaagatacatacctggatttgtttatgttattcaagaatgtgtgagaaattaaaccatagttagttaa

SEQ ID NO: 127740 - DNA, 960 bp, Artificial Sequence
  derived and/or modified sequence
atgccccggggccagaagagcaagctgcgggcccgggagaagcggagaaaagctcgtgacgagacacggggactgaatgttccccaggtgactgaggccgaagaggaagaggcaccctgttgttccagctccgtatcgggaggcgctgcttcctcaagtccggccgccggaattccacaggagccgcagcgggcaccaactacagcagccgccgccgccgcgggcgtatcctcaacgaaatcaaagaagggggccaagtcacatcagggtgaaaaaaacgcaagcagctctcaagcctctacaagcactaaaagcccctccgaagacccgctcacacgcaagagcggctcactagtccaatttctcttgtataaatacaaaattaagaagagtgtgactaagggcgagatgctgaaaattgtgggtaagaggtttagggaacattttcctgaaatcttgaagaaagcgtcagaaggcctgtccgtggtgttcggacttgagctgaataaggttaacccgaatggtcacacatatacctttattgataaggtggatcttaccgatgaggaatccctcttgtcttcctgggatttcccacgtcgcaagttactgatgcctttgctaggcgtgatatttcttaatggcaactccgctaccgaggaggagatttgggaatttctcaatatgctcggggtttatgacggcgaagaacactccgtgttcggtgaaccgtggaagctgataactaaagatctagtccaggagaaatacttagagtataaacaggtccccagcagcgatcctcccaggtttcaattcctgtgggggcccagggcttacgcggagacaagtaaaatgaaggttctggagtttttagccaaggtgaatgggacaactccttgtgccttccctactcattatgaggaagcactgaaggacgaggagaaagccggtgtatag

SEQ ID NO: 127741 - DNA, 960 bp, Artificial Sequence
  derived and/or modified sequence
atgcccagaggacagaaatctaagctccgtgccagagagaagcgccgaaaagcacgagatgagacgcgtggattgaacgtccctcaggttaccgaagccgaggaggaggaagcaccgtgctgttcatcgagcgtgtctgggggagcagcttcctcatctccagccgctggaattccccaggaaccccaaagagccccaaccacagcagccgcagcagccgctggagtgagcagcaccaaatccaagaagggcgctaaaagccaccaaggagaaaaaaatgcaagcagcagccaagcctccactagcacgaagtccccctctgaggacccgttgacaaggaaaagcggaagcctagtacaatttttgctgtataagtacaaaatcaaaaagtccgtgaccaagggagaaatgttaaagattgttgggaaacgcttccgggaacatttccctgagatcctgaagaaagcctcagagggcctgagcgttgttttcggtttggaattgaacaaagtgaatcctaatgggcacacgtatacatttatcgacaaagtagatctgacagatgaagaaagtctcctgtcgtcttgggactttccacggagaaagctgctcatgccattattgggcgtgatatttcttaatgggaattctgcgactgaggaggaaatttgggagttcttgaacatgctgggcgtgtacgacggcgaagaacattcggtgttcggcgaaccctggaagttgattactaaggacctggttcaggagaaatacctggaatacaagcaggtgccctcttcggacccgccacggttccagtttttatgggggccacgtgcctacgccgagaccagcaaaatgaaggtactggaatttcttgctaaggtgaatggcactaccccatgcgcatttccaacacactatgaggaggctctcaaagatgaggagaaggccggtgtgtag

SEQ ID NO: 127742 - DNA, 960 bp, Artificial Sequence
  derived and/or modified sequence
atgcccagaggccagaagagcaagctgagagccagagagaagagaagaaaggccagagacgagaccagaggcctgaacgtgccccaggtgaccgaggccgaggaggaggaggccccctgctgcagcagcagcgtgagcggcggcgccgccagcagcagccccgccgccggcatcccccaggagccccagagagcccccaccaccgccgccgccgccgccgccggcgtgagcagcaccaagagcaagaagggcgccaagagccaccagggcgagaagaacgccagcagcagccaggccagcaccagcaccaagagccccagcgaggaccccctgaccagaaagagcggcagcctggtgcagttcctgctgtacaagtacaagatcaagaagagcgtgaccaagggcgagatgctgaagatcgtgggcaagagattcagagagcacttccccgagatcctgaagaaggccagcgagggcctgagcgtggtgttcggcctggagctgaacaaggtgaaccccaacggccacacctacaccttcatcgacaaggtggacctgaccgacgaggagagcctgctgagcagctgggacttccccagaagaaagctgctgatgcccctgctgggcgtgatcttcctgaacggcaacagcgccaccgaggaggagatctgggagttcctgaacatgctgggcgtgtacgacggcgaggagcacagcgtgttcggcgagccctggaagctgatcaccaaggacctggtgcaggagaagtacctggagtacaagcaggtgcccagcagcgacccccccagattccagttcctgtggggccccagagcctacgccgagaccagcaagatgaaggtgctggagttcctggccaaggtgaacggcaccaccccctgcgccttccccacccactacgaggaggccctgaaggacgaggagaaggccggcgtgtag

SEQ ID NO: 127743 - protein, 153 aa, Artificial Sequence
  derived and/or modified sequence
MAPAAATGGSTLPSGFSVFTTLPDLLFIFEFIFGGLVWILVASSLVPWPLVQGWVMFVSVFCFVATTTLIILYIIGAHGGETSWVTLDAAYHCTAALFYLSASVLEALATITMQDGFTYRHYHENIAAVVFSYIATLLYVVHAVFSLIRWKSS

SEQ ID NO: 127744 - DNA, 462 bp, Artificial Sequence
  derived and/or modified sequence
atggccccagcggccgccacgggcggatctaccttacctagcggcttctccgtctttaccacgttacccgacctgttatttatcttcgagttcatttttggggggttggtctggatactcgttgcatcctcccttgttccttggcctctggtgcagggttgggtaatgttcgtatccgtgttttgctttgttgctactaccaccctcattattctttatatcatcggagcacatgggggcgagacatcctgggtaactctggacgccgcctatcattgcaccgcagccctcttttatttaagcgccagcgtgcttgaggctcttgccaccatcaccatgcaggatgggtttacgtacaggcactaccacgaaaacattgctgccgtcgtgttctcatacatcgcgaccttactgtatgtagttcacgcggtcttctccctcatcaggtggaagtcatcgtag

SEQ ID NO: 127745 - DNA, 462 bp, Artificial Sequence
  derived and/or modified sequence
atggccccagctgctgccactggaggcagcaccctgcccagcggcttctctgtgttcaccaccctgcctgacctgctcttcatctttgagttcatctttggaggcctggtgtggatcctggtggccagcagcctggtgccctggcccctggtgcagggctgggtgatgtttgtgtctgtgttctgctttgtggccaccaccaccctcatcatcctgtacatcattggagcccacggcggggagacctcctgggtgaccctggatgctgcctaccactgcacagctgccctcttctacctgagcgcctctgtgctggaggccctggccaccatcaccatgcaggacggcttcacctaccgccactaccacgagaacattgctgctgtggtgttctcctacatcgccaccctgctgtatgtggtgcatgctgtgttcagcctcatccgctggaagagcagctag

SEQ ID NO: 127746 - DNA, 1108 bp, Artificial Sequence
  derived and/or modified sequence
cccgcgcgcgggggcgcccaggccactgggctccgcggagccagcgagaggtctgcgcggagtctgagcggcgctcgtcccgtcccaaggccgacgccagcacgccgtcatggcccccgcagcggcgacggggggcagcaccctgcccagtggcttctcggtcttcaccaccttgcccgacttgctcttcatctttgagtttatcttcgggggcctggtgtggatcctggtggcctcctccctggtgccctggcccctggtccagggctgggtgatgttcgtgtctgtgttctgcttcgtggccaccaccaccttgatcatcctgtacataattggagcccacggtggagagacttcctgggtcaccttggacgcagcctaccactgcaccgctgccctcttttacctcagcgcctcagtcctggaggccctggccaccatcacgatgcaagacggcttcacctacaggcactaccatgaaaacattgctgccgtggtgttctcctacatagccactctgctctacgtggtccatgcggtgttctctttaatcagatggaagtcttcataaagccgcagtagaacttgagctgaaaacccagatggtgttaactggccgccccactttccggcataactttttagaaaacagaaatgcccttgatggtggaaaaaagaaaacaaccacccccccactgcccaaaaaaaaaagccctgccctgttgctcgtgggtgctgtgtttactctcccgtgtgccttcgcgtccgggttgggagcttgctgtgtctaacctccaactgctgtgctgtctgctagggtcacctcctgtttgtgaaaggggaccttcttgttcgggggtgggaagtggcgaccgtgacctgagaaggaaagaaagatcctctgctgacccctggagcagctctcgagaactacctgttggtattgtccacaagctctcccgagcgccccatcttgtgccatgttttaagtcttcatggatgttctgcatgtcatggggactaaaactcacccaacagatctttccagaggtccatggtggaagacgataaccctgtgaaatactttataaaatgtcttaatgttcaa

SEQ ID NO: 127747 - DNA, 462 bp, Artificial Sequence
  derived and/or modified sequence
atggcccccgccgccgccaccggcggcagcaccctgcccagcggcttttccgtgttcactaccctgcctgatcttctattcatctttgagtttatttttggcgggctggtctggattctggtggcctccagtctggtgccttggccactggttcagggttgggtcatgtttgtcagcgttttttgcttcgttgcgacgactacactaatcatcctctatataatcggtgctcacgggggtgagacatcctgggtgacccttgacgcagcctaccactgtacggccgctcttttttacctgtccgcttctgtactggaagccctagcaactatcaccatgcaggatgggtttacctataggcactatcacgagaacattgccgcggtggttttcagctatatcgccacactgctatacgtggtccacgccgtgttttcgcttatcagatggaagtcctcctag

SEQ ID NO: 127748 - DNA, 462 bp, Artificial Sequence
  derived and/or modified sequence
atggccccagccgctgctacgggaggatcaactttgccatccggcttcagcgtattcacaaccctgcctgatctccttttcatcttcgagttcattttcggtggcctcgtttggattctggtcgcaagtagcctggtgccatggccccttgtgcagggatgggtgatgtttgtgtccgttttctgttttgtcgcaaccacaaccctcataattctgtacattataggagcccatggcggagaaacctcttgggtgacgctggatgcagcgtatcactgtactgctgcccttttctatctgtctgcctctgtgctggaggccctcgcaaccatcaccatgcaggacggattcacatatcggcactatcacgaaaatatcgcagctgtggtcttctcatatatagccactcttctatatgtggtacatgcggtgttctctttgattagatggaaaagcagctag

SEQ ID NO: 127749 - DNA, 462 bp, Artificial Sequence
  derived and/or modified sequence
atggcccccgccgccgccaccggcggcagcaccctgcccagcggcttcagcgtgttcaccaccctgcccgacctgctgttcatcttcgagttcatcttcggcggcctggtgtggatcctggtggccagcagcctggtgccctggcccctggtgcagggctgggtgatgttcgtgagcgtgttctgcttcgtggccaccaccaccctgatcatcctgtacatcatcggcgcccacggcggcgagaccagctgggtgaccctggacgccgcctaccactgcaccgccgccctgttctacctgagcgccagcgtgctggaggccctggccaccatcaccatgcaggacggcttcacctacagacactaccacgagaacatcgccgccgtggtgttcagctacatcgccaccctgctgtacgtggtgcacgccgtgttcagcctgatcagatggaagagcagctag

SEQ ID NO: 127750 - protein, 1144 aa, Artificial Sequence
  derived and/or modified sequence
MKLSRQFTVFGSAIFCVVIFSLYLMLDRGHLDYPRNPRREGSFPQGQLSMLQEKIDHLERLLAENNEIISNIRDSVINLSESVEDGPKSSQSNFSQGAGSHLLPSQLSLSVDTADCLFASQSGSHNSDVQMLDVYSLISFDNPDGGVWKQGFDITYESNEWDTEPLQVFVVPHSHNDPGWLKTFNDYFRDKTQYIFNNMVLKLKEDSRRKFIWSEISYLSKWWDIIDIQKKDAVKSLIENGQLEIVTGGWVMPDEATPHYFALIDQLIEGHQWLENNIGVKPRSGWAIDPFGHSPTMAYLLNRAGLSHMLIQRVHYAVKKHFALHKTLEFFWRQNWDLGSVTDILCHMMPFYSYDIPHTCGPDPKICCQFDFKRLPGGRFGCPWGVPPETIHPGNVQSRARMLLDQYRKKSKLFRTKVLLAPLGDDFRYCEYTEWDLQFKNYQQLFDYMNSQSKFKVKIQFGTLSDFFDALDKADETQRDKGQSMFPVLSGDFFTYADRDDHYWSGYFTSRPFYKRMDRIMESHLRAAEILYYFALRQAHKYKINKFLSSSLYTALTEARRNLGLFQHHDAITGTAKDWVVVDYGTRLFHSLMVLEKIIGNSAFLLILKDKLTYDSYSPDTFLEMDLKQKSQDSLPQKNIIRLSAEPRYLVVYNPLEQDRISLVSVYVSSPTVQVFSASGKPVEVQVSAVWDTANTISETAYEISFRAHIPPLGLKVYKILESASSNSHLADYVLYKNKVEDSGIFTIKNMINTEEGITLENSFVLLRFDQTGLMKQMMTKEDGKHHEVNVQFSWYGTTIKRDKSGAYLFLPDGNAKPYVYTTPPFVRVTHGRIYSEVTCFFDHVTHRVRLYHIQGIEGQSVEVSNIVDIRKVYNREIAMKISSDIKSQNRFYTDLNGYQIQPRMTLSKLPLQANVYPMTTMAYIQDAKHRLTLLSAQSLGVSSLNSGQIEVIMDRRLMQDDNRGLEQGIQDNKITANLFRILLEKRSAVNTEEEKKSVSYPSLLSHITSSLMNHPVIPMANKFSSPTLELQGEFSPLQSSLPCDIHLVNLRTIQSKVGNGHSNEAALILHRKGFDCRFSSKGTGLFCSTTQGKILVQKLLNKFIVESLTPSSLSLMHSPPGTQNISEINLSPMEISTFRIQLR

SEQ ID NO: 127751 - DNA, 3435 bp, Artificial Sequence
  derived and/or modified sequence
atgaaacttagtaggcagttcaccgtgttcggaagcgcgatcttctgtgtggtgatcttctccttatacctcatgttggacagaggccacctggattatcccagaaacccgcgccgcgaagggagttttccgcagggccagttgtctatgctgcaggagaagattgatcatttggagaggctcctcgccgagaacaatgagatcatcagcaatataagggattccgtgatcaatctgtcagaatcagtggaggatgggcccaagtcaagccaaagcaacttctcccagggcgccggcagtcacctcttgccttcccaactatctttatcagttgataccgcggattgcctttttgcaagccaaagtggctcacataacagtgacgttcaaatgttagacgtttacagtctgatatcatttgacaaccccgatggcggcgtgtggaagcaggggttcgacattacttacgagagcaatgagtgggataccgaaccattgcaggtgtttgtcgtgcctcattctcacaacgaccccggatggctgaagacatttaacgattatttcagagacaagacacaatacatcttcaacaacatggtgctgaagctgaaagaagattcaagaagaaagtttatttggtccgagatttcttacctctccaagtggtgggatattatagacatccagaagaaggatgctgtgaagtccttgatagagaacgggcagctcgagatcgtcacaggcggttgggtcatgccagacgaagccacccctcattactttgctctgatagaccagctcatcgagggtcaccaatggctcgagaacaacataggtgtcaagccccgaagtggttgggctattgacccatttggtcacagtcccacaatggcatatctactaaatagagcaggcttaagccacatgctcatacagagagtgcattatgccgtgaaaaaacacttcgccctgcacaagaccttggagttcttttggcggcagaattgggacctgggcagcgtaactgatatactgtgtcacatgatgcccttctatagctatgatatcccccacacgtgtggacccgatcccaaaatttgttgtcagtttgacttcaagcgcctgcccggcggccgcttcggttgcccatggggcgtgccaccagaaaccatccatcctggcaacgtacaaagccgggccaggatgctgctcgaccaatatcggaagaagtctaagctatttcggactaaggtactgctcgctccgctgggggacgacttccgttactgtgagtacactgagtgggacttgcagtttaaaaattatcaacagctctttgattacatgaattcccagtcgaagttcaaggtgaaaatccagttcgggactttgagtgatttctttgacgccctcgacaaggcagatgagacccagcgcgataagggccagagcatgttcccagtactcagtggggactttttcacttatgctgacagagacgaccattactggagcggttatttcacttcacgccctttttataaacgtatggatcggataatggagtctcatctgcgcgctgctgagatcttatattacttcgccctccgtcaggcccacaagtacaagattaacaagtttctctcaagctctctgtacaccgctctgacggaagctcggaggaatttaggtctattccagcatcatgatgctatcactggaacagcaaaggactgggtggtggtcgattacgggacgcggctttttcacagtctgatggttctcgaaaaaatcattgggaacagcgccttcctcctgatactgaaggacaagttgacttatgacagctacagtcccgatacttttctggagatggacttgaagcagaaaagtcaagacagcttgccacaaaaaaacattattaggctatctgctgagccacggtacctggttgtgtataacccactggagcaggatcgtattagcctggttagcgtctacgtgtcttccccaaccgttcaggtcttctctgcttccgggaagcctgtcgaggtgcaggttagcgctgtgtgggacaccgcaaataccatctccgagacggcctacgagatctccttcagggcacacatccccccactaggcctgaaggtgtataaaattttggagagtgcaagctcaaacagccacctcgctgactatgttctctacaagaataaggttgaagacagtggcatattcaccattaagaacatgataaatacagaagagggcattacgctagaaaattccttcgtgctcctgagattcgatcagaccggactgatgaaacagatgatgacgaaagaagatggcaagcaccatgaagtcaacgtccagttcagttggtatgggacgacaataaaaagggataaatctggggcctatctgttcttgccggacggaaacgcgaagccatacgtgtataccacgccaccatttgtgagagtaacgcatggtcgcatttattcagaggtcacatgcttctttgaccatgtgacgcacagagttagactctatcatatccagggaatagaagggcagagcgtagaggttagcaatatcgtcgatattcggaaagtgtataaccgcgaaatcgctatgaagatttctagcgacatcaaaagccagaacagattctatacagatctaaatgggtaccagatccaaccgcgaatgactctgagtaagttaccgcttcaggcaaacgtgtacccaatgactacgatggcctatatccaggatgccaaacatcgactcaccctgttatcggcgcagtccctaggagtttccagcctcaactcaggacagatagaggttatcatggaccgaagactcatgcaggacgacaaccgagggctggaacagggtatccaggacaacaagattactgcgaatttgtttcgaatcttgcttgagaaacggagtgctgttaataccgaggaggagaagaaatccgtgtcctacccttcccttcttagtcacattacttctagcctgatgaatcacccggttatacccatggcaaacaaattcagtagccccacgctggagctccagggcgaattctcaccactgcaatctagcttgccctgtgacatccaccttgtgaaccttagaacaattcagagcaaggtgggtaatggtcattcaaacgaagccgcactgattctgcacaggaaggggttcgactgtcggttttcgtctaaaggcaccggcctgttttgtagtacgactcaaggaaaaatcttggtgcaaaaacttcttaacaaattcattgtcgagtccctgacacctagctctctctcgctgatgcatagccccccagggacacagaacatcagtgagatcaatttgagtcccatggagatctcaaccttccgcatccaactccggtag

SEQ ID NO: 127752 - DNA, 3435 bp, Artificial Sequence
  derived and/or modified sequence
atgaagctgagccggcagttcaccgtgtttggcagcgccatcttctgtgtggtgatcttcagcctgtacctgatgctggaccggggccacctggactaccccaggaacccccggcgggagggcagcttcccccagggccagctgtccatgctgcaggagaagattgaccacctggagcggctgctggccgagaacaatgagatcatcagcaacatccgggacagcgtcatcaacctgtctgagagcgtggaggatggccccaagagcagccagagcaacttcagccagggcgccggcagccacctgctgcccagccagctgagcctgtctgtggacacagctgactgcctgtttgccagccagagcggcagccacaacagtgatgtgcagatgctggatgtgtacagcctcatcagctttgacaacccagatggcggcgtgtggaagcagggctttgacatcacctatgagagcaatgagtgggacacagagcccctgcaggtgtttgtggtgccccacagccacaatgaccccggctggctgaagaccttcaatgactacttccgggacaagacccagtacatcttcaacaacatggtgctgaagctgaaggaggacagcaggaggaagttcatctggagcgagatctcctacctgagcaagtggtgggacatcatcgacatccagaagaaggatgctgtgaagagcctgattgaaaatggccagctggagatcgtgactggaggctgggtgatgccagatgaggccaccccccactactttgccctgattgaccagctgattgagggccaccagtggctggagaacaacatcggcgtgaagcccaggagcggctgggccatcgaccccttcggccacagccccaccatggcctacctgctgaacagagctggcctgagccacatgctgatccagagggtgcactatgctgtgaagaagcactttgccctgcacaagaccctggagttcttctggaggcagaactgggacctgggctctgtgacagacatcctgtgccacatgatgcccttctacagctatgacatcccccacacctgtggccctgaccccaagatctgctgccagtttgacttcaagaggctgcccggcggccgcttcggctgcccctggggcgtgcccccagagaccatccaccctggaaatgtgcagagccgggccaggatgctgctggaccagtacaggaagaagagcaagctgttccgcaccaaggtgctgctggcccccctgggagatgacttccgctactgtgagtacacagagtgggacctgcagttcaagaactaccagcagctgtttgactacatgaacagccagagcaagttcaaggtgaagatccagtttggcaccctgagtgacttctttgatgccctggacaaggcagatgagacccagagggacaagggccagagcatgtttcctgtgctgagcggggacttcttcacctatgctgacagagatgaccactactggagcggctacttcaccagccggcccttctacaagaggatggaccgcatcatggagagccacctgcgggctgctgagatcctgtactactttgccctgcggcaggcccacaagtacaagatcaacaagttcctgagcagcagcctgtacacagccctgacagaggcccggaggaacctgggcctcttccagcaccatgatgccatcactggaacagccaaggactgggtggtggtggactatggcaccaggctcttccacagcctgatggtgctggagaagatcatcggcaacagcgccttcctgctgatcctgaaggacaagctgacctatgacagctacagcccagacaccttcctggagatggacctgaagcagaagagccaggacagcctgccccagaagaacatcatccggctgtctgctgagccccgctacctggtggtgtacaaccccctggagcaggaccgcatcagcctggtgtctgtgtatgtgagcagccccaccgtgcaggtgttttctgccagcggcaagcctgtggaggtgcaggtgtctgctgtgtgggacacagccaacaccatcagcgagacagcctatgagatctccttccgggcccacatcccccccctgggcctgaaggtgtacaagatcctggagagcgccagcagcaacagccacctggccgactatgtgctgtacaagaacaaggtggaggacagcggcatcttcaccatcaagaacatgatcaacacagaggagggcatcaccctggagaacagctttgtgctgctgcgctttgaccagacaggcctgatgaagcagatgatgaccaaggaggatggcaagcaccacgaggtgaatgtgcagttctcctggtacggcaccaccatcaagagggacaagagcggggcctacctgttcctgcctgatggaaatgccaagccctacgtgtacaccaccccaccatttgtgcgggtgacccacggccgcatctacagcgaggtgacctgcttctttgaccacgtgacccaccgggtgcggctgtaccacatccagggcatcgagggccagagcgtggaggtgagcaacatcgtggacatcaggaaggtgtacaaccgggagatcgccatgaagatcagcagtgacatcaagagccagaaccgcttctacacagacctgaatggctaccagatccagcccaggatgaccctgagcaagctgcccctgcaggccaacgtgtaccccatgaccaccatggcctacatccaggatgccaagcaccggctgaccctgctgagcgcccagagcctgggcgtgagcagcctgaacagcggccagatcgaggtgatcatggaccggcggctgatgcaggatgacaacagaggcctggagcagggcatccaggacaacaagatcacagccaacctcttccgcatcctgctggagaagaggtctgctgtgaacacagaggaggagaagaagtctgtgtcctaccccagcctgctgagccacatcaccagcagcctgatgaaccaccctgtgatccccatggccaacaagttcagcagccccaccctggagctgcagggcgagttcagccccctgcagagcagcctgccctgtgacatccacctggtgaacctgcggaccatccagagcaaggtgggcaatggccacagcaatgaggccgccctgatcctgcacaggaaaggatttgactgccgcttcagcagcaagggcaccggcctcttctgcagcaccacccagggcaagatcctggtgcagaagctgctgaacaagttcatcgtggagagcctgacccccagcagcctgagcctgatgcacagccccccaggcacccagaacatcagcgagatcaacctgagccccatggagatcagcaccttccgcatccagctgaggtag

SEQ ID NO: 127753 - DNA, 4667 bp, Artificial Sequence
  derived and/or modified sequence
ggcggggccagccgcccgctcggctcaggcgctgcgggcgcctattgacccagcggctgctgcgccgccgctgtctcctcctgctcgtggcgggcggtgctggagcgccaagtggcgctggagaaccggcgcttcctttcgccgcttccgccgccatctccgcgtttgtggggcgggaaagagggagggggctagcggctgcagctggagcgggcttctctccggggacggtcctttcctccctgctctccttttccttctttccgcgttgccgccgcccgccccctgcgcctccccgcggagcctgggtccgggagggggaaggtaggggcggcggggggcgggagagtctggcgagcggacgctagctctgaggaaactcatcaatccgtgagccccggagtccggggtgcacatcggcccagccgcagcgtcggcggcggcggcggcagcagcacgaaggggctcagtcggggtaggcgggggcggtgccggtgccgcgggggcgggcccgaccgtcccgcccagaagttgtagggcttggctcctcgcgatcttgttcctttcccctccgcttctctgacctagctgcgcggccccggcccgggagctgccgaacccgcgcctcccctgggtgaggaggacacgcctgccctcgtcgagaaaacttttcctgccgactcagttggggcggcggtggcaggaagtgcgggcagcgacctctcctccgcctgccccgcgcgccctgccggaggtcggcgctgagcttgcgatcaagtttgtgggggccccccttcccagttgccggcgagtctcgcctcgagaggggcgcccgaccccggggagggcggcaggccagggcgaaggccaagggcgtgtggtggcgccggagactaggtgcggagcaaggcggggactcgcacccgcatccgagagcgcggaggtcgcgcagcccgggagaagggagcctccggcggctgcttcctagagtccacagtgcgctgtctcctttggctgaggagagtgtcctggccccgagtctatcgaggaaaatgaagttaagccgccagttcaccgtgttcggcagtgcgatcttctgtgtggtgattttctcgctctacctgatgctggaccggggtcacttagactaccccaggaacccgcgccgcgagggctccttccctcagggccagctctcaatgttgcaagaaaaaatagaccatttggagcgtttgctagctgagaataatgagatcatctcaaatattagagactcagtcatcaatttgagtgagtctgtggaggatggtccgaaaagttcacaaagcaatttcagccaaggtgctggctcacatcttctgccctcacaattatccctctcagttgacactgcagactgtctgtttgcttcacaaagtggaagtcacaattcagatgtgcagatgttggatgtttacagtctaatttcttttgacaatccagatggtggagtttggaagcaaggatttgacattacttatgaatctaatgaatgggacactgaaccccttcaagtctttgtggtgcctcattcccataacgacccaggttggttgaagactttcaatgactactttagagacaagactcagtatatttttaataacatggtcctaaagctgaaagaagactcacggaggaagtttatttggtctgagatctcttacctttcaaagtggtgggatattatagatattcagaagaaggatgctgttaaaagtttaatagaaaatggtcagcttgaaattgtgacaggtggctgggttatgcctgatgaagctactccacattattttgccttaattgatcaactaattgaaggacatcagtggctggaaaataatataggagtgaaacctcggtccggctgggctattgatccctttggacactcaccaacaatggcttatcttctaaaccgtgctggactttctcacatgcttatccagagagttcattatgcagttaaaaaacactttgcactgcataaaacattggagtttttttggagacagaattgggatctgggatctgtcacagatattttatgccacatgatgcccttctacagctatgacatccctcacacttgtggacctgatcctaaaatatgctgccagtttgattttaaacgtcttcctggaggcagatttggttgtccctggggagtccccccagaaacaatacatcctggaaatgtccaaagcagggctcggatgctactagatcagtaccgaaagaagtcaaagctttttcgtaccaaagttctcctggctccactaggagatgatttccgctactgtgaatacacggaatgggatttacagtttaagaattatcagcagctttttgattatatgaattctcagtccaagtttaaagttaagatacagtttggaactttatcagatttttttgatgcgctggataaagcagatgaaactcagagagacaagggccaatcgatgttccctgttttaagtggagattttttcacttatgccgatcgagatgatcattactggagtggctattttacatccagacccttttacaaacgaatggacagaatcatggaatctcatttaagggctgctgaaattctttactatttcgccctgagacaagctcacaaatacaagataaataaatttctctcatcatcactttacacggcactgacagaagccagaaggaatttgggactgtttcaacatcatgatgctatcacaggaactgcaaaagactgggtggttgtggattatggtaccagactttttcattcgttaatggttttggagaagataattggaaattctgcatttcttcttattttgaaggacaaactcacatacgactcttactctcctgataccttcctggagatggatttgaaacaaaaatcacaagattctctgccacaaaaaaatataataaggctgagtgcggagccaaggtaccttgtggtctataatcctttagaacaagaccgaatctcgttggtctcagtctatgtgagttccccgacagtgcaagtgttctctgcttcaggaaaacctgtggaagttcaagtcagcgcagtttgggatacagcaaatactatttcagaaacagcctatgagatctcttttcgagcacatataccgccattgggactgaaagtgtataagattttggaatcagcaagttcaaattcacatttagctgattatgtcttgtataagaataaagtagaagatagcggaattttcaccataaagaatatgataaatactgaagaaggtataacactagagaactcctttgttttacttcggtttgatcaaactggacttatgaagcaaatgatgactaaagaagatggtaaacaccatgaagtaaatgtgcaattttcatggtatggaaccacaattaaaagagacaaaagtggtgcctacctcttcttacctgatggtaatgccaagccttatgtttacacaacaccgccctttgtcagagtgacacatggaaggatttattcggaagtgacttgcttttttgaccatgttactcatagagtccgactataccacatacagggaatagaaggacagtctgtggaagtttccaatattgtggacatccgaaaagtatataaccgtgagattgcaatgaaaatttcttctgatataaaaagccaaaatagattttatactgacctaaatgggtaccagattcaacctagaatgacactgagcaaattgcctcttcaagcaaatgtctatcccatgaccacaatggcctatatccaggatgccaaacatcgtttgacactgctctctgctcagtcattaggggtttcgagtttgaatagtggtcagattgaagttatcatggatcgaagactcatgcaagatgataatcgtggccttgagcaaggtatccaggataacaagattacagctaatctatttcgaatactactagaaaaaagaagtgctgttaatacggaagaagaaaagaagtcggtcagttatccttctctccttagccacataacttcttctctcatgaatcatccagtcattccaatggcaaataagttctcctcacctacccttgagctgcaaggtgaattctctccattacagtcatctttgccttgtgacattcatctggttaatttgagaacaatacagtcaaaggtgggcaatgggcactccaatgaggcagccttgatcctccacagaaaagggtttgattgtcggttctctagcaaaggcacagggctgttttgttctactactcagggaaagatattggtacagaaacttttaaacaagtttattgtcgaaagtctcacaccttcatcactatccttgatgcattcacctcccggcactcagaatataagtgagatcaacttgagtccaatggaaatcagcacattccgaatccagttgaggtgaacctgactttcacatttggattgagaatcattggcttttatacctttcttggtttgacgtgcaataaagaagcacattattttagcttctggctactgtgagaacatgaattctgtgattctgtgggttttttcttttttcttttaccagtacagtaagaaaaaaaaaaaaaaaaaaaaa

SEQ ID NO: 127754 - DNA, 3435 bp, Artificial Sequence
  derived and/or modified sequence
atgaagctgagccggcagttcaccgtgttcggcagcgccatcttctgcgtggtaatcttctccttatatttgatgctggataggggtcacctggactacccacggaacccccggagagagggttcatttccccagggacagttaagtatgttacaggagaaaatcgatcacctggagcgcctccttgcggagaataatgaaatcatctcgaatatccgcgacagtgttattaacctttctgaatctgtggaagacggccccaagtccagccagtctaacttctctcagggcgctgggtctcacttgctgccttcgcagctatccctgagcgtagacactgccgattgcttgttcgcgagccagtccggcagccataactctgacgtgcagatgctggacgtctattccttaataagttttgataacccagatgggggcgtctggaagcagggatttgatatcacttatgaatctaatgaatgggatacagagccgctgcaggtatttgtcgtgccccattctcacaacgaccccggttggctgaaaacatttaatgattactttcgcgacaaaacccagtacatattcaataacatggtgctcaaactcaaagaggacagtaggcgtaaattcatctggtctgagatctcctatctgagcaaatggtgggatattatcgacatccagaagaaggatgcagtgaagagccttattgaaaatggccagcttgaaattgtcacaggcggttgggtaatgccggacgaggccacccctcattatttcgccctcatagaccaactaattgagggccaccagtggctcgagaataacataggggtgaagccccgttcaggatgggccattgatccattcggtcattctcccaccatggcctacctactcaacagggcaggtctgtcgcatatgctgatacaacgagtgcactacgcagtcaaaaagcattttgctctccacaagaccctcgagtttttttggcgccagaattgggatttaggttcagtgacggatatcttatgccatatgatgcctttctattcgtatgacattcctcatacctgtgggcctgacccaaagatctgttgtcagtttgatttcaagagactccccggcggacgattcgggtgcccttggggagtgcccccagaaacaatccaccccgggaacgtgcagtctagagcgaggatgttattggatcagtataggaaaaaatctaagctgtttcggacgaaagtgttactggcaccactgggcgacgatttcaggtactgtgagtatacagagtgggatctgcagttcaaaaattatcagcaactcttcgattatatgaactcccagagcaaattcaaggtcaagattcagtttggaacgctgagtgacttcttcgacgcacttgacaaggccgacgaaacccagcgcgataaaggacaatcaatgttccccgtcctgtcaggtgactttttcacttatgccgatcgcgatgatcattattggagtggatactttacttctagacctttttacaagcggatggatcgaataatggaaagtcatctgagggccgcggaaattttatactacttcgccctgcgacaagcccacaaatataaaattaacaagtttctcagttccagcctgtacacggctctgaccgaggccaggagaaacttggggctgttccaacatcatgacgcaataacagggactgctaaggactgggtggtcgttgactatgggacaaggctctttcacagcctgatggtgctggaaaagatcatcggcaattcagcgtttctcctgatcctgaaggacaaattgacctacgattcctactcgcccgacaccttcctggagatggacctcaaacagaaatctcaggatagcctccctcagaagaacatcatacgcctgtccgccgaacccagatatctcgtcgtgtataatcccctcgaacaggatcggatctccctggtgtcagtttatgtgtctagcccaactgttcaagtcttcagtgctagcggaaagccagtagaggtgcaggtttccgcagtctgggataccgccaacaccatctcagagacagcatatgaaatctccttccgcgctcatataccgccactaggcctcaaggtgtacaaaatactagagtcagctagctccaatagtcacctcgcagattatgtactgtacaagaataaggtggaagacagtggcattttcactatcaaaaacatgatcaatactgaggagggtatcacattggagaactcgttcgtcctcctccgcttcgaccagacaggtttaatgaagcaaatgatgaccaaagaggatggtaagcaccatgaagtgaatgtgcagttcagttggtatgggacaactatcaaacgggataaatccggcgcttaccttttcctgcctgatggcaatgctaaaccatacgtgtatacaacccccccttttgtgagagtgacccatggtagaatttactcagaggttacttgtttctttgaccacgtaacacaccgggtccgtctgtatcacattcagggcatcgagggccagagcgtggaggtgagcaatatagtggacattaggaaggtgtataatcgggagattgccatgaagatttccagcgatatcaagtctcagaaccggttctacacagatctgaacggataccaaatacagcctcgaatgacgctgtcgaaactgcccctgcaggccaatgtgtaccccatgaccaccatggcatatatccaagatgcaaagcatcggctaaccctgcttagcgcgcaaagcctcggggtgtcatcactgaacagcggccagattgaagttatcatggatcggaggctaatgcaagacgataaccggggactcgagcagggaattcaggacaataaaatcactgccaacctgttcagaatcctgctggaaaagaggtcagccgtgaacaccgaagaagaaaagaagagcgtgagctatccttctctgctgtcccacatcaccagtagtctgatgaatcatcccgtaattcccatggccaataagttctcttctcctaccctagaattgcaaggcgagttttcgccgctgcagagttcgctaccctgtgacatccatttggtgaacctgcggactatccagagtaaggtcggcaatggccactcaaacgaggctgcactgattctgcacagaaaaggattcgattgtcggttttcctccaaaggcaccggcctgttttgctccaccacacaaggaaagatactagtgcagaagttgcttaataaatttatcgtggagagcctgacccccagctcgttgagccttatgcattctccaccaggaacccagaacatttccgagatcaatctgagtcccatggagatttccacgtttaggatccagctgcggtag

SEQ ID NO: 127755 - DNA, 3435 bp, Artificial Sequence
  derived and/or modified sequence
atgaagctgtcacgccaatttaccgtttttggcagcgcaatcttctgcgtcgtgatcttcagcttgtatctcatgctagaccgtggacatcttgactatccaagaaatcctaggagagaaggtagtttccctcaggggcagctcagcatgctacaggaaaaaatagatcatctggagcgtctgctcgccgaaaacaatgagataatatcaaatattagagattccgtcatcaacttatcggaatccgtcgaagatggtccgaagtctagtcagagtaatttctcccagggggcaggctcacacctgctaccttctcaattgtctctgtccgtggataccgccgactgtctcttcgcatcgcagtctggatcacacaattctgacgtgcagatgctggatgtgtactctcttatatcctttgataatcctgatggcggagtgtggaaacagggtttcgatatcacctatgaaagcaacgaatgggacaccgaaccacttcaagtattcgtggtgccgcactctcacaatgatcctggctggttgaagaccttcaacgactactttcgggataagactcagtatatattcaacaacatggtgctgaaactgaaggaagacagccgcaggaaatttatttggtcagagatcagctacttgagtaagtggtgggacatcattgatatccagaaaaaagatgctgtgaagagcctgatagagaacggtcagctggagatcgttactgggggttgggtgatgccagatgaagccacacctcactattttgccctgattgatcagctgattgaaggtcaccaatggctggagaataacatcggggtaaaacctcggtctggatgggccattgaccctttcggtcatagtccgacgatggcctacctcctcaatagggctggcctgtcccacatgctgattcagagggtccattatgcagtgaaaaagcatttcgccctccacaagaccttggagttcttctggcgccaaaattgggacttggggtcagttacagacattctgtgccatatgatgcccttttattcttacgacattccccatacatgtggacctgaccctaagatttgctgtcagtttgacttcaagcgattacccggaggcagatttgggtgcccttggggcgtcccgccagagactattcatccagggaacgtgcagtcaagggcccgaatgcttcttgaccagtacaggaagaagtccaagctgttccgaaccaaggtcctcctggcccctcttggcgatgactttagatattgtgaatacaccgagtgggatctgcagttcaagaactaccagcaactctttgactatatgaattcccaatctaaattcaaggtcaaaattcagtttggtacactcagcgactttttcgacgccctggacaaagcggacgaaacccagcgggataaaggccagtccatgttccccgtgctgtcgggggatttttttacctatgccgatcgggatgaccattactggtccggatatttcacatcccgccctttctacaaaagaatggacaggataatggaaagtcacctcagagcagcggagattctctattactttgcactgaggcaggcccacaagtacaagatcaacaagtttctcagctccagcttgtacacagcacttacagaagctcggagaaatctcgggctcttccagcaccatgacgccatcacaggcactgcgaaagattgggtggtggtcgattacgggactcgtctcttccactcccttatggtattagaaaagatcattggtaacagcgcattcctgttgatcctgaaagacaaattaacttatgactcatactctccagacacatttctggagatggatctgaaacagaagagccaggacagcctccctcagaaaaatataattagactctccgctgagccccgataccttgttgtctacaatcccctcgagcaagacaggatcagcttggtgtctgtgtatgtttccagcccaaccgtgcaggtcttctctgcctccgggaagccagttgaggtccaagtttccgcagtgtgggacaccgccaacaccattagcgagactgcctacgaaatttcctttcgcgctcacattccccctctggggctgaaagtgtataagatccttgagtcagcctctagtaatagccacctcgcggactatgttttatataagaataaggtggaagattccgggatatttactatcaaaaacatgattaataccgaggaggggatcacgctcgaaaacagtttcgttctgctgaggttcgatcagacaggcctgatgaagcagatgatgaccaaagaggatggaaaacatcacgaggttaatgtgcagttcagctggtatggcacaacaataaaacgcgataagtctggagcctatctgtttttgccggacggcaacgcaaagccatacgtctacacaactccaccatttgtgcgggtgactcatggcaggatatactccgaggtgacctgcttcttcgaccacgtgacacaccgggtccgcctgtatcacatccagggcatcgaggggcagtcggttgaagtaagcaacatagtcgatatccgcaaagtttacaaccgggaaattgctatgaaaatctcttccgatattaaatcacagaaccgcttttacactgaccttaacgggtaccagatacaacctcgcatgactctcagtaagctgccgttgcaggccaatgtgtacccaatgacaaccatggcgtatatccaagacgcaaagcacaggctgacacttctctcagctcagtctctgggcgtttcaagcctaaactccggccagatcgaagtcattatggatagacgcctcatgcaggacgacaataggggtctagagcaggggatccaggacaacaagattactgccaacctctttcggatcctattagaaaagcggagcgccgtgaacacagaagaggagaagaaaagtgtgtcgtaccccagcctcttatcacacattacctcgagcttgatgaaccatccagtgattcccatggcgaacaaatttagtagtccaaccctggagctgcaaggtgaattcagcccattacagtcatcacttccatgtgatattcatctggtgaatctcaggactatccagagcaaggttggcaatggacattcaaacgaggctgcactgatcctccacagaaaaggtttcgactgtcgtttcagctccaaggggaccgggttgttttgtagcaccacccagggaaaaatcctggtgcagaaactgttgaataaatttatcgtggagtccttaacaccttcttcactgtccctcatgcacagccccccagggactcagaacattagtgagatcaacttgtcaccgatggaaatttccacatttaggatccagctgcgctag

SEQ ID NO: 127756 - DNA, 3435 bp, Artificial Sequence
  derived and/or modified sequence
atgaagctgagcagacagttcaccgtgttcggcagcgccatcttctgcgtggtgatcttcagcctgtacctgatgctggacagaggccacctggactaccccagaaaccccagaagagagggcagcttcccccagggccagctgagcatgctgcaggagaagatcgaccacctggagagactgctggccgagaacaacgagatcatcagcaacatcagagacagcgtgatcaacctgagcgagagcgtggaggacggccccaagagcagccagagcaacttcagccagggcgccggcagccacctgctgcccagccagctgagcctgagcgtggacaccgccgactgcctgttcgccagccagagcggcagccacaacagcgacgtgcagatgctggacgtgtacagcctgatcagcttcgacaaccccgacggcggcgtgtggaagcagggcttcgacatcacctacgagagcaacgagtgggacaccgagcccctgcaggtgttcgtggtgccccacagccacaacgaccccggctggctgaagaccttcaacgactacttcagagacaagacccagtacatcttcaacaacatggtgctgaagctgaaggaggacagcagaagaaagttcatctggagcgagatcagctacctgagcaagtggtgggacatcatcgacatccagaagaaggacgccgtgaagagcctgatcgagaacggccagctggagatcgtgaccggcggctgggtgatgcccgacgaggccaccccccactacttcgccctgatcgaccagctgatcgagggccaccagtggctggagaacaacatcggcgtgaagcccagaagcggctgggccatcgaccccttcggccacagccccaccatggcctacctgctgaacagagccggcctgagccacatgctgatccagagagtgcactacgccgtgaagaagcacttcgccctgcacaagaccctggagttcttctggagacagaactgggacctgggcagcgtgaccgacatcctgtgccacatgatgcccttctacagctacgacatcccccacacctgcggccccgaccccaagatctgctgccagttcgacttcaagagactgcccggcggcagattcggctgcccctggggcgtgccccccgagaccatccaccccggcaacgtgcagagcagagccagaatgctgctggaccagtacagaaagaagagcaagctgttcagaaccaaggtgctgctggcccccctgggcgacgacttcagatactgcgagtacaccgagtgggacctgcagttcaagaactaccagcagctgttcgactacatgaacagccagagcaagttcaaggtgaagatccagttcggcaccctgagcgacttcttcgacgccctggacaaggccgacgagacccagagagacaagggccagagcatgttccccgtgctgagcggcgacttcttcacctacgccgacagagacgaccactactggagcggctacttcaccagcagacccttctacaagagaatggacagaatcatggagagccacctgagagccgccgagatcctgtactacttcgccctgagacaggcccacaagtacaagatcaacaagttcctgagcagcagcctgtacaccgccctgaccgaggccagaagaaacctgggcctgttccagcaccacgacgccatcaccggcaccgccaaggactgggtggtggtggactacggcaccagactgttccacagcctgatggtgctggagaagatcatcggcaacagcgccttcctgctgatcctgaaggacaagctgacctacgacagctacagccccgacaccttcctggagatggacctgaagcagaagagccaggacagcctgccccagaagaacatcatcagactgagcgccgagcccagatacctggtggtgtacaaccccctggagcaggacagaatcagcctggtgagcgtgtacgtgagcagccccaccgtgcaggtgttcagcgccagcggcaagcccgtggaggtgcaggtgagcgccgtgtgggacaccgccaacaccatcagcgagaccgcctacgagatcagcttcagagcccacatcccccccctgggcctgaaggtgtacaagatcctggagagcgccagcagcaacagccacctggccgactacgtgctgtacaagaacaaggtggaggacagcggcatcttcaccatcaagaacatgatcaacaccgaggagggcatcaccctggagaacagcttcgtgctgctgagattcgaccagaccggcctgatgaagcagatgatgaccaaggaggacggcaagcaccacgaggtgaacgtgcagttcagctggtacggcaccaccatcaagagagacaagagcggcgcctacctgttcctgcccgacggcaacgccaagccctacgtgtacaccaccccccccttcgtgagagtgacccacggcagaatctacagcgaggtgacctgcttcttcgaccacgtgacccacagagtgagactgtaccacatccagggcatcgagggccagagcgtggaggtgagcaacatcgtggacatcagaaaggtgtacaacagagagatcgccatgaagatcagcagcgacatcaagagccagaacagattctacaccgacctgaacggctaccagatccagcccagaatgaccctgagcaagctgcccctgcaggccaacgtgtaccccatgaccaccatggcctacatccaggacgccaagcacagactgaccctgctgagcgcccagagcctgggcgtgagcagcctgaacagcggccagatcgaggtgatcatggacagaagactgatgcaggacgacaacagaggcctggagcagggcatccaggacaacaagatcaccgccaacctgttcagaatcctgctggagaagagaagcgccgtgaacaccgaggaggagaagaagagcgtgagctaccccagcctgctgagccacatcaccagcagcctgatgaaccaccccgtgatccccatggccaacaagttcagcagccccaccctggagctgcagggcgagttcagccccctgcagagcagcctgccctgcgacatccacctggtgaacctgagaaccatccagagcaaggtgggcaacggccacagcaacgaggccgccctgatcctgcacagaaagggcttcgactgcagattcagcagcaagggcaccggcctgttctgcagcaccacccagggcaagatcctggtgcagaagctgctgaacaagttcatcgtggagagcctgacccccagcagcctgagcctgatgcacagcccccccggcacccagaacatcagcgagatcaacctgagccccatggagatcagcaccttcagaatccagctgagatag

SEQ ID NO: 127757 - protein, 2803 aa, Artificial Sequence
  derived and/or modified sequence
MDGVAEFSEYVSETVDVPSPFDLLEPPTSGGFLKLSKPCCYIFPGGRGDSALFAVNGFNILVDGGSDRKSCFWKLVRHLDRIDSVLLTHIGADNLPGINGLLQRKVAELEEEQSQGSSSYSDWVKNLISPELGVVFFNVPEKLRLPDASRKAKRSIEEACLTLQHLNRLGIQAEPLYRVVSNTIEPLTLFHKMGVGRLDMYVLNPVKDSKEMQFLMQKWAGNSKAKTGIVLPNGKEAEISVPYLTSITALVVWLPANPTEKIVRVLFPGNAPQNKILEGLEKLRHLDFLRYPVATQKDLASGAVPTNLKPSKIKQRADSKESLKATTKTAVSKLAKREEVVEEGAKEARSELAKELAKTEKKAKESSEKPPEKPAKPERVKTESSEALKAEKRKLIKDKVGKKHLKEKISKLEEKKDKEKKEIKKERKELKKDEGRKEEKKDAKKEEKRKDTKPELKKISKPDLKPFTPEVRKTLYKAKVPGRVKIDRSRAIRGEKELSSEPQTPPAQKGTVPLPTISGHRELVLSSPEDLTQDFEEMKREERALLAEQRDTGLGDKPFPLDTAEEGPPSTAIQGTPPSVPGLGQEEHVMKEKELVPEVPEEQGSKDRGLDSGAETEEEKDTWEEKKQREAERLPDRTEAREESEPEVKEDVIEKAELEEMEEVHPSDEEEEDATKAEGFYQKHMQEPLKVTPRSREAFGGRELGLQGKAPEKETSLFLSSLTTPAGATEHVSYIQDETIPGYSETEQTISDEEIHDEPEERPAPPRFHTSTYDLPGPEGAGPFEASQPADSAVPATSGKVYGTPETELTYPTNIVAAPLAEEEHVSSATSITECDKLSSFATSVAEDQSVASLTAPQTEETGKSSLLLDTVTSIPSSRTEATQGLDYVPSAGTISPTSSLEEDKGFKSPPCEDFSVTGESEKRGEIIGKGLSGERAVEEEEEETANVEMSEKLCSQYGTPVFSAPGHALHPGEPALGEAEERCLSPDDSTVKMASPPPSGPPSATHTPFHQSPVEEKSEPQDFQEADSWGDTKRTPGVGKEDAAEETVKPGPEEGTLEKEEKVPPPRSPQAQEAPVNIDEGLTGCTIQLLPAQDKAIVFEIMEAGEPTGPILGAEALPGGLRTLPQEPGKPQKDEVLRYPDRSLSPEDAESLSVLSVPSPDTANQEPTPKSPCGLTEQYLHKDRWPEVSPEDTQSLSLSEESPSKETSLDVSSKQLSPESLGTLQFGELNLGKEEMGHLMQAEDTSHHTAPMSVPEPHAATASPPTDGTTRYSAQTDITDDSLDRKSPASSFSHSTPSGNGKYLPGAITSPDEHILTPDSSFSKSPESLPGPALEDIAIKWEDKVPGLKDRTSEQKKEPEPKDEVLQQKDKTLEHKEVVEPKDTAIYQKDEALHVKNEAVKQQDKALEQKGRDLEQKDTALEQKDKALEPKDKDLEEKDKALEQKDKIPEEKDKALEQKDTALEQKDKALEPKDKDLEQKDRVLEQKEKIPEEKDKALDQKVRSVEHKAPEDTVAEMKDRDLEQTDKAPEQKHQAQEQKDKVSEKKDQALEQKYWALGQKDEALEQNIQALEENHQTQEQESLVQEDKTRKPKMLEEKSPEKVKAMEEKLEALLEKTKALGLEESLVQEGRAREQEEKYWRGQDVVQEWQETSPTREEPAGEQKELAPAWEDTSPEQDNRYWRGREDVALEQDTYWRELSCERKVWFPHELDGQGARPHYTEERESTFLDEGPDDEQEVPLREHATRSPWASDFKDFQESSPQKGLEVERWLAESPVGLPPEEEDKLTRSPFEIISPPASPPEMVGQRVPSAPGQESPIPDPKLMPHMKNEPTTPSWLADIPPWVPKDRPLPPAPLSPAPGPPTPAPESHTPAPFSWGTAEYDSVVAAVQEGAAELEGGPYSPLGKDYRKAEGEREEEGRAEAPDKSSHSSKVPEASKSHATTEPEQTEPEQREPTPYPDERSFQYADIYEQMMLTGLGPACPTREPPLGAAGDWPPCLSTKEAAAGRNTSAEKELSSPISPKSLQSDTPTFSYAALAGPTVPPRPEPGPSMEPSLTPPAVPPRAPILSKGPSPPLNGNILSCSPDRRSPSPKESGRSHWDDSTSDSELEKGAREQPEKEAQSPSPPHPIPMGSPTLWPETEAHVSPPLDSHLGPARPSLDFPASAFGFSSLQPAPPQLPSPAEPRSAPCGSLAFSGDRALALAPGPPTRTRHDEYLEVTKAPSLDSSLPQLPSPSSPGAPLLSNLPRPASPALSEGSSSEATTPVISSVAERFSPSLEAAEQESGELDPGMEPAAHSLWDLTPLSPAPPASLDLALAPAPSLPGDMGDGILPCHLECSEAATEKPSPFQVPSEDCAANGPTETSPNPPGPAPAKAENEEAAACPAWERGAWPEGAERSSRPDTLLSPEQPVCPAGGSGGPPSSASPEVEAGPQGCATEPRPHRGELSPSFLNPPLPPSIDDRDLSTEEVRLVGRGGRRRVGGPGTTGGPCPVTDETPPTSASDSGSSQSDSDVPPETEECPSITAEAALDSDEDGDFLPVDKAGGVSGTHHPRPGHDPPPLPQPDPRPSPPRPDVCMADPEGLSSESGRVERLREKEKVQGRVGRRAPGKAKPASPARRLDLRGKRSPTPGKGPADRASRAPPRPRSTTSQVTPAEEKDGHSPMSKGLVNGLKAGPMALSSKGSSGAPVYVDLAYIPNHCSGKTADLDFFRRVRASYYVVSGNDPANGEPSRAVLDALLEGKAQWGENLQVTLIPTHDTEVTREWYQQTHEQQQQLNVLVLASSSTVVMQDESFPACKIEF

SEQ ID NO: 127758 - protein, 3041 aa, Artificial Sequence
  derived and/or modified sequence
METEAEPARPHGVAMETTPGLGLRSPGAPLAQNPAELLCEAGAAVAAARWDLQKHSLLIVIGDIGTESQLRAVRAHLEQGILSWNIDLSSFDLNQQLRLFITRHLAHFSSEVKGQRTLCHQSEILETIILVNPSADSISSEVHHLLSSSSAYKLLILSGQSLEPGGDLILQSGTYSYENFAQVLHNPEISQLLSNRDPGIQAFLTVSCLGEGDWSHLGLSSSQETLHLRLNPEPTLPTMDGVAEFSEYVSETVDVPSPFDLLEPPTSGGFLKLSKPCCYIFPGGRGDSALFAVNGFNILVDGGSDRKSCFWKLVRHLDRIDSVLLTHIGADNLPGINGLLQRKVAELEEEQSQGSSSYSDWVKNLISPELGVVFFNVPEKLRLPDASRKAKRSIEEACLTLQHLNRLGIQAEPLYRVVSNTIEPLTLFHKMGVGRLDMYVLNPVKDSKEMQFLMQKWAGNSKAKTGIVLPNGKEAEISVPYLTSITALVVWLPANPTEKIVRVLFPGNAPQNKILEGLEKLRHLDFLRYPVATQKDLASGAVPTNLKPSKIKQRADSKESLKATTKTAVSKLAKREEVVEEGAKEARSELAKELAKTEKKAKESSEKPPEKPAKPERVKTESSEALKAEKRKLIKDKVGKKHLKEKISKLEEKKDKEKKEIKKERKELKKDEGRKEEKKDAKKEEKRKDTKPELKKISKPDLKPFTPEVRKTLYKAKVPGRVKIDRSRAIRGEKELSSEPQTPPAQKGTVPLPTISGHRELVLSSPEDLTQDFEEMKREERALLAEQRDTGLGDKPFPLDTAEEGPPSTAIQGTPPSVPGLGQEEHVMKEKELVPEVPEEQGSKDRGLDSGAETEEEKDTWEEKKQREAERLPDRTEAREESEPEVKEDVIEKAELEEMEEVHPSDEEEEDATKAEGFYQKHMQEPLKVTPRSREAFGGRELGLQGKAPEKETSLFLSSLTTPAGATEHVSYIQDETIPGYSETEQTISDEEIHDEPEERPAPPRFHTSTYDLPGPEGAGPFEASQPADSAVPATSGKVYGTPETELTYPTNIVAAPLAEEEHVSSATSITECDKLSSFATSVAEDQSVASLTAPQTEETGKSSLLLDTVTSIPSSRTEATQGLDYVPSAGTISPTSSLEEDKGFKSPPCEDFSVTGESEKRGEIIGKGLSGERAVEEEEEETANVEMSEKLCSQYGTPVFSAPGHALHPGEPALGEAEERCLSPDDSTVKMASPPPSGPPSATHTPFHQSPVEEKSEPQDFQEADSWGDTKRTPGVGKEDAAEETVKPGPEEGTLEKEEKVPPPRSPQAQEAPVNIDEGLTGCTIQLLPAQDKAIVFEIMEAGEPTGPILGAEALPGGLRTLPQEPGKPQKDEVLRYPDRSLSPEDAESLSVLSVPSPDTANQEPTPKSPCGLTEQYLHKDRWPEVSPEDTQSLSLSEESPSKETSLDVSSKQLSPESLGTLQFGELNLGKEEMGHLMQAEDTSHHTAPMSVPEPHAATASPPTDGTTRYSAQTDITDDSLDRKSPASSFSHSTPSGNGKYLPGAITSPDEHILTPDSSFSKSPESLPGPALEDIAIKWEDKVPGLKDRTSEQKKEPEPKDEVLQQKDKTLEHKEVVEPKDTAIYQKDEALHVKNEAVKQQDKALEQKGRDLEQKDTALEQKDKALEPKDKDLEEKDKALEQKDKIPEEKDKALEQKDTALEQKDKALEPKDKDLEQKDRVLEQKEKIPEEKDKALDQKVRSVEHKAPEDTVAEMKDRDLEQTDKAPEQKHQAQEQKDKVSEKKDQALEQKYWALGQKDEALEQNIQALEENHQTQEQESLVQEDKTRKPKMLEEKSPEKVKAMEEKLEALLEKTKALGLEESLVQEGRAREQEEKYWRGQDVVQEWQETSPTREEPAGEQKELAPAWEDTSPEQDNRYWRGREDVALEQDTYWRELSCERKVWFPHELDGQGARPHYTEERESTFLDEGPDDEQEVPLREHATRSPWASDFKDFQESSPQKGLEVERWLAESPVGLPPEEEDKLTRSPFEIISPPASPPEMVGQRVPSAPGQESPIPDPKLMPHMKNEPTTPSWLADIPPWVPKDRPLPPAPLSPAPGPPTPAPESHTPAPFSWGTAEYDSVVAAVQEGAAELEGGPYSPLGKDYRKAEGEREEEGRAEAPDKSSHSSKVPEASKSHATTEPEQTEPEQREPTPYPDERSFQYADIYEQMMLTGLGPACPTREPPLGAAGDWPPCLSTKEAAAGRNTSAEKELSSPISPKSLQSDTPTFSYAALAGPTVPPRPEPGPSMEPSLTPPAVPPRAPILSKGPSPPLNGNILSCSPDRRSPSPKESGRSHWDDSTSDSELEKGAREQPEKEAQSPSPPHPIPMGSPTLWPETEAHVSPPLDSHLGPARPSLDFPASAFGFSSLQPAPPQLPSPAEPRSAPCGSLAFSGDRALALAPGPPTRTRHDEYLEVTKAPSLDSSLPQLPSPSSPGAPLLSNLPRPASPALSEGSSSEATTPVISSVAERFSPSLEAAEQESGELDPGMEPAAHSLWDLTPLSPAPPASLDLALAPAPSLPGDMGDGILPCHLECSEAATEKPSPFQVPSEDCAANGPTETSPNPPGPAPAKAENEEAAACPAWERGAWPEGAERSSRPDTLLSPEQPVCPAGGSGGPPSSASPEVEAGPQGCATEPRPHRGELSPSFLNPPLPPSIDDRDLSTEEVRLVGRGGRRRVGGPGTTGGPCPVTDETPPTSASDSGSSQSDSDVPPETEECPSITAEAALDSDEDGDFLPVDKAGGVSGTHHPRPGHDPPPLPQPDPRPSPPRPDVCMADPEGLSSESGRVERLREKEKVQGRVGRRAPGKAKPASPARRLDLRGKRSPTPGKGPADRASRAPPRPRSTTSQVTPAEEKDGHSPMSKGLVNGLKAGPMALSSKGSSGAPVYVDLAYIPNHCSGKTADLDFFRRVRASYYVVSGNDPANGEPSRAVLDALLEGKAQWGENLQVTLIPTHDTEVTREWYQQTHEQQQQLNVLVLASSSTVVMQDESFPACKIEF

SEQ ID NO: 127759 - protein, 2805 aa, Artificial Sequence
  derived and/or modified sequence
MDGVAEFSEYVSETVDVPSPFDLLEPPTSGGFLKLSKPCCYIFPGGRGDSALFAVNGFNILVDGGSDRKSCFWKLVRHLDRIDSVLLTHIGADNLPGINGLLQRKVAELEEEQSQGSSSYSDWVKNLISPELGVVFFNVPEKLRLPDASRKAKRSIEEACLTLQHLNRLGIQAEPLYRVVSNTIEPLTLFHKMGVGRLDMYVLNPVKDSKEMQFLMQKWAGNSKAKTGIVLPNGKEAEISVPYLTSITALVVWLPANPTEKIVRVLFPGNAPQNKILEGLEKLRHLDFLRYPVATQKDLASGAVPTNLKPSKIKQRADSKESLKATTKTAVSKLAKREEVVEEGAKEARSELAKELAKTEKKAKESSEKPPEKPAKPERVKTESSEALKAEKRKLIKDKVGKKHLKEKISKLEEKKDKEKKEIKKERKELKKDEGRKEEKKDAKKEEKRKDTKPELKKISKPDLKPFTPEVRKTLYKAKVPGRVKIDRSRAIRGEKELSSEPQTPPAQKGTVPLPTISGHRELVLSSPEDLTQDFEEMKREERALLAEQRDTGLGDKPFPLDTAEEGPPSTAIQGTPPSVPGLGQEEHVMKEKELVPEVPEEQGSKDRGLDSGAETEEEKDTWEEKKQREAERLPDRTEAREESEPEVKEDVIEKAELEEMEEVHPSDEEEEDATKAEGFYQKHMQEPLKVTPRSREAFGGRELGLQGKAPEKETSLFLSSLTTPAGATEHVSYIQDETIPGYSETEQTISDEEIHDEPEERPAPPRFHTSTYDLPGPEGAGPFEASQPADSAVPATSGKVYGTPETELTYPTNIVAAPLAEEEHVSSATSITECDKLSSFATSVAEDQSVASLTAPQTEETGKSSLLLDTVTSIPSSRTEATQGLDYVPSAGTISPTSSLEEDKGFKSPPCEDFSVTGESEKRGEIIGKGLSGERAVEEEEEETANVEMSEKLCSQYGTPVFSAPGHALHPGEPALGEAEERCLSPDDSTVKMASPPPSGPPSATHTPFHQSPVEEKSEPQDFQEADSWGDTKRTPGVGKEDAAEETVKPGPEEGTLEKEEKVPPPRSPQAQEAPVNIDEGLTGCTIQLLPAQDKAIVFEIMEAGEPTGPILGAEALPGGLRTLPQEPGKPQKDEVLRYPDRSLSPEDAESLSVLSVPSPDTANQEPTPKSPCGLTEQYLHKDRWPEVSPEDTQSLSLSEESPSKETSLDVSSKQLSPESLGTLQFGELNLGKEEMGHLMQAEDTSHHTAPMSVPEPHAATASPPTDGTTRYSAQTDITDDSLDRKSPASSFSHSTPSGNGKYLPGAITSPDEHILTPDSSFSKSPESLPGPALEDIAIKWEDKVPGLKDRTSEQKKEPEPKDEVLQQKDKTLEHKEVVEPKDTAIYQKDEALHVKNEAVKQQDKALEQKGRDLEQKDTALEQKDKALEPKDKDLEEKDKALEQKDKIPEEKDKALEQKDTALEQKDKALEPKDKDLEQKDRVLEQKEKIPEEKDKALDQKVRSVEHKAPEDTVAEMKDRDLEQTDKAPEQKHQAQEQKDKVSEKKDQALEQKYWALGQKDEALEQNIQALEENHQTQEQESLVQEDKTRKPKMLEEKSPEKVKAMEEKLEALLEKTKALGLEESLVQEGRAREQEEKYWRGQDVVQEWQETSPTREEPAGEQKELAPAWEDTSPEQDNRYWRGREDVALEQDTYWRELSCERKVWFPHELDGQGARPHYTEERESTFLDEGPDDEQEVPLREHATRSPWASDFKDFQESSPQKGLEVERWLAESPVGLPPEEEDKLTRSPFEIISPPASPPEMVGQRVPSAPGQESPIPDPKLMPHMKNEPTTPSWLADIPPWVPKDRPLPPAPLSPAPGPPTPAPESHTPAPFSWGTAEYDSVVAAVQEGAAELEGGPYSPLGKDYRKAEGEREEEGRAEAPDKSSHSSKVPEASKSHATTEPEQTEPEQREPTPYPDERSFQYADIYEQMMLTGLGPACPTREPPLGAAGDWPPCLSTKEAAAGRNTSAEKELSSPISPKSLQSDTPTFSYAALAGPTVPPRPEPGPSMEPSLTPPAVPPRAPILSKGPSPPLNGNILSCSPDRRSPSPKESGRSHWDDSTSDSELEKGAREQPEKEAQSPSPPHPIPMGSPTLWPETEAHVSPPLDSHLGPARPSLDFPASAFGFSSLQPAPPQLPSPAEPRSAPCGSLAFSGDRALALAPGPPTRTRHDEYLEVTKAPSLDSSLPQLPSPSSPGAPLLSNLPRPASPALSEGSSSEATTPVISSVAERFSPSLEAAEQESGELDPGMEPAAHSLWDLTPLSPAPPASLDLALAPAPSLPGDMGDGILPCHLECSEAATEKPSPFQVPSEDCAANGPTETSPNPPGPAPAKAENEEAAACPAWERGAWPEGAERSSRPDTLLSPEQPVCPAGGSGGPPSSASPEVEAGPQGCATEPRPHRGELSPSFLNPPLPPSIDDRDLSTEEVRLVGRGGRRRVGGPGTTGGPCPVTDETPPTSASDSGSSQSDSDVPPETEECPSITAEAALDSDEDGDFLPVDKAGGVSGTHHPRPGHDPPPLPQPDPRPSPPRPDVCMADPEGLSSESGRVERLREKEKVQGRVGRRAPGKAKPASPARRLDLRGKRSPTPGKGPADRASRAPPRPRSTTSQVTPAEEKDGHSPMSKGLVNGLKAGPMALSSKGSSGAPVYVDLAYIPNHCSGKTADLDFFRRVRASYYVVSGNDPANGEPSRAVLDALLEGKAQWGENLQVSVTLIPTHDTEVTREWYQQTHEQQQQLNVLVLASSSTVVMQDESFPACKIEF

SEQ ID NO: 127760 - protein, 627 aa, Artificial Sequence
  derived and/or modified sequence
MDGVAEFSEYVSETVDVPSPFDLLEPPTSGGFLKLSKPCCYIFPGGRGDSALFAVNGFNILVDGGSDRKSCFWKLVRHLDRIDSVLLTHIGADNLPGINGLLQRKVAELEEEQSQGSSSYSDWVKNLISPELGVVFFNVPEKLRLPDASRKAKRSIEEACLTLQHLNRLGIQAEPLYRVVSNTIEPLTLFHKMGVGRLDMYVLNPVKDSKEMQFLMQKWAGNSKAKTGIVLPNGKEAEISVPYLTSITALVVWLPANPTEKIVRVLFPGNAPQNKILEGLEKLRHLDFLRYPVATQKDLASGAVPTNLKPSKIKQRADSKESLKATTKTAVSKLAKREEVVEEGAKEARSELAKELAKTEKKAKESSEKPPEKPAKPERVKTESSEALKAEKRKLIKDKVGKKHLKEKISKLEEKKDKEKKEIKKERKELKKDEGRKEEKKDAKKEEKRKDTKPELKKISKPDLKPFTPEVRKTLYKAKVPGRVKIDRSRAIRGEKELSSEPQTPPAQKGTVPLPTISGHRELVLSSPEDLTQDFEEMKREERALLAEQRDTGLGDKPFPLDTAEEGPPSTAIQGTPPSVPGLGQEEHVMKEKELVPEVPEEQGSKDRGLDSGAETEEKKKKKKKKK

SEQ ID NO: 127761 - DNA, 1048 bp, Artificial Sequence
  derived and/or modified sequence
acacgcggcttcctccaggcggatggtcaccggacccaaagtaccagatctgtctgtgcttcggtgaggaggacccgggccccacacagcaccccaaggagcagctcatcatggcggacgtgcaggtgcagcttcggcctgggagctcgtcctgcactctaagtgcctcaaccgagcgcccagatgggtcctcaacccctggcaaccccgatggcatcactcaccttcaatgcagctgcctccatcctaagcgagccgcttcctcttcttgtacccgctgaaggcagcccccaacaggggggctccctactcccacccaaccctgcccacactaagcccatagacttggggcctcccccggcacatcacccaggtctgccggacggcagaggtggatcgcggccttccactcctctgtcacggggccccggaactcgagagtaggccacaccgccccccagctgggcatggggcttcggcaggaaactgaacttgatcttgaggccccagaaaggcagcaactggagcagaagcaagacttcatctcttgctgacagcccaatttgtcaatagcgctttcctcagagccagccttaacctgctgttgagtccattaaaacgtttgcttaaagtttttaccaataattagatcatcagggttgtttagtgtgggatcaagccataacaaaactgcctagcctctcaggggcctagaatttacagaaccttcctcctccctgcagctagtctctcttctttattctgggggctgggaaggatcccaaaacagggaacttggccgaaccctgggctttggatgctaaccactgaagtaccagcacctgtaggatgctgtctttgaagaaactgaggcggacctccaaatgcagccctaaggcagaggtcaacgtggaagaccagcccttctccaagccccactggtctttgcaagctgtacgttgtaggcaatctgagaactggaaagggggactacaaccagaaagttggttaccctgccatgggaataaagtagctgttttccacccca

SEQ ID NO: 127762 - DNA, 153 bp, Artificial Sequence
  derived and/or modified sequence
aagactggcctgaccggaagtccctcgagtttatgggacctgctcagggagatgtttgtcgtgtgtagtaaggagcagttgcagagcggtgggaagtactcccaccaggtctgggcgcctttttccccacttgcctcaggggccgcattctag

SEQ ID NO: 127763 - DNA, 8412 bp, Artificial Sequence
  derived and/or modified sequence
atggacggcgtggcagagttctctgaatacgttagcgaaactgtggacgtaccttcacccttcgatctgctcgagcctcccacaagcgggggatttctgaaactttctaagccatgctgctatattttccctggaggacgtggggacagtgccctttttgcagtgaatggcttcaatatattagtggatggaggctcggaccgcaaatcgtgtttctggaaactggtaaggcacttagatcggattgactccgtcctgctgactcatatcggagccgataacctgcccggaataaatgggctgctgcaaaggaaagtggcagagctggaagaggagcaatctcaggggagctcttcctacagcgattgggtgaaaaacctgatcagccccgaacttggggtagtattcttcaacgtgcccgagaagctccggctccctgatgcctctcggaaggctaagagatcgatcgaggaagcatgcctgacactccagcaccttaacaggttgggcatccaggccgagccattgtacagggtggtgtccaataccatcgagcccttgaccctatttcacaagatgggagtcggccggctagatatgtatgtgctgaaccctgtcaaggacagtaaggaaatgcagtttttaatgcagaaatgggccgggaattccaaggccaagactggaatcgtccttccaaacggcaaggaagctgaaattagcgtcccctatcttacaagtattactgccctggtcgtctggctgcctgcaaacccaacagagaagatagtacgtgtgctgttccctggaaacgcccctcagaacaagatccttgagggactcgaaaagctgcggcatctggactttctgagataccccgtggcgactcagaaagatctcgccagtggggctgtccccaccaatttgaaaccttccaagataaaacagcgggccgactcaaaagagtccctgaaagcaacgaccaaaacggcagtctccaagctggcaaaaagagaggaggtggtggaggagggcgctaaggaggccaggtctgaactggccaaagagctggctaaaacagagaagaaagccaaagaatcttctgagaaaccaccggagaagccagcaaagcctgaacgcgtcaagaccgagtcgtcagaggccctgaaagccgagaagcggaagctcataaaggacaaggttgggaaaaagcacttgaaggaaaagatcagcaagctggaggaaaagaaagataaagagaaaaaggagatcaagaaagagaggaaggagctgaagaaagacgagggacggaaggaggaaaaaaaggatgctaagaaagaagagaaacgcaaagatacaaagcccgagcttaagaagatcagcaaacctgatctaaagccattcacacctgaggtaagaaagactctttacaaggctaaagtcccgggcagggtgaaaatcgacaggagcagggccattcgtggggagaaggagctgagttccgagccccagactcctccagcccagaaagggaccgtccctctgccaacaatctcaggacacagagagctagtgctctccagtcccgaggatctcacccaggatttcgaggagatgaagcgggaggagcgggcgctcctggccgagcagcgtgacactgggctcggcgacaaacctttcccacttgatacggcagaagaggggccccccagcaccgccattcagggaactcctccctcagttccaggacttggtcaagaagagcacgtcatgaaagaaaaagaactcgtccctgaagtgcctgaagagcaggggagtaaagaccgaggactagattcaggggccgaaacagaggaagaaaaggacacatgggaggaaaagaagcagcgggaggccgagaggctgcccgataggacagaagccagagaggagagcgagcctgaggtcaaggaagatgtaattgagaaggcagagctggaggaaatggaggaggtccacccatcagacgaggaggaagaggacgcaaccaaagcggaaggcttttatcagaaacacatgcaagaacctctcaaggtgacacccaggagcagggaggcattcggtggacgagagcttgggcttcaggggaaggcaccagagaaggagacttctctattcctctcgagcctcactactcctgcaggagccacagaacacgtatcatatatccaggacgagacaattccaggatatagtgagacggaacagaccataagcgatgaagagattcacgatgagcccgaggagaggccagcccctccacgctttcacactagcacatacgatctacccggcccagagggggctggcccctttgaggcaagtcaaccagccgatagtgccgtgccagccaccagcggtaaagtgtatggcacgcctgagaccgagctcacttacccgaccaacatagtcgctgctccactggccgaggaagagcacgtttcatcagccacttccatcactgagtgcgataagctcagctctttcgctacttccgtagccgaagaccagtcagtggccagtcttactgccccccagacagaagagactggcaagtcatcactgctccttgacacggtgacgagtattccatcttcacggactgaggctactcagggcctggattacgtccccagtgcaggcacgatcagtcctacatcctcactcgaggaagataaaggttttaagagtcccccctgcgaggatttctctgtgacaggcgaatccgagaaaagaggcgagattatagggaagggacttagtggagaacgtgccgtcgaagaggaggaggaagagaccgccaacgtggaaatgtcagagaagttatgttcacagtatgggaccccggttttttccgccccaggacatgctctgcaccccggcgaaccggcattgggtgaagcggaggagagatgtttgagcccggatgatagcacggtgaaaatggcatcaccacccccctccggcccaccctcagcaacacacaccccattccaccagtctccggtggaggaaaagtccgaaccgcaggactttcaggaggccgacagctggggggatacgaaaagaactcctggtgttggaaaagaagacgccgcggaagagaccgtcaagcctggccctgaagagggtacactagaaaaggaggaaaaggtgccacctccgcggagcccacaggcgcaggaggcccccgtgaacatcgacgaaggattgaccgggtgcactatccaactgttgccggcccaagacaaagcaatcgtgttcgaaattatggaggctggcgagcctacaggaccaattcttggcgcggaagctctgccggggggcctgcggactctgccccaggaacctggtaagccgcaaaaagacgaagtcctgcgatatcccgaccggtccttatcccccgaagacgccgagtccctgtctgtgctttccgtgccaagcccagacactgccaaccaggagccaaccccaaaatccccttgtggactgacagaacagtacttgcacaaggacagatggccagaggtcagtcctgaggatacacagagccttagcttgagcgaggagagtcctagcaaagagaccagcctagacgtaagcagcaaacagctctcaccagaaagtctaggcactctgcaattcggcgagctgaatctgggaaaggaggaaatgggtcacctcatgcaggccgaagacacgagtcaccacactgcgccaatgtctgtgccagagccccacgctgctacagctagccccccaaccgatggtaccacaaggtattctgcccagacagatatcaccgatgattccttggataggaagtcaccagccagcagtttctcccattccaccccatctggcaatgggaagtacctccccggagctatcaccagccctgacgagcacattttgactcctgactccagctttagcaagagcccggaatccttaccaggcccagcacttgaggacattgccatcaagtgggaggacaaggttcccggactaaaggatagaacctcggagcagaagaaggagcctgagcctaaagacgaagtgcttcaacagaaggacaagacccttgaacataaggaggtggtggaaccaaaagataccgctatctaccagaaggatgaagccctgcatgtaaagaatgaagctgtgaaacagcaagacaaagccctggaacagaaaggtagagatcttgagcagaaggataccgccctggaacaaaaagataaggcactggaacccaaggacaaggatctagaggagaaagacaaggcactcgagcagaaagacaagattccagaagagaaggacaaggccctggaacagaaagatacggcactcgagcagaaagataaagccctggaaccaaaagataaagacctggagcagaaagaccgtgtgttagaacagaaagaaaagatccctgaagagaaagataaggccctcgaccagaaggtaaggagtgtggagcataaggctcccgaggacactgttgccgagatgaaagatcgagacctggaacagaccgataaagcccctgagcagaagcaccaagcacaggaacagaaggataaagtctccgagaagaaggaccaagctcttgagcagaagtactgggcgctgggtcaaaaagatgaggcattggaacaaaacatccaggcattggaggaaaaccaccagacccaggaacaggagagcctggtccaggaggacaaaactagaaaacctaagatgctggaggagaaaagtcccgaaaaagtcaaagcaatggaggagaaactggaggccttattggagaaaaccaaggcactcggtttggaagagtccctcgtgcaggaggggagagccagggagcaagaggagaagtactggcgcggccaggatgtggtacaagaatggcaggaaacgagccctacacgagaagaacctgcaggcgagcagaaggaattggcccctgcctgggaggacacttctcccgaacaggataatcgttactggcggggacgagaagacgttgcactggagcaggacacctactggcgggaactgtcttgcgaaaggaaggtttggtttccgcatgagctggacggccaaggcgcccgcccacattacactgaggaacgagagtctacttttctggacgaagggcccgatgatgaacaagaagtcccactacgggagcatgcaacacggtcaccttgggcgagcgatttcaaggattttcaggaatcctccccacagaagggactggaggtggaacggtggttagctgagtcgcccgtggggctgccccctgaggaagaggataagctcactagaagcccttttgagataatttcccctcccgcatcgccccccgagatggtgggacaacgcgtgcctagcgcgcctggacaggagtccccaattccagatcctaaactgatgccccatatgaagaatgagccgacaacaccatcctggctggcggacatacccccctgggtaccaaaggaccggccactgccccctgcgcctctgagccccgcccctgggccccctaccccggcacccgaaagtcacacacccgcaccttttagttggggtacggcagagtacgactcagtggtggccgccgtgcaggagggggctgccgaattggaaggtggaccctattctcctctgggaaaggactacagaaaggctgaaggggagagggaggaagaaggtagggccgaggcacccgacaagtctagtcatagtagcaaggtcccagaggctagcaaatctcacgctactaccgaacccgaacagacggagcccgagcagagggaacccaccccttaccctgacgaacggtccttccaatatgcagacatatacgagcagatgatgctaacaggactgggacctgcctgtcctacaagggaaccacccctcggcgctgccggcgactggccgccctgcttgagcactaaagaggctgcggctggtcgcaacacaagcgccgagaaagagctctcctctcccatttcacctaaaagcctccagtcagacacacctacctttagttacgcagccctcgccgggccaaccgttccaccccggcctgaacctggccctagtatggagcccagccttacacctcccgctgtcccccccagggctcctatcctttctaaaggccctagtccaccacttaacggcaacatactttcttgttcaccagatcgacggagtccctcacctaaagaaagtggcagatcacattgggacgactccacatccgattctgaattggaaaaaggtgcaagagaacagcctgaaaaagaggcccagtctcccagcccaccacatccaatacccatgggcagcccgactttgtggcccgaaactgaggcacacgtgagccctccgttggactcccatctgggacccgcccgcccctccttggatttccctgctagcgccttcggcttctcctctttacagcccgcccctccccagttacctagtcctgccgagccccgctctgcgccctgcggttcattagcctttagcggggaccgggcattggcccttgcacccgggcctccaactcgtactcgccatgacgagtacctggaggtcaccaaggcaccctcccttgactcctctctgccccagctgccctctcctagctctcccggggctccactgctcagcaacctgcccagaccagctagccctgctctgtccgagggctctagctcagaggccactacccctgttatatcctcagtggccgagcggttctcccctagtcttgaggccgccgagcaggagagtggagagctcgatcccggtatggaacctgcggcccattccctgtgggacctcacacccctgtcacccgctccacccgccagtctggacctggcacttgccccagccccttccttacccggcgacatgggcgacgggattctaccgtgccatctggaatgctcggaagccgctacagagaagccatctcctttccaggtgccatccgaagactgcgctgccaatgggcctacagaaaccagccccaacccccccggcccagcccccgctaaggctgagaacgaggaggccgccgcctgtccagcgtgggagagaggggcatggcctgagggggcagagcgttcttcgaggccagacacactgctatcccctgagcagccagtgtgccctgccggcgggagtggcggccctccttcaagcgcctcacccgaggtagaggctggccctcagggttgcgcgaccgaacctcggcctcacaggggcgaactttcaccgagtttcctgaaccctccactgccaccctccatcgatgaccgagacctgagcaccgaagaggtccgactggtggggcgaggaggacgacgacgagtcggcgggccgggaacaaccgggggcccctgccccgtgaccgacgagacaccccctacttcggcgagtgatagcggttctagtcagtccgactctgatgttcctcccgagactgaggagtgtccttcaattacagccgaggcagctctagactcggacgaggacggtgattttttacctgtcgacaaagccgggggcgtcagtggcactcaccatcctcgccctgggcacgacccaccccccctgccccagccagatccccggccatctccaccgcgcccagatgtgtgcatggctgacccagagggtctgagctctgaaagtggtcgggtcgaacgactgagagagaaggaaaaagtccaaggccgggttggccggcgggcaccaggtaaggcaaaacccgcttccccggctcgcaggctggatcttcggggcaaacgcagccccactcccgggaaaggcccagccgatagggccagccgggcgcctccccggcccagatccactacgtctcaggtgaccccagctgaggagaaagacggacatagcccaatgtcgaaaggcctggtgaacgggttgaaggctggccccatggcgctctcctctaagggcagcagtggggcccctgtgtacgtcgatctggcttatattccaaaccattgcagcggcaagaccgccgatctggatttctttcgtcgagtccgcgctagttactatgtggtcagcggtaacgaccccgcaaacggcgagccctcaagggctgttttagacgccctgctggaagggaaggcccagtggggcgagaatctgcaagttacactgattccaactcacgacacagaagtcacaagagagtggtaccagcagactcacgaacagcagcagcagctcaatgttctagttttggcctccagttcgactgtggtcatgcaggatgaaagcttccctgcctgtaaaatcgaattttag

SEQ ID NO: 127764 - DNA, 9126 bp, Artificial Sequence
  derived and/or modified sequence
atggagacagaggcggagcctgctcgaccgcatggcgtggcgatggaaacgacgccaggtctgggtcttcgctcacccggtgcccccctggcccagaatcctgcagaactgctgtgtgaagcgggcgccgcagtggctgctgctagatgggatctccagaaacacagtctcttgattgtgatcggtgacataggcaccgagtcccagttacgggccgttcgggctcacctggagcaaggaatactcagctggaacatcgatttgtcttccttcgacctcaaccagcagctgagactgttcatcactcggcatttggctcacttcagctcagaggtgaaggggcagaggacgctatgtcaccagagtgaaattctagagaccatcatcctggtaaacccatctgctgattcaatttcctccgaagtgcatcatctcctttcctcttccagcgcctataagctcctcattctttctggtcaaagccttgagccaggaggagacctgatcctgcagtccggtacctactcctacgaaaactttgcacaggtgctgcataaccctgaaataagtcaactgctaagcaaccgtgaccctgggatacaggcctttctgacagtgtcatgcctcggcgagggcgattggagccacctgggtctctcctcgagccaggaaaccttgcacttaagactcaaccccgagccaacacttcccaccatggacggagtggccgagttctctgagtatgtgtctgaaacagtggacgtgcccagtcctttcgatttactagaaccccctacatcaggtggattcttaaagctaagcaaaccttgctgctacattttcccaggggggagaggggactctgccttgtttgccgtgaacggctttaacattctcgtggatgggggctccgatcggaagtcttgtttttggaaacttgtcaggcaccttgacaggattgactctgtcttactgactcacattggagccgacaaccttcccggcattaacggattgctgcaacgcaaggtggcagagttggaggaagagcagtcgcagggcagtagctcctacagtgattgggtgaaaaatctcataagtccggagcttggcgtcgtttttttcaacgtgcccgagaagcttcgactgccagacgcttcaagaaaagccaaacgcagtattgaagaagcctgcttaaccctgcagcaccttaaccggttgggcatccaggccgagcccttgtacagggttgtatctaatacaattgaaccactaacattgttccacaaaatgggggtgggtaggctcgacatgtacgttttgaacccagttaaggattccaaggaaatgcagttcttgatgcaaaagtgggccggaaatagcaaagccaagacaggaatcgtacttcccaacggcaaggaagcagagatttcagtgccctacctcacatccattacagccctcgtggtctggctgccggcaaatccaactgaaaaaattgtgagggtactgttcccagggaatgcaccccagaataaaatattggagggcttggaaaaattaaggcacctggacttccttaggtatcccgtggctacccagaaggaccttgcctccggcgctgttcccacaaacctcaagccgtctaagattaaacaaagagcagatagcaaagaatcccttaaagcaaccaccaagacagccgtttccaagctggcgaaacgcgaagaggtggtggaggaaggtgccaaggaggctagaagcgaactggcaaaggaacttgctaagaccgaaaaaaaggcaaaggagtcctcagagaagccccctgagaagcccgctaagcccgaaagggtcaagaccgaatcctctgaggcgctcaaggctgaaaaacgaaagctgatcaaggacaaagtcggcaagaaacatctcaaggaaaagattagcaagctggaagaaaaaaaagataaggagaagaaagagatcaagaaggagcgcaaggaattgaagaaagatgaaggcaggaaagaagagaagaaggatgctaaaaaggaggagaagaggaaagacaccaaacctgaactaaaaaagatcagcaagccggacctaaagcctttcacccccgaggtgcgcaaaaccttgtacaaagcaaaggttcccggccgagtgaagattgatagatcacgcgccatcaggggggaaaaagaactgagtagtgagccccagacccctccagctcagaaaggcaccgtcccattgccgaccatcagtggccaccgcgaactcgtcctgtcttctcccgaagacctcacccaggacttcgaggaaatgaagcgagaggaacgggctctcctggctgaacagcgggatacaggcctgggcgataagcccttcccactggatacagcagaagagggccctccaagtaccgccattcaggggacgccaccatccgttccaggattgggccaggaggagcacgtaatgaaggagaaagagctcgtgccagaggtgcccgaagagcagggtagcaaggacaggggactggactccggtgccgaaaccgaggaggaaaaagatacttgggaggagaagaagcagagagaggccgagaggcttccggatcggaccgaggctcgcgaagaaagcgaacccgaggtgaaggaggacgtgatcgaaaaggccgaactggaggagatggaagaagtccacccatccgacgaagaggaggaggacgcaaccaaagcggaggggttttatcagaagcatatgcaggagccactgaaggtcacacccaggtccagggaagcatttgggggacgagagctgggcttgcagggtaaggccccggagaaagagacttctctgttcctcagctccctgacaacccccgccggcgccaccgagcacgtgagctacatccaggacgagacaattcccgggtactcagagacggagcagacgattagcgatgaggagattcatgatgagccggaggagcgtccagctccccctagattccacactagtacctatgatctgccaggtccagagggggccggtcccttcgaggcgagccaacccgccgatagtgcggttccggccaccagcggaaaggtgtacgggaccccagagacggagctcacttaccctacaaacatcgttgcagccccactggcggaagaggaacatgttagcagcgcgacttccattactgaatgtgataaactcagctcgttcgcaacttcggttgctgaggaccagtcggtggcaagtcttactgcaccgcagaccgaagagacgggtaagtctagcctgctattggatacagtcacgagcatcccgagcagtcggacggaggccactcaaggactggattacgtaccaagtgccggtacaatcagcccaaccagcagcctcgaggaggacaagggctttaagtccccaccctgcgaggacttctctgtcacgggggagtccgaaaagaggggggagatcattggcaagggcctctccggagaacgcgccgtggaggaggaggaagaagagacagctaacgttgagatgagcgaaaagctctgctctcaatacggaacccctgtgttcagcgcccccggccatgccctgcatccaggagagcccgccctcggcgaagcggaagaacgatgcctgtccccagacgattcgacagtcaagatggcatctcctcccccctccggccccccttctgccacgcacaccccttttcatcagtcacccgttgaagagaaatccgaaccccaagatttccaggaagccgactcatggggtgatacgaagcggaccccaggagtcggcaaggaggacgccgcagaggagaccgttaaaccaggacccgaggaaggtaccctggagaaagaagagaaagtgcccccgccaagatcaccccaggcccaggaggctccggtcaacatagacgagggactgacgggctgtacaatacagctcctgcccgcgcaggacaaagccattgtgtttgaaattatggaggcaggtgaacctactgggccaattctgggagcagaggccctacccggggggttgagaacactgccccaggagccaggcaagccccagaaagacgaggtactgcgctacccagatcgaagcttatctcccgaagacgcggagagcctttcggtgctgtcagtgccaagtccggatacagcaaaccaggaaccaacacctaagtctccatgtggactgacagagcagtatttacacaaagaccggtggcctgaggtgtcgcctgaagacacacagtcactgtctctgagcgaggagagcccgtctaaagagaccagccttgacgtaagtagtaaacagctgtctccagagtccctgggaaccttacagttcggagaactgaacctgggcaaggaggagatgggccatctgatgcaggccgaagacacctcccatcatactgccccaatgtcagtgccagaaccacatgccgccaccgcatcccccccaaccgacggaacaactagatactctgctcagacagacatcacggatgactctctggatcgaaagtcacctgcctcctccttttcccacagcacgccaagtggtaacggcaagtatcttcctggggctatcactagcccagatgaacatattctgactcctgattcctccttttcgaaaagtcctgagtccctacccgggcccgctttagaggatatcgccatcaaatgggaagataaagtgcccgggctgaaggacaggacctcagagcagaagaaggagcctgagcccaaagacgaggtgctgcagcaaaaagataaaacacttgagcataaggaagtagttgagcccaaagacaccgcgatctatcaaaaagacgaggccttgcacgtcaagaacgaggccgtgaaacagcaagataaagccctcgagcagaaggggagggacttagaacaaaaggataccgccctggaacagaaagataaggccctcgagcccaaggataaggacctggaagaaaaggataaagccctcgaacagaaagacaaaatcccagaggagaaggacaaggcccttgaacaaaaagatacagcgctggaacagaaggacaaagcccttgagcccaaagataaagatctcgagcagaaagatagagtactggagcagaaagaaaaaatccccgaggaaaaagataaggcattggaccagaaagtgcgctcagtcgaacataaggcaccagaggataccgtggcggaaatgaaagaccgggaccttgagcaaaccgacaaggcaccagagcaaaaacaccaggcacaggagcagaaggacaaggttagcgaaaagaaagatcaagcacttgaacagaagtattgggccctgggacagaaggatgaggcccttgaacaaaatattcaggcgctggaggagaaccatcagacgcaggagcaagaatctctagtgcaagaagacaagacgaggaagcctaagatgctggaggagaaaagccctgaaaaggtcaaggctatggaggaaaaattagaggccctcctggaaaagactaaggctttaggcctcgaggagagtcttgtccaggagggccgggcaagggagcaggaagagaagtactggcggggtcaggacgttgtccaagaatggcaggaaacttcacctactcgcgaagaaccagcaggtgagcagaaagagctcgcaccagcctgggaggatacgtctcccgaacaagacaatcgttattggagaggccgggaggacgtcgccttggaacaggacacatattggagggagctcagctgtgaaagaaaagtgtggttcccccacgagcttgatggacagggagctcggccccattacacagaggaaagagagagcacttttttggatgagggccctgatgacgagcaggaagttcctctcagagagcacgccacgcgcagcccctgggcttctgatttcaaggatttccaggagagcagcccacagaaagggctcgaggtggaacggtggctggctgaatcccccgttggcttgccccctgaggaagaagataagcttacgaggagtccttttgaaattatcagtccccccgcctcccctcccgagatggtgggccaacgggtgccctctgccccaggccaggagtctcccataccagacccaaaactgatgccacatatgaaaaacgagccaaccactccttcttggctggccgatataccgccatgggtacctaaagaccgccctcttccccccgcccctctaagcccggctccaggcccccctacacccgcccctgagtcccatacccctgcgccatttagttggggcaccgccgagtacgactcagtggttgcagctgtacaggagggagccgccgaactggagggcgggccttattcccctctcgggaaagactacagaaaggccgagggggaaagagaggaagaaggccgtgctgaagcccctgacaaatcctcccacagcagcaaggtgccggaagccagtaagtcacatgccaccaccgaaccagaacaaactgagcctgagcaacgggagccgactccttaccccgacgaacgatcatttcagtatgcggatatttacgaacagatgatgctaacagggctgggcccagcctgtcctaccagggaaccgcccctcggcgccgccggcgactggcccccatgcctctctacaaaggaggccgctgcaggccgcaacactagtgctgagaaagaactgagctcccctatttcccctaaaagcctgcaaagtgacactccaacgtttagttacgcagcactggctggaccaactgtgccccctagacccgagccaggaccctctatggaaccctcactgacaccacccgctgttccccctagggctcctatcctctctaaaggccccagccctcccttgaacggaaatattctcagttgtagtccagatagaagatccccctcaccgaaagaatcgggaagatctcattgggacgactcaacttctgacagcgaactggagaagggagcccgtgagcagcccgagaaagaggctcaatctccttctccaccacaccctatccctatgggcagccctactctgtggccagagacagaggcacatgtgtctccccctctagattctcatcttggacctgccaggcccagcttagatttccctgcctccgcttttgggttctctagtctgcaacctgcccctcctcagttacctagccccgctgagcctaggagtgctccctgcggcagccttgctttttccggtgatcgggccttggcgctggcaccaggaccccctacccggacacgccacgacgagtacctcgaagttacaaaagcaccctctctggatagcagcctcccgcagctcccttccccttcttcacccggagctccactgctttccaatctcccacgccctgctagcccggctctctcagagggcagcagctccgaggccacaacacctgtcatatcttctgtcgccgaaaggttctcgccaagtctggaagctgcagaacaggaatccggagaactggatcccggtatggagccagcagctcattctttatgggatctaacacctctcagcccggccccgcccgcatcccttgatctcgccctggcccctgccccctctttgcccggggacatgggcgacggtatcttaccttgccatctggagtgctccgaggcagctacagagaagccatcccccttccaggttccaagtgaggattgtgctgccaatgggcccaccgagacctccccaaaccctcccgggcctgccccagccaaggccgagaacgaagaagctgccgcgtgccctgcatgggaaaggggagcttggccagaaggcgccgagcggagctcccgtcctgataccctcctcagcccggagcagccagtatgccctgcaggaggatctggggggccaccctcgtcagccagccccgaggtggaagccggaccccaaggttgtgcaaccgaacccagacctcaccgcggagagctgtccccaagctttctcaaccctccactgcccccctcaatcgatgatagggatctctctacagaggaagtgcggctcgtgggtagaggcgggcgcagaagggtgggcggtcccggaactaccgggggcccttgtccagttaccgacgagacacccccgacctcagccagcgattccggctcctcccagtcagacagcgatgtccctcctgaaacagaggagtgtccctccattacagctgaagctgccctagactcagatgaagacggcgactttctcccagttgataaagcagggggagtgagcgggactcaccatccgcgcccaggtcatgatccaccaccccttccccagcccgacccaaggccatcaccccctaggccagatgtgtgtatggcagaccccgaggggctatcttccgagtctggccgcgttgaaaggctcagagagaaagagaaagtgcagggacgcgttggccgcagagccccaggtaaagcaaagccagccagcccagccaggaggcttgatttgcgcggtaagagaagccccacacccggaaagggtccagctgatcgcgcgagtcgcgcacccccacgcccacgttctaccacctcccaagtgacaccggccgaagagaaggatggacactcaccaatgtccaagggcctggtgaacgggttgaaggccgggccaatggcactgagctcaaaaggatcctcaggtgctcctgtatatgtcgacctagcttatatccctaaccactgtagcggcaagacagctgacttggattttttcaggcgtgtgcgggcatcatactacgttgtaagcggcaacgatccagcaaacggcgagcctagccgtgcggttttagacgcccttctggaaggcaaggcacagtggggcgagaatctgcaagtaacactcattcctacgcatgacaccgaagtgacccgagaatggtaccaacaaacgcatgagcaacagcaacaacttaatgtgctcgtgcttgcaagtagctctacagttgtcatgcaggacgaatcttttccagcatgtaagatcgagttttag

SEQ ID NO: 127765 - DNA, 8418 bp, Artificial Sequence
  derived and/or modified sequence
atggacggcgtcgccgaattctctgaatatgttagtgaaacggtcgacgttccaagtcctttcgatcttctggagccgcccacatctgggggttttctgaaactgagcaaaccgtgctgctatattttccccggaggtagaggcgattccgcgctgttcgccgtgaacggatttaatattctagtggatggcgggagcgatcggaagtcttgtttttggaaactcgtccggcacctcgaccggatcgattccgtcttgctcacccacatcggagcagacaatctccccggtattaacggattgctgcagcgtaaagtggccgaattggaagaagaacagtcacaggggtcttcctcttacagtgactgggttaaaaatctcatttccccggaactgggagtggtcttcttcaatgtacccgagaagcttagactgccagatgcaagccgcaaggctaagagaagcatcgaggaggcgtgcttgacactccaacacctgaaccgtttgggcatacaagcagagcctttgtatcgtgtagtgtccaacacgattgagcccttaactctgtttcacaagatgggcgtggggaggctcgatatgtacgtactcaacccagtgaaggattcaaaggagatgcagttcctaatgcagaaatgggcgggcaattctaaggctaaaaccgggattgtgctgcccaatgggaaagaagccgagatttctgtaccctacctaacatctattacggcactggtcgtctggcttcccgctaatccaaccgagaagatcgtccgggtgctctttccaggcaacgcgccccagaacaagatactagagggtctggagaagctccgacacttagattttctgcgttatccagtggccactcagaaagacctcgccagcggggccgtgcctactaatctcaagcccagcaagatcaagcagagggcggactcaaaggaatctctgaaggcaacaaccaagaccgccgtgagcaagctcgccaagagagaggaagtcgtggaagagggcgctaaagaagccaggtctgagcttgctaaagaactcgccaaaacagaaaaaaaggcgaaagaatcttctgagaaaccccccgaaaagccagctaaacctgagagagttaagacggaatcttcagaggccctgaaagctgagaaaagaaagctcatcaaagacaaagtgggaaaaaaacacctgaaagagaaaatctccaaacttgaggagaaaaaggataaggagaaaaaggaaattaagaaagagcggaaagaactgaagaaggacgaaggcaggaaagaagagaagaaagacgcaaaaaaggaagaaaagcgtaaggacaccaaacccgagcttaagaagataagcaagccggacttgaaaccattcacaccagaggttagaaaaaccctttataaggccaaggttccgggcagggtcaaaattgataggagcagagccatccgtggggagaaagagttgagcagtgagccacaaacaccccctgctcaaaagggaacagttcccctgcctactatcagtggtcatcgcgaactggtgctttcctctcctgaggacctgacccaggactttgaggagatgaaaagagaggagagggcactcttggccgagcagcgtgataccggtttgggagacaaacccttcccacttgacactgccgaagagggacctccaagtacggccattcaggggactcccccgagcgtgcccggcctcggccaggaagaacatgtgatgaaagagaaggagctcgtgcctgaggttccggaagagcagggaagcaaggacaggggcctggacagtggagccgaaaccgaggaggaaaaggacacctgggaagagaaaaagcagagggaagcagagcgacttccagaccggacagaggcccgggaggagtctgagcccgaggttaaggaggatgttatagagaaagctgagctggaggagatggaagaggtacacccgtccgacgaggaggaggaggacgcaaccaaagcggagggtttttatcaaaaacacatgcaggagccactgaaggtgactccgcgaagtagagaggcattcgggggaagggagttgggacttcagggcaaagctccagagaaggagacgtctctctttctgtcttccctgactactcccgccggagccactgaacatgtctcctacatccaggatgagacgatccctggctacagtgaaacggagcaaacaatttccgatgaggagatccacgatgagccagaagagcgtcctgccccccctaggtttcacacctctacctacgacctgccgggccctgaaggggcaggccctttcgaggcctcccaacccgccgatagtgccgtccccgccactagtggtaaggtctacggcacgcccgagacagagctgacttacccgacaaatatcgtggccgccccactggcggaagaggaacatgtttcttctgctactagtattaccgagtgcgataagctgagtagttttgcaacttccgtggctgaggatcaatcggtagccagtctaaccgcccctcagacagaagagacaggcaaaagttctctgcttcttgataccgtgaccagcattccctccagcaggaccgaagcaacacaaggcctggattatgtccccagcgccgggactatttcaccgacctctagtctggaggaggataagggcttcaaatctcccccctgcgaagacttcagtgtgactggcgagtccgaaaagcgaggcgaaataataggcaaaggtctgtccggcgaacgcgctgtggaggaggaggaggaagagacggcgaacgtggaaatgtcagagaaactgtgtagccagtatggcactcctgttttttctgctcctggacacgcccttcatccaggtgagcctgcgctgggcgaggctgaggagagatgtctgtctcccgacgattccaccgttaagatggccagtcctccaccctctggtcctccctcggccacccacaccccattccaccagtcaccagtagaggagaaaagcgagccccaagatttccaagaggccgactcatggggggacacaaagcggaccccaggggtaggcaaggaagacgcagccgaagaaaccgttaaacccgggcccgaggagggtaccctcgagaaggaagagaaggtgcccccacctagatctccacaggctcaagaagctccagttaacatagacgaggggctcacgggctgtacgattcagctgctacctgctcaggacaaagcaatcgtgtttgagattatggaagctggggaacctacaggtcccatactgggggcggaggccctgcccggcggcctgaggaccctccctcaggaaccggggaagccccagaaggacgaggtcctgcggtaccccgacagatctctctctcccgaagacgccgagtccctgtctgttctctcagttccctcccctgatacagccaaccaggagcctacccccaagtcaccgtgtggcttgacagagcagtatttgcacaaagaccgatggcctgaggtgtctcccgaggatactcagtctttgtctctctctgaggaaagcccttccaaagagacatctttggacgtaagctccaaacagttatctccagagagcctgggcactctgcagtttggggaattaaacctgggtaaagaagagatggggcacctgatgcaggctgaagacacaagtcaccacacagctcccatgagcgttcctgagcctcatgcggccaccgctagcccacctaccgacgggaccacaaggtattcagctcagacagacattactgacgacagcctggatcgcaaatcccccgcctcttccttcagtcatagcactccgtcaggcaacggcaagtatctccccggggcaatcacatctcccgatgagcatatactgaccccagatagctccttttctaagagccctgagtccctccccggcccagcccttgaagatattgcaatcaagtgggaggataaggtgcctggcttgaaggacagaactagcgagcagaaaaaagagcccgagccaaaagatgaagtcctgcagcagaaagacaagacattggagcataaagaagtggtcgagccaaaagatacagccatttaccaaaaggatgaagcactgcatgtgaagaatgaagccgtgaaacagcaggacaaagcattggagcagaaaggccgggatctcgagcagaaagacacagctctggaacaaaaggataaagctctcgagcccaaggataaggacctcgaggaaaaggacaaagctctggagcagaaagataaaatcccagaggaaaaagacaaagcccttgaacagaaggacacagccctcgaacaaaaggacaaagctctcgagcccaaggacaaagacctggaacagaaggatagggttcttgagcagaaggaaaaaatccctgaagagaaagacaaggcgttggatcagaaagttagaagcgtggagcacaaggcgcctgaggacacagttgccgagatgaaggatcgcgatcttgaacagactgacaaagcccctgaacaaaaacaccaagcacaagagcagaaagataaggtgtccgagaaaaaagaccaggcacttgagcagaaatactgggcactgggccagaaagacgaggccctggagcaaaacatccaggcgttggaagagaatcatcagacacaggagcaagagagcctcgttcaggaagataagacccgcaagcccaagatgctggaggaaaaaagccctgaaaaagttaaagcaatggaggagaaacttgaggctctgctggagaagacaaaagcactgggccttgaggaaagtctggtccaggagggtcgggctcgggagcaggaagaaaaatattggcgcggtcaggatgtggtccaggagtggcaggagacctcacctacgcgggaagaacccgcaggggaacaaaaagagctggcacccgcctgggaggacacctctcctgaacaagataacaggtactggcgggggagggaggacgtggcactcgaacaggacacttactggagagagttatcctgtgagagaaaagtttggtttccacatgaactcgatgggcagggggcaagaccccactacaccgaagagcgagagagcacgttcctcgacgagggccccgatgacgagcaggaagtcccattgagagagcacgccaccaggagcccgtgggcctcagactttaaggatttccaggagtctagtccccaaaaggggttggaagtagagaggtggctcgctgaaagcccggtgggattgccccctgaggaggaggataaactcacaagatcgccgtttgaaattatctccccacctgcctccccgcctgagatggttgggcagcgcgttcctagcgcacctgggcaggaatccccgatacccgatcccaagctgatgccccatatgaagaacgagccaaccactccatcctggctcgctgacatcccaccttgggtgccaaaggacagacccctcccccctgccccattgtcgcccgcaccaggaccacccacccctgcgccagaatctcatacaccggcgcccttctcatggggcactgcagaatatgatagtgtcgtcgctgcagtccaagaaggagccgcagagctggagggtggcccatactctccgttaggaaaggactacaggaaagccgaaggagagagggaggaggagggtcgcgccgaagcacctgacaagtcaagccacagttcaaaggtgccagaggcttctaagagtcatgctaccacagagccagaacagacagagcccgaacagcgcgaacctacaccataccctgacgaacggagctttcagtatgccgacatctacgaacaaatgatgctgaccgggctgggtcctgcgtgtcctaccagagaacctccgttgggcgccgccggggattggccaccgtgtctatctacaaaagaggcagccgctggcagaaatacttctgcagagaaagaactctcttcccctatatcaccaaaaagccttcagagcgatacacccacattcagctatgcggcactggccggacctactgtgcctccaaggcctgagcctggaccttccatggagccctccctgacccctccagccgtcccaccacgcgcccctatcctatctaagggaccaagcccgcccctgaacggaaacattctttcatgctcccccgacagacgaagtccttcgccgaaagagagcgggcgctctcattgggacgatagcacgtccgactctgaactggaaaaaggcgcccgcgagcagcctgagaaggaggctcagagtccttcacccccacatccaattccaatgggaagtcccaccctttggccagagacggaagcacatgtcagcccccctctcgactcacacctcggaccggctagacccagcctagacttccccgcatcagctttcggcttctcctctctgcagcccgcgcctccacagcttccgtcgcccgccgagcctagaagcgccccttgcggctcactggcatttagcggggacagagcattggctctggctccaggaccacccacccgtacccggcacgatgagtaccttgaggtgacaaaggccccgagcttggacagtagtctgcctcaactccccagccccagcagcccgggcgccccactattgagcaacctgccacgccccgctagtcccgcccttagcgaaggaagctctagcgaagcaacaacccctgtgatcagctccgtggccgagagattttccccatcactcgaggcggcagagcaagaatccggggaacttgatcctggaatggagcctgccgctcactccctttgggatttaaccccactttcccctgcgccccctgcctctttagacctcgcactcgcccctgcacctagcctgcctggcgatatgggggatggcatcctgccatgtcatttagagtgcagtgaggctgcaaccgagaagccttctccatttcaagtgcccagcgaggactgcgcggctaatggtcccactgaaacctcacctaaccctcccgggcctgctcctgccaaggccgaaaacgaggaggcagcggcttgtcctgcatgggagcggggggcctggcctgaaggtgctgagcgttcttcacgtccagacacacttctgtctccggagcagccagtgtgcccagccggagggtccggcggccccccatcgtctgcatcccccgaagtggaggctggtccacagggttgcgctacagagcccagaccccatcgcggcgagctcagccccagcttcttaaacccacctctacctcccagtattgacgatcgggacctctctactgaagaagtgcgcttggtcgggcggggcggcagaaggagagtgggtggacccgggacaacaggcggaccgtgccctgttactgacgaaacaccacccacctccgcatccgatagcggttcttctcagagtgattccgacgtcccacctgaaactgaagaatgcccttccatcactgcagaggctgcccttgacagtgatgaggatggagactttcttccggtggacaaagcaggtggagtcagtggtacccatcatccgagaccgggtcatgatccccctccattaccccaaccagacccgcgcccttcccccccccggccagatgtctgcatggccgatccagaaggtctgtcatcagaatccggcagagtggagcgcttaagggagaaggagaaggtccagggcagagttggaagacgtgcgcccgggaaggcaaagcctgcatccccagcccggaggctcgatctacgggggaaacgctcccccacacctgggaaaggaccagccgacagggcaagcagagccccccctcgtcctagatcaaccacgagccaggtaacgcctgccgaggagaaggacggacactccccgatgtcgaagggacttgttaatggactcaaggctggacctatggcactgtccagcaagggaagttccggcgccccagtttacgtggaccttgcatatatccccaaccattgcagcggcaaaacggctgacctggattttttcaggagggtccgggcatcctactatgtggtaagtggcaatgatcccgccaacggagaaccttcaagggccgttctagatgcattgcttgagggaaaagcacaatggggcgaaaacctgcaagttagcgtcacactgatcccaactcacgatacagaggtgaccagggaatggtatcagcagacgcacgaacagcagcaacaactgaatgtgctagttcttgcttcgtcctccactgtggtcatgcaagatgagagctttccagcctgcaagatcgagttttag

SEQ ID NO: 127766 - DNA, 1884 bp, Artificial Sequence
  derived and/or modified sequence
atggatggcgtcgcggaattcagtgaatatgtgtctgagactgtagatgtccctagcccctttgacttgcttgagcctcccacctccggcggattcctcaagctctctaagccgtgttgttacattttcccgggcggacgcggggactccgctctgttcgcggtgaacggctttaacattctcgtagacggggggagcgataggaaaagctgtttttggaaactcgtcagacacctcgataggatcgattctgtcctgttgactcatatcggcgcagataatctccctggcattaatggactgctgcagcggaaagtcgctgagctggaggaagaacaaagccagggttcttcttcttacagcgattgggtgaaaaatctgataagcccagagctgggggttgtgttctttaacgttccggagaaattaagactgcctgatgccagccgcaaggctaagcgctccattgaagaggcctgcctgacattgcagcaccttaaccgactggggatccaggcagagcctctctacagagtcgtgtccaacacaattgagccactgacgctgttccacaagatgggggttgggcggcttgatatgtacgtgctaaaccctgtgaaggactcaaaggaaatgcagtttttgatgcaaaagtgggccggcaactctaaggcaaaaacaggaattgtcctgcctaacggcaaagaagccgagatttcggttccctaccttacctccataaccgcattagttgtttggcttccagctaacccgactgagaaaatcgtgagagtgttgtttcctggcaatgctccacaaaacaaaatcctcgaaggactggaaaagttacgccacctggactttctgcgctatccagtggccacgcaaaaagatctggcaagtggtgccgtgcccacgaacctgaagccatccaaaatcaagcagcgcgctgattctaaagaatctttgaaggcgaccactaagacagcagtgagcaagttggctaagcgggaagaagtggttgaggagggcgcaaaggaagctaggtcagagctagccaaggagctcgcgaaaacggaaaagaaggctaaggaaagttcagagaagccccccgaaaagccggccaagcctgaaagggtgaaaaccgagtcgtccgaggctttaaaggctgaaaagcgaaaactgattaaggacaaggtcggaaaaaaacatctcaaggaaaagataagcaaattggaggaaaaaaaagataaggagaaaaaagagatcaagaaagaacggaaggagctgaaaaaggatgagggcagaaaagaagagaagaaagatgctaagaaggaggaaaaacgcaaggacacaaagcctgaactcaagaagattagcaaaccagatctaaagcctttcacccccgaagtgcggaaaaccctatataaggctaaggtgcccggcagggtgaaaatcgatcggagcagagctataagaggagagaaagagctttcatctgaaccccagacccctcctgcccagaagggcacagtgcccctcccaacaatctctgggcacagagagctggttctgagctcccccgaagatctgacgcaagattttgaggagatgaagcgagaagagagagcattactggcagagcagagggacaccgggctgggggataagcccttccccttggacacggcagaggaaggacccccttcgacagcgattcagggtacccctccttcagtaccaggcctgggacaggaagagcacgtaatgaaagaaaaggagctcgtccccgaggtgccagaagaacaaggaagtaaagatcgtgggctcgacagcggagccgaaacagaggagaagaagaagaaaaagaaaaaaaaaaagtag

SEQ ID NO: 127767 - DNA, 8412 bp, Artificial Sequence
  derived and/or modified sequence
atggatggagtggccgagttctctgaatatgtgtctgagaccgtggatgtgcccagcccctttgacctgctggagccccccaccagcggcggcttcctgaagctgagcaagccctgctgctacatcttccctgggggccgcggggacagcgccctgtttgctgtgaatggcttcaacatcctggtggatggcggcagtgacaggaagagctgcttctggaagctggtgcgccacctggacagaattgacagcgtgctgctgacccacatcggggctgacaacctgcccggcatcaatggcctgctgcagaggaaggtggccgagctggaggaggagcagagccagggcagcagcagctacagcgactgggtgaagaacctgatcagccctgagctgggcgtggtgttcttcaacgtgcctgagaagctgcggctgcctgatgccagcaggaaggccaagaggagcattgaggaggcctgcctgaccctgcagcacctgaaccggctgggcatccaggccgagcccctgtacagagtggtgagcaacaccatcgagcccctgaccctcttccacaagatgggcgtgggccgcctggacatgtatgtgctgaaccctgtgaaggacagcaaggagatgcagttcctgatgcagaagtgggccggcaacagcaaggccaagacaggaattgtgctgcccaacgggaaggaggccgagatctctgtgccctacctgaccagcatcacagccctggtggtgtggctgcctgccaaccccacagagaagatcgtgcgggtgctcttccctggaaatgccccccagaacaagatcctggagggcctggagaagctgcggcacctggacttcctgcgctaccctgtggccacccagaaggacctggccagcggggctgtgcccaccaacctgaagcccagcaagatcaagcagagagctgacagcaaggagagcctgaaggccaccaccaagacagctgtgtccaagctggccaagcgggaggaggtggtggaggagggcgccaaggaggcccggtctgagctggccaaggagctggccaagacagagaagaaggccaaggagagcagcgagaagcccccagagaagccagccaagccagagcgggtgaagacagagagcagcgaggccctgaaggccgagaagaggaagctgatcaaggacaaggtgggcaagaagcacctgaaggagaagatcagcaagctggaggagaagaaggacaaggagaagaaggagatcaagaaggagaggaaggagctgaagaaggatgagggcaggaaggaggagaagaaggatgccaagaaggaggagaagaggaaggacaccaagccagagctgaagaagatcagcaagccagacctgaagcccttcaccccagaggtgaggaagaccctgtacaaggccaaggtgcccggccgggtgaagattgacaggagccgggccatccggggggagaaggagctgagcagcgagccccagaccccaccagcccagaagggcaccgtgcccctgcccaccatcagcggccaccgggagctggtgctgagcagccctgaggacctgacccaggactttgaggagatgaagcgggaggagcgggccctgctggccgagcagagggacaccggcctgggggacaagcccttccccctggacacagctgaggagggcccccccagcacagccatccagggcaccccaccttctgtgcccggcctgggccaggaggagcacgtgatgaaggagaaggagctggtgcctgaggtgcctgaggagcagggcagcaaggaccggggcctggacagcggggctgagacagaggaggagaaggacacctgggaggagaagaagcagcgggaggccgagcggctgcctgacagaacagaggcccgggaggagagcgagcctgaggtgaaggaggatgtgattgagaaggccgagctggaggagatggaggaggtgcaccccagtgatgaggaggaggaggatgccaccaaggccgagggcttctaccagaagcacatgcaggagcccctgaaggtgacccccaggagccgggaggcctttggaggccgggagctgggcctgcagggcaaggcccctgagaaggagaccagcctcttcctgagcagcctgaccaccccagctggggccacagaacatgtgtcctacatccaggatgagaccatccctggctacagcgagacagagcagaccatcagtgatgaggagatccatgatgagcctgaggagaggcctgccccaccccgcttccacaccagcacctatgacctgcccggccctgagggcgccggcccctttgaggccagccagcctgctgacagcgctgtgcctgccaccagcggcaaggtgtatggcaccccagagacagagctgacctaccccaccaacatcgtggccgcccccctggccgaggaggagcacgtgagcagcgccaccagcatcacagaatgtgacaagctgagcagctttgccacctctgtggccgaggaccagagcgtggccagcctgacagccccccagacagaggagaccgggaagagcagcctgctgctggacacagtgaccagcatccccagcagcaggacagaggccacccagggcctggactatgtgcccagcgctggcaccatcagccccaccagcagcctggaggaggacaagggcttcaagagccccccctgtgaggacttctctgtgactggagagagcgagaagagaggagagatcatcggcaagggcctgtctggagagagagctgtggaggaggaggaggaggagacagccaacgtggagatgtctgagaagctgtgcagccagtatggcacccctgtgttcagcgcccctggccacgccctgcaccctggagagcccgccctgggggaggccgaggagcgctgcctgagcccagatgacagcacagtgaagatggccagccccccacccagcggcccccccagcgccacccacacccccttccaccagagccctgtggaggagaagtctgagccccaggacttccaggaggccgacagctggggagacaccaagaggaccccaggagtgggcaaggaggatgctgctgaggagaccgtgaagccaggccctgaggagggcaccctggagaaggaggagaaggtgcccccacccaggagcccccaggcccaggaggcccctgtgaacattgatgagggcctgaccggctgcaccatccagctgctgcctgcccaggacaaggccatcgtgtttgagatcatggaggccggggagcccaccggccccatcctgggcgctgaggccctgcccggcggcctgcggaccctgccccaggagcccgggaagccccagaaggatgaggtgctgcgctacccagacaggagcctgagcccagaagatgctgagagcctgtctgtgctgtctgtgcccagcccagacacagccaaccaggagcccacccccaagagcccctgtggcctgacagagcagtacctgcacaaggaccgctggccagaggtgtccccagaggacacccagagcctgagcctgtctgaggagagccccagcaaggagaccagcctggatgtgagcagcaagcagctgagccctgagagcctgggcaccctgcagtttggagagctgaacctgggcaaggaggagatgggccacctgatgcaggccgaggacaccagccaccacacagcccccatgtctgtgcctgagccccacgccgccacagccagccccccaacagatggcaccacccgctacagcgcccagacagacatcacagatgacagcctggacaggaagagccctgccagcagcttcagccacagcaccccatctggaaatggcaagtacctgcccggggccatcaccagcccagatgagcacatcctgaccccagacagcagcttcagcaagagccctgagagcctgcccggccctgccctggaggacatcgccatcaagtgggaggacaaggtgcccggcctgaaggacaggaccagcgagcagaagaaggagcctgagcccaaggatgaggtgctgcagcagaaggacaagaccctggagcacaaggaggtggtggagcccaaggacacagccatctaccagaaggatgaggccctgcacgtgaagaatgaggccgtgaagcagcaggacaaggccctggagcagaagggccgggacctggagcagaaggacacagccctggagcagaaggacaaggccctggagcccaaggacaaggacctggaggagaaggacaaggccctggagcagaaggacaagatccctgaggagaaggacaaggccctggagcagaaggacacagccctggagcagaaggacaaggccctggagcccaaggacaaggacctggagcagaaggacagagtgctggagcagaaggagaagatccctgaggagaaggacaaggccctggaccagaaggtgcgctctgtggagcacaaggcccctgaggacacagtggccgagatgaaggaccgggacctggagcagacagacaaggcccctgagcagaagcaccaggcccaggagcagaaggacaaggtgtctgagaagaaggaccaggccctggagcagaagtactgggccctgggccagaaggatgaggccctggagcagaacatccaggccctggaggagaaccaccagacccaggagcaggagagcctggtgcaggaggacaagaccaggaagcccaagatgctggaggagaagagccctgagaaggtgaaggccatggaggagaagctggaggccctgctggagaagaccaaggccctgggcctggaggagagcctggtgcaggagggccgggcccgggagcaggaggagaagtactggaggggccaggatgtggtgcaggagtggcaggagaccagccccacccgggaggagcctgctggggagcagaaggagctggccccagcctgggaggacaccagccctgagcaggacaaccgctactggagaggaagagaagatgtggccctggagcaggacacctactggagggagctgagctgtgagaggaaggtgtggttcccccatgagctggatggccagggcgcccggccccactacacagaggagcgggagagcaccttcctggatgagggcccagatgatgagcaggaggtgcccctgcgggagcacgccaccaggagcccctgggccagtgacttcaaggacttccaggagagcagcccccagaagggcctggaggtggagcgctggctggccgagagccctgtgggcctgcccccagaggaggaggacaagctgaccaggagcccctttgagatcatcagccccccagccagccccccagagatggtgggccagagggtgcccagcgcccctggccaggagagccccatcccagaccccaagctgatgccccacatgaagaatgagcccaccacccccagctggctggccgacatccccccctgggtgcccaaggaccggcccctgcccccagcccccctgagccctgcccctggcccccccaccccagcccctgagagccacaccccagcccccttctcctggggcacagcagaatatgattctgtggtggccgctgtgcaggagggcgctgctgagctggagggcggcccctacagccccctgggcaaggactacaggaaggccgagggggagcgggaggaggagggccgggcagaggccccagacaagagcagccacagcagcaaggtgcctgaggccagcaagagccacgccaccacagagcctgagcagacagagcctgagcagcgggagcccaccccctacccagatgagaggagcttccagtatgctgacatctatgagcagatgatgctgaccggcctgggccctgcctgccccacccgggagccccccctgggcgctgctggggactggccaccctgcctgagcaccaaggaggccgctgctggaagaaacaccagcgctgagaaggagctgagcagccccatcagccccaagagcctgcagagcgacacccccaccttctcctatgctgccctggccggccccaccgtgccccccaggcctgagcccggccccagcatggagcccagcctgaccccacctgctgtgcccccccgggcccccatcctgagcaagggccccagcccccccctgaatggaaacatcctgagctgcagcccagaccggcgcagccccagccccaaggagagcggccgcagccactgggatgacagcaccagtgacagcgagctggagaagggggcccgggagcagcctgagaaggaggcccagagccccagccccccccaccccatccccatgggcagccccaccctgtggccagagacagaggcccacgtgagcccccccctggacagccacctgggccctgcccggcccagcctggacttccctgccagcgccttcggcttcagcagcctgcagcctgccccaccccagctgcccagccctgctgagcccaggtctgccccctgtggcagcctggccttcagcggggaccgggccctggccctggcccctggcccccccaccaggaccaggcatgatgagtacctggaggtgaccaaggcccccagcctggacagcagcctgccccagctgcccagccccagcagccctggggcccccctgctgagcaacctgcccaggcctgccagccctgccctgtctgagggcagcagcagcgaggccaccacccctgtgatcagctctgtggccgagcgcttcagccccagcctggaggccgctgagcaggagagcggggagctggaccccggcatggagcctgctgcccacagcctgtgggacctgacccccctgagccctgcccccccagccagcctggacctggccctggccccagcccccagcctgcccggggacatgggagatggcatcctgccctgccacctggagtgcagcgaggccgccacagagaagcccagccccttccaggtgcccagcgaggactgtgccgccaacggccccacagagaccagccccaaccccccaggccctgccccagccaaggccgagaatgaggaggccgccgcctgcccagcctgggagcggggggcctggccagagggcgctgagaggagcagcaggccagacaccctgctgagccctgagcagcctgtgtgcccagctgggggcagcggcggcccccccagcagcgccagccctgaggtggaggccggcccccagggctgtgccacagagccccggccccacagaggagagctgagccccagcttcctgaacccccccctgccccccagcattgatgaccgggacctgagcacagaggaggtgcggctggtgggccggggcggcagaagaagagtgggcggccctggcaccaccggcggcccctgccctgtgacagatgagaccccacccaccagcgccagtgacagcggcagcagccagagcgacagtgatgtgcccccagagacagaagaatgtcccagcatcacagctgaggccgccctggacagtgatgaagatggagacttcctgcctgtggacaaggccggcggcgtgtctggcacccaccacccccggcccggccatgaccccccacccctgccccagcctgacccccggcccagcccccccaggccagatgtgtgcatggctgaccctgagggcctgagcagcgagagcggccgggtggagcggctgcgggagaaggagaaggtgcagggccgggtgggcagaagagcccctgggaaggccaagccagccagccctgcccggcggctggacctgcggggcaagaggagccccacccctgggaagggccctgctgaccgggccagccgggccccaccccggcccaggagcaccaccagccaggtgaccccagctgaggagaaggatggccacagccccatgagcaagggcctggtgaatggcctgaaggccggccccatggccctgagcagcaagggcagcagcggggcccctgtgtatgtggacctggcctacatccccaaccactgcagcggcaagacagctgacctggacttcttcagaagagtgcgggccagctactacgtggtgtctggaaatgaccctgccaatggagagcccagcagagctgtgctggatgccctgctggagggcaaggcccagtggggcgagaacctgcaggtgaccctcatccccacccatgacacagaggtgacccgggagtggtaccagcagacccatgagcagcagcagcagctgaatgtgctggtgctggccagcagcagcacagtggtgatgcaggatgagagcttccctgcctgcaagattgagttctag

SEQ ID NO: 127768 - DNA, 9126 bp, Artificial Sequence
  derived and/or modified sequence
atggagacagaagctgagcccgcccggccccatggagtggccatggagaccaccccaggcctgggcctgcggagccctggggcccccctggcccagaacccagctgagctgctgtgtgaggccggggctgctgtggccgccgcccgctgggacctgcagaagcacagcctgctgattgtgattggagacatcggcacagagagccagctgcgggctgtgcgggcccacctggagcagggcatcctgtcctggaacatcgacctgagcagctttgacctgaaccagcagctgcggctcttcatcaccaggcacctggcccacttcagcagcgaggtgaagggccagaggaccctgtgccaccagagcgagatcctggagaccatcatcctggtgaaccccagcgctgacagcatcagcagcgaggtgcaccacctgctgagcagcagcagcgcctacaagctgctgatcctgagcggccagagcctggagcccggcggggacctgatcctgcagagcggcacctacagctatgagaactttgcccaggtgctgcacaaccctgagatcagccagctgctgagcaacagagaccccggcatccaggccttcctgactgtgtcctgcctgggggagggggactggagccacctgggcctgagcagcagccaggagaccctgcacctgcggctgaaccctgagcccaccctgcccaccatggatggagtggccgagttctctgaatatgtgtctgagaccgtggatgtgcccagcccctttgacctgctggagccccccaccagcggcggcttcctgaagctgagcaagccctgctgctacatcttccctgggggccgcggggacagcgccctgtttgctgtgaatggcttcaacatcctggtggatggcggcagtgacaggaagagctgcttctggaagctggtgcgccacctggacagaattgacagcgtgctgctgacccacatcggggctgacaacctgcccggcatcaatggcctgctgcagaggaaggtggccgagctggaggaggagcagagccagggcagcagcagctacagcgactgggtgaagaacctgatcagccctgagctgggcgtggtgttcttcaacgtgcctgagaagctgcggctgcctgatgccagcaggaaggccaagaggagcattgaggaggcctgcctgaccctgcagcacctgaaccggctgggcatccaggccgagcccctgtacagagtggtgagcaacaccatcgagcccctgaccctcttccacaagatgggcgtgggccgcctggacatgtatgtgctgaaccctgtgaaggacagcaaggagatgcagttcctgatgcagaagtgggccggcaacagcaaggccaagacaggaattgtgctgcccaacgggaaggaggccgagatctctgtgccctacctgaccagcatcacagccctggtggtgtggctgcctgccaaccccacagagaagatcgtgcgggtgctcttccctggaaatgccccccagaacaagatcctggagggcctggagaagctgcggcacctggacttcctgcgctaccctgtggccacccagaaggacctggccagcggggctgtgcccaccaacctgaagcccagcaagatcaagcagagagctgacagcaaggagagcctgaaggccaccaccaagacagctgtgtccaagctggccaagcgggaggaggtggtggaggagggcgccaaggaggcccggtctgagctggccaaggagctggccaagacagagaagaaggccaaggagagcagcgagaagcccccagagaagccagccaagccagagcgggtgaagacagagagcagcgaggccctgaaggccgagaagaggaagctgatcaaggacaaggtgggcaagaagcacctgaaggagaagatcagcaagctggaggagaagaaggacaaggagaagaaggagatcaagaaggagaggaaggagctgaagaaggatgagggcaggaaggaggagaagaaggatgccaagaaggaggagaagaggaaggacaccaagccagagctgaagaagatcagcaagccagacctgaagcccttcaccccagaggtgaggaagaccctgtacaaggccaaggtgcccggccgggtgaagattgacaggagccgggccatccggggggagaaggagctgagcagcgagccccagaccccaccagcccagaagggcaccgtgcccctgcccaccatcagcggccaccgggagctggtgctgagcagccctgaggacctgacccaggactttgaggagatgaagcgggaggagcgggccctgctggccgagcagagggacaccggcctgggggacaagcccttccccctggacacagctgaggagggcccccccagcacagccatccagggcaccccaccttctgtgcccggcctgggccaggaggagcacgtgatgaaggagaaggagctggtgcctgaggtgcctgaggagcagggcagcaaggaccggggcctggacagcggggctgagacagaggaggagaaggacacctgggaggagaagaagcagcgggaggccgagcggctgcctgacagaacagaggcccgggaggagagcgagcctgaggtgaaggaggatgtgattgagaaggccgagctggaggagatggaggaggtgcaccccagtgatgaggaggaggaggatgccaccaaggccgagggcttctaccagaagcacatgcaggagcccctgaaggtgacccccaggagccgggaggcctttggaggccgggagctgggcctgcagggcaaggcccctgagaaggagaccagcctcttcctgagcagcctgaccaccccagctggggccacagaacatgtgtcctacatccaggatgagaccatccctggctacagcgagacagagcagaccatcagtgatgaggagatccatgatgagcctgaggagaggcctgccccaccccgcttccacaccagcacctatgacctgcccggccctgagggcgccggcccctttgaggccagccagcctgctgacagcgctgtgcctgccaccagcggcaaggtgtatggcaccccagagacagagctgacctaccccaccaacatcgtggccgcccccctggccgaggaggagcacgtgagcagcgccaccagcatcacagaatgtgacaagctgagcagctttgccacctctgtggccgaggaccagagcgtggccagcctgacagccccccagacagaggagaccgggaagagcagcctgctgctggacacagtgaccagcatccccagcagcaggacagaggccacccagggcctggactatgtgcccagcgctggcaccatcagccccaccagcagcctggaggaggacaagggcttcaagagccccccctgtgaggacttctctgtgactggagagagcgagaagagaggagagatcatcggcaagggcctgtctggagagagagctgtggaggaggaggaggaggagacagccaacgtggagatgtctgagaagctgtgcagccagtatggcacccctgtgttcagcgcccctggccacgccctgcaccctggagagcccgccctgggggaggccgaggagcgctgcctgagcccagatgacagcacagtgaagatggccagccccccacccagcggcccccccagcgccacccacacccccttccaccagagccctgtggaggagaagtctgagccccaggacttccaggaggccgacagctggggagacaccaagaggaccccaggagtgggcaaggaggatgctgctgaggagaccgtgaagccaggccctgaggagggcaccctggagaaggaggagaaggtgcccccacccaggagcccccaggcccaggaggcccctgtgaacattgatgagggcctgaccggctgcaccatccagctgctgcctgcccaggacaaggccatcgtgtttgagatcatggaggccggggagcccaccggccccatcctgggcgctgaggccctgcccggcggcctgcggaccctgccccaggagcccgggaagccccagaaggatgaggtgctgcgctacccagacaggagcctgagcccagaagatgctgagagcctgtctgtgctgtctgtgcccagcccagacacagccaaccaggagcccacccccaagagcccctgtggcctgacagagcagtacctgcacaaggaccgctggccagaggtgtccccagaggacacccagagcctgagcctgtctgaggagagccccagcaaggagaccagcctggatgtgagcagcaagcagctgagccctgagagcctgggcaccctgcagtttggagagctgaacctgggcaaggaggagatgggccacctgatgcaggccgaggacaccagccaccacacagcccccatgtctgtgcctgagccccacgccgccacagccagccccccaacagatggcaccacccgctacagcgcccagacagacatcacagatgacagcctggacaggaagagccctgccagcagcttcagccacagcaccccatctggaaatggcaagtacctgcccggggccatcaccagcccagatgagcacatcctgaccccagacagcagcttcagcaagagccctgagagcctgcccggccctgccctggaggacatcgccatcaagtgggaggacaaggtgcccggcctgaaggacaggaccagcgagcagaagaaggagcctgagcccaaggatgaggtgctgcagcagaaggacaagaccctggagcacaaggaggtggtggagcccaaggacacagccatctaccagaaggatgaggccctgcacgtgaagaatgaggccgtgaagcagcaggacaaggccctggagcagaagggccgggacctggagcagaaggacacagccctggagcagaaggacaaggccctggagcccaaggacaaggacctggaggagaaggacaaggccctggagcagaaggacaagatccctgaggagaaggacaaggccctggagcagaaggacacagccctggagcagaaggacaaggccctggagcccaaggacaaggacctggagcagaaggacagagtgctggagcagaaggagaagatccctgaggagaaggacaaggccctggaccagaaggtgcgctctgtggagcacaaggcccctgaggacacagtggccgagatgaaggaccgggacctggagcagacagacaaggcccctgagcagaagcaccaggcccaggagcagaaggacaaggtgtctgagaagaaggaccaggccctggagcagaagtactgggccctgggccagaaggatgaggccctggagcagaacatccaggccctggaggagaaccaccagacccaggagcaggagagcctggtgcaggaggacaagaccaggaagcccaagatgctggaggagaagagccctgagaaggtgaaggccatggaggagaagctggaggccctgctggagaagaccaaggccctgggcctggaggagagcctggtgcaggagggccgggcccgggagcaggaggagaagtactggaggggccaggatgtggtgcaggagtggcaggagaccagccccacccgggaggagcctgctggggagcagaaggagctggccccagcctgggaggacaccagccctgagcaggacaaccgctactggagaggaagagaagatgtggccctggagcaggacacctactggagggagctgagctgtgagaggaaggtgtggttcccccatgagctggatggccagggcgcccggccccactacacagaggagcgggagagcaccttcctggatgagggcccagatgatgagcaggaggtgcccctgcgggagcacgccaccaggagcccctgggccagtgacttcaaggacttccaggagagcagcccccagaagggcctggaggtggagcgctggctggccgagagccctgtgggcctgcccccagaggaggaggacaagctgaccaggagcccctttgagatcatcagccccccagccagccccccagagatggtgggccagagggtgcccagcgcccctggccaggagagccccatcccagaccccaagctgatgccccacatgaagaatgagcccaccacccccagctggctggccgacatccccccctgggtgcccaaggaccggcccctgcccccagcccccctgagccctgcccctggcccccccaccccagcccctgagagccacaccccagcccccttctcctggggcacagcagaatatgattctgtggtggccgctgtgcaggagggcgctgctgagctggagggcggcccctacagccccctgggcaaggactacaggaaggccgagggggagcgggaggaggagggccgggcagaggccccagacaagagcagccacagcagcaaggtgcctgaggccagcaagagccacgccaccacagagcctgagcagacagagcctgagcagcgggagcccaccccctacccagatgagaggagcttccagtatgctgacatctatgagcagatgatgctgaccggcctgggccctgcctgccccacccgggagccccccctgggcgctgctggggactggccaccctgcctgagcaccaaggaggccgctgctggaagaaacaccagcgctgagaaggagctgagcagccccatcagccccaagagcctgcagagcgacacccccaccttctcctatgctgccctggccggccccaccgtgccccccaggcctgagcccggccccagcatggagcccagcctgaccccacctgctgtgcccccccgggcccccatcctgagcaagggccccagcccccccctgaatggaaacatcctgagctgcagcccagaccggcgcagccccagccccaaggagagcggccgcagccactgggatgacagcaccagtgacagcgagctggagaagggggcccgggagcagcctgagaaggaggcccagagccccagccccccccaccccatccccatgggcagccccaccctgtggccagagacagaggcccacgtgagcccccccctggacagccacctgggccctgcccggcccagcctggacttccctgccagcgccttcggcttcagcagcctgcagcctgccccaccccagctgcccagccctgctgagcccaggtctgccccctgtggcagcctggccttcagcggggaccgggccctggccctggcccctggcccccccaccaggaccaggcatgatgagtacctggaggtgaccaaggcccccagcctggacagcagcctgccccagctgcccagccccagcagccctggggcccccctgctgagcaacctgcccaggcctgccagccctgccctgtctgagggcagcagcagcgaggccaccacccctgtgatcagctctgtggccgagcgcttcagccccagcctggaggccgctgagcaggagagcggggagctggaccccggcatggagcctgctgcccacagcctgtgggacctgacccccctgagccctgcccccccagccagcctggacctggccctggccccagcccccagcctgcccggggacatgggagatggcatcctgccctgccacctggagtgcagcgaggccgccacagagaagcccagccccttccaggtgcccagcgaggactgtgccgccaacggccccacagagaccagccccaaccccccaggccctgccccagccaaggccgagaatgaggaggccgccgcctgcccagcctgggagcggggggcctggccagagggcgctgagaggagcagcaggccagacaccctgctgagccctgagcagcctgtgtgcccagctgggggcagcggcggcccccccagcagcgccagccctgaggtggaggccggcccccagggctgtgccacagagccccggccccacagaggagagctgagccccagcttcctgaacccccccctgccccccagcattgatgaccgggacctgagcacagaggaggtgcggctggtgggccggggcggcagaagaagagtgggcggccctggcaccaccggcggcccctgccctgtgacagatgagaccccacccaccagcgccagtgacagcggcagcagccagagcgacagtgatgtgcccccagagacagaagaatgtcccagcatcacagctgaggccgccctggacagtgatgaagatggagacttcctgcctgtggacaaggccggcggcgtgtctggcacccaccacccccggcccggccatgaccccccacccctgccccagcctgacccccggcccagcccccccaggccagatgtgtgcatggctgaccctgagggcctgagcagcgagagcggccgggtggagcggctgcgggagaaggagaaggtgcagggccgggtgggcagaagagcccctgggaaggccaagccagccagccctgcccggcggctggacctgcggggcaagaggagccccacccctgggaagggccctgctgaccgggccagccgggccccaccccggcccaggagcaccaccagccaggtgaccccagctgaggagaaggatggccacagccccatgagcaagggcctggtgaatggcctgaaggccggccccatggccctgagcagcaagggcagcagcggggcccctgtgtatgtggacctggcctacatccccaaccactgcagcggcaagacagctgacctggacttcttcagaagagtgcgggccagctactacgtggtgtctggaaatgaccctgccaatggagagcccagcagagctgtgctggatgccctgctggagggcaaggcccagtggggcgagaacctgcaggtgaccctcatccccacccatgacacagaggtgacccgggagtggtaccagcagacccatgagcagcagcagcagctgaatgtgctggtgctggccagcagcagcacagtggtgatgcaggatgagagcttccctgcctgcaagattgagttctag

SEQ ID NO: 127769 - DNA, 8418 bp, Artificial Sequence
  derived and/or modified sequence
atggatggagtggccgagttctctgaatatgtgtctgagaccgtggatgtgcccagcccctttgacctgctggagccccccaccagcggcggcttcctgaagctgagcaagccctgctgctacatcttccctgggggccgcggggacagcgccctgtttgctgtgaatggcttcaacatcctggtggatggcggcagtgacaggaagagctgcttctggaagctggtgcgccacctggacagaattgacagcgtgctgctgacccacatcggggctgacaacctgcccggcatcaatggcctgctgcagaggaaggtggccgagctggaggaggagcagagccagggcagcagcagctacagcgactgggtgaagaacctgatcagccctgagctgggcgtggtgttcttcaacgtgcctgagaagctgcggctgcctgatgccagcaggaaggccaagaggagcattgaggaggcctgcctgaccctgcagcacctgaaccggctgggcatccaggccgagcccctgtacagagtggtgagcaacaccatcgagcccctgaccctcttccacaagatgggcgtgggccgcctggacatgtatgtgctgaaccctgtgaaggacagcaaggagatgcagttcctgatgcagaagtgggccggcaacagcaaggccaagacaggaattgtgctgcccaacgggaaggaggccgagatctctgtgccctacctgaccagcatcacagccctggtggtgtggctgcctgccaaccccacagagaagatcgtgcgggtgctcttccctggaaatgccccccagaacaagatcctggagggcctggagaagctgcggcacctggacttcctgcgctaccctgtggccacccagaaggacctggccagcggggctgtgcccaccaacctgaagcccagcaagatcaagcagagagctgacagcaaggagagcctgaaggccaccaccaagacagctgtgtccaagctggccaagcgggaggaggtggtggaggagggcgccaaggaggcccggtctgagctggccaaggagctggccaagacagagaagaaggccaaggagagcagcgagaagcccccagagaagccagccaagccagagcgggtgaagacagagagcagcgaggccctgaaggccgagaagaggaagctgatcaaggacaaggtgggcaagaagcacctgaaggagaagatcagcaagctggaggagaagaaggacaaggagaagaaggagatcaagaaggagaggaaggagctgaagaaggatgagggcaggaaggaggagaagaaggatgccaagaaggaggagaagaggaaggacaccaagccagagctgaagaagatcagcaagccagacctgaagcccttcaccccagaggtgaggaagaccctgtacaaggccaaggtgcccggccgggtgaagattgacaggagccgggccatccggggggagaaggagctgagcagcgagccccagaccccaccagcccagaagggcaccgtgcccctgcccaccatcagcggccaccgggagctggtgctgagcagccctgaggacctgacccaggactttgaggagatgaagcgggaggagcgggccctgctggccgagcagagggacaccggcctgggggacaagcccttccccctggacacagctgaggagggcccccccagcacagccatccagggcaccccaccttctgtgcccggcctgggccaggaggagcacgtgatgaaggagaaggagctggtgcctgaggtgcctgaggagcagggcagcaaggaccggggcctggacagcggggctgagacagaggaggagaaggacacctgggaggagaagaagcagcgggaggccgagcggctgcctgacagaacagaggcccgggaggagagcgagcctgaggtgaaggaggatgtgattgagaaggccgagctggaggagatggaggaggtgcaccccagtgatgaggaggaggaggatgccaccaaggccgagggcttctaccagaagcacatgcaggagcccctgaaggtgacccccaggagccgggaggcctttggaggccgggagctgggcctgcagggcaaggcccctgagaaggagaccagcctcttcctgagcagcctgaccaccccagctggggccacagaacatgtgtcctacatccaggatgagaccatccctggctacagcgagacagagcagaccatcagtgatgaggagatccatgatgagcctgaggagaggcctgccccaccccgcttccacaccagcacctatgacctgcccggccctgagggcgccggcccctttgaggccagccagcctgctgacagcgctgtgcctgccaccagcggcaaggtgtatggcaccccagagacagagctgacctaccccaccaacatcgtggccgcccccctggccgaggaggagcacgtgagcagcgccaccagcatcacagaatgtgacaagctgagcagctttgccacctctgtggccgaggaccagagcgtggccagcctgacagccccccagacagaggagaccgggaagagcagcctgctgctggacacagtgaccagcatccccagcagcaggacagaggccacccagggcctggactatgtgcccagcgctggcaccatcagccccaccagcagcctggaggaggacaagggcttcaagagccccccctgtgaggacttctctgtgactggagagagcgagaagagaggagagatcatcggcaagggcctgtctggagagagagctgtggaggaggaggaggaggagacagccaacgtggagatgtctgagaagctgtgcagccagtatggcacccctgtgttcagcgcccctggccacgccctgcaccctggagagcccgccctgggggaggccgaggagcgctgcctgagcccagatgacagcacagtgaagatggccagccccccacccagcggcccccccagcgccacccacacccccttccaccagagccctgtggaggagaagtctgagccccaggacttccaggaggccgacagctggggagacaccaagaggaccccaggagtgggcaaggaggatgctgctgaggagaccgtgaagccaggccctgaggagggcaccctggagaaggaggagaaggtgcccccacccaggagcccccaggcccaggaggcccctgtgaacattgatgagggcctgaccggctgcaccatccagctgctgcctgcccaggacaaggccatcgtgtttgagatcatggaggccggggagcccaccggccccatcctgggcgctgaggccctgcccggcggcctgcggaccctgccccaggagcccgggaagccccagaaggatgaggtgctgcgctacccagacaggagcctgagcccagaagatgctgagagcctgtctgtgctgtctgtgcccagcccagacacagccaaccaggagcccacccccaagagcccctgtggcctgacagagcagtacctgcacaaggaccgctggccagaggtgtccccagaggacacccagagcctgagcctgtctgaggagagccccagcaaggagaccagcctggatgtgagcagcaagcagctgagccctgagagcctgggcaccctgcagtttggagagctgaacctgggcaaggaggagatgggccacctgatgcaggccgaggacaccagccaccacacagcccccatgtctgtgcctgagccccacgccgccacagccagccccccaacagatggcaccacccgctacagcgcccagacagacatcacagatgacagcctggacaggaagagccctgccagcagcttcagccacagcaccccatctggaaatggcaagtacctgcccggggccatcaccagcccagatgagcacatcctgaccccagacagcagcttcagcaagagccctgagagcctgcccggccctgccctggaggacatcgccatcaagtgggaggacaaggtgcccggcctgaaggacaggaccagcgagcagaagaaggagcctgagcccaaggatgaggtgctgcagcagaaggacaagaccctggagcacaaggaggtggtggagcccaaggacacagccatctaccagaaggatgaggccctgcacgtgaagaatgaggccgtgaagcagcaggacaaggccctggagcagaagggccgggacctggagcagaaggacacagccctggagcagaaggacaaggccctggagcccaaggacaaggacctggaggagaaggacaaggccctggagcagaaggacaagatccctgaggagaaggacaaggccctggagcagaaggacacagccctggagcagaaggacaaggccctggagcccaaggacaaggacctggagcagaaggacagagtgctggagcagaaggagaagatccctgaggagaaggacaaggccctggaccagaaggtgcgctctgtggagcacaaggcccctgaggacacagtggccgagatgaaggaccgggacctggagcagacagacaaggcccctgagcagaagcaccaggcccaggagcagaaggacaaggtgtctgagaagaaggaccaggccctggagcagaagtactgggccctgggccagaaggatgaggccctggagcagaacatccaggccctggaggagaaccaccagacccaggagcaggagagcctggtgcaggaggacaagaccaggaagcccaagatgctggaggagaagagccctgagaaggtgaaggccatggaggagaagctggaggccctgctggagaagaccaaggccctgggcctggaggagagcctggtgcaggagggccgggcccgggagcaggaggagaagtactggaggggccaggatgtggtgcaggagtggcaggagaccagccccacccgggaggagcctgctggggagcagaaggagctggccccagcctgggaggacaccagccctgagcaggacaaccgctactggagaggaagagaagatgtggccctggagcaggacacctactggagggagctgagctgtgagaggaaggtgtggttcccccatgagctggatggccagggcgcccggccccactacacagaggagcgggagagcaccttcctggatgagggcccagatgatgagcaggaggtgcccctgcgggagcacgccaccaggagcccctgggccagtgacttcaaggacttccaggagagcagcccccagaagggcctggaggtggagcgctggctggccgagagccctgtgggcctgcccccagaggaggaggacaagctgaccaggagcccctttgagatcatcagccccccagccagccccccagagatggtgggccagagggtgcccagcgcccctggccaggagagccccatcccagaccccaagctgatgccccacatgaagaatgagcccaccacccccagctggctggccgacatccccccctgggtgcccaaggaccggcccctgcccccagcccccctgagccctgcccctggcccccccaccccagcccctgagagccacaccccagcccccttctcctggggcacagcagaatatgattctgtggtggccgctgtgcaggagggcgctgctgagctggagggcggcccctacagccccctgggcaaggactacaggaaggccgagggggagcgggaggaggagggccgggcagaggccccagacaagagcagccacagcagcaaggtgcctgaggccagcaagagccacgccaccacagagcctgagcagacagagcctgagcagcgggagcccaccccctacccagatgagaggagcttccagtatgctgacatctatgagcagatgatgctgaccggcctgggccctgcctgccccacccgggagccccccctgggcgctgctggggactggccaccctgcctgagcaccaaggaggccgctgctggaagaaacaccagcgctgagaaggagctgagcagccccatcagccccaagagcctgcagagcgacacccccaccttctcctatgctgccctggccggccccaccgtgccccccaggcctgagcccggccccagcatggagcccagcctgaccccacctgctgtgcccccccgggcccccatcctgagcaagggccccagcccccccctgaatggaaacatcctgagctgcagcccagaccggcgcagccccagccccaaggagagcggccgcagccactgggatgacagcaccagtgacagcgagctggagaagggggcccgggagcagcctgagaaggaggcccagagccccagccccccccaccccatccccatgggcagccccaccctgtggccagagacagaggcccacgtgagcccccccctggacagccacctgggccctgcccggcccagcctggacttccctgccagcgccttcggcttcagcagcctgcagcctgccccaccccagctgcccagccctgctgagcccaggtctgccccctgtggcagcctggccttcagcggggaccgggccctggccctggcccctggcccccccaccaggaccaggcatgatgagtacctggaggtgaccaaggcccccagcctggacagcagcctgccccagctgcccagccccagcagccctggggcccccctgctgagcaacctgcccaggcctgccagccctgccctgtctgagggcagcagcagcgaggccaccacccctgtgatcagctctgtggccgagcgcttcagccccagcctggaggccgctgagcaggagagcggggagctggaccccggcatggagcctgctgcccacagcctgtgggacctgacccccctgagccctgcccccccagccagcctggacctggccctggccccagcccccagcctgcccggggacatgggagatggcatcctgccctgccacctggagtgcagcgaggccgccacagagaagcccagccccttccaggtgcccagcgaggactgtgccgccaacggccccacagagaccagccccaaccccccaggccctgccccagccaaggccgagaatgaggaggccgccgcctgcccagcctgggagcggggggcctggccagagggcgctgagaggagcagcaggccagacaccctgctgagccctgagcagcctgtgtgcccagctgggggcagcggcggcccccccagcagcgccagccctgaggtggaggccggcccccagggctgtgccacagagccccggccccacagaggagagctgagccccagcttcctgaacccccccctgccccccagcattgatgaccgggacctgagcacagaggaggtgcggctggtgggccggggcggcagaagaagagtgggcggccctggcaccaccggcggcccctgccctgtgacagatgagaccccacccaccagcgccagtgacagcggcagcagccagagcgacagtgatgtgcccccagagacagaagaatgtcccagcatcacagctgaggccgccctggacagtgatgaagatggagacttcctgcctgtggacaaggccggcggcgtgtctggcacccaccacccccggcccggccatgaccccccacccctgccccagcctgacccccggcccagcccccccaggccagatgtgtgcatggctgaccctgagggcctgagcagcgagagcggccgggtggagcggctgcgggagaaggagaaggtgcagggccgggtgggcagaagagcccctgggaaggccaagccagccagccctgcccggcggctggacctgcggggcaagaggagccccacccctgggaagggccctgctgaccgggccagccgggccccaccccggcccaggagcaccaccagccaggtgaccccagctgaggagaaggatggccacagccccatgagcaagggcctggtgaatggcctgaaggccggccccatggccctgagcagcaagggcagcagcggggcccctgtgtatgtggacctggcctacatccccaaccactgcagcggcaagacagctgacctggacttcttcagaagagtgcgggccagctactacgtggtgtctggaaatgaccctgccaatggagagcccagcagagctgtgctggatgccctgctggagggcaaggcccagtggggcgagaacctgcaggtgtctgtgaccctcatccccacccatgacacagaggtgacccgggagtggtaccagcagacccatgagcagcagcagcagctgaatgtgctggtgctggccagcagcagcacagtggtgatgcaggatgagagcttccctgcctgcaagattgagttctag

SEQ ID NO: 127770 - DNA, 1884 bp, Artificial Sequence
  derived and/or modified sequence
atggatggagtggccgagttctctgaatatgtgtctgagaccgtggatgtgcccagcccctttgacctgctggagccccccaccagcggcggcttcctgaagctgagcaagccctgctgctacatcttccctgggggccgcggggacagcgccctgtttgctgtgaatggcttcaacatcctggtggatggcggcagtgacaggaagagctgcttctggaagctggtgcgccacctggacagaattgacagcgtgctgctgacccacatcggggctgacaacctgcccggcatcaatggcctgctgcagaggaaggtggccgagctggaggaggagcagagccagggcagcagcagctacagcgactgggtgaagaacctgatcagccctgagctgggcgtggtgttcttcaacgtgcctgagaagctgcggctgcctgatgccagcaggaaggccaagaggagcattgaggaggcctgcctgaccctgcagcacctgaaccggctgggcatccaggccgagcccctgtacagagtggtgagcaacaccatcgagcccctgaccctcttccacaagatgggcgtgggccgcctggacatgtatgtgctgaaccctgtgaaggacagcaaggagatgcagttcctgatgcagaagtgggccggcaacagcaaggccaagacaggaattgtgctgcccaacgggaaggaggccgagatctctgtgccctacctgaccagcatcacagccctggtggtgtggctgcctgccaaccccacagagaagatcgtgcgggtgctcttccctggaaatgccccccagaacaagatcctggagggcctggagaagctgcggcacctggacttcctgcgctaccctgtggccacccagaaggacctggccagcggggctgtgcccaccaacctgaagcccagcaagatcaagcagagagctgacagcaaggagagcctgaaggccaccaccaagacagctgtgtccaagctggccaagcgggaggaggtggtggaggagggcgccaaggaggcccggtctgagctggccaaggagctggccaagacagagaagaaggccaaggagagcagcgagaagcccccagagaagccagccaagccagagcgggtgaagacagagagcagcgaggccctgaaggccgagaagaggaagctgatcaaggacaaggtgggcaagaagcacctgaaggagaagatcagcaagctggaggagaagaaggacaaggagaagaaggagatcaagaaggagaggaaggagctgaagaaggatgagggcaggaaggaggagaagaaggatgccaagaaggaggagaagaggaaggacaccaagccagagctgaagaagatcagcaagccagacctgaagcccttcaccccagaggtgaggaagaccctgtacaaggccaaggtgcccggccgggtgaagattgacaggagccgggccatccggggggagaaggagctgagcagcgagccccagaccccaccagcccagaagggcaccgtgcccctgcccaccatcagcggccaccgggagctggtgctgagcagccctgaggacctgacccaggactttgaggagatgaagcgggaggagcgggccctgctggccgagcagagggacaccggcctgggggacaagcccttccccctggacacagctgaggagggcccccccagcacagccatccagggcaccccaccttctgtgcccggcctgggccaggaggagcacgtgatgaaggagaaggagctggtgcctgaggtgcctgaggagcagggcagcaaggaccggggcctggacagcggggctgagacagaggagaagaagaagaagaagaagaagaagaagtag

SEQ ID NO: 127771 - DNA, 10258 bp, Artificial Sequence
  derived and/or modified sequence
tgcagactcttccctgaagctgccggctgaggccggagctgccgcctccatgagaggcttcctcctacaccccagggccagaggaccctttgccaccagagtgagatcctagagaccatcatcctggtaaatcccagtgcagacagcatcagctctgaggttcatcatcttcttagcagctcatcagcttataaactactaatcttgagtgggcaaagtttagagcctgggggagacctcatcctacagagtggcacctactcatatgaaaactttgcccaggtccttcacaaccccgagatttcccaattgctcagcaatagagaccctgggatacaggccttccttaccgtgtcctgcttaggggaaggtgattggagccacctgggattatccagttcccaagagaccctgcacctccggctaaaccctgagcccactctgcccaccatggacggcgtggctgagttctccgagtatgtctctgagactgtggacgtgccatccccatttgacctactagagccccccacctcagggggcttcctcaagctctccaagccttgttgctacatcttcccaggtggtcgtggggactctgccctctttgctgtcaatggtttcaacatcctggtggatggtggctctgatcgcaagtcctgtttttggaagctggtacggcacttggaccgcattgactcggtgctactcacacacattggggcagacaacctgccaggcatcaatggactactgcagcgcaaagtggcagagctagaggaggagcagtcccagggctctagcagttacagcgactgggtgaagaaccttatctctcctgagcttggagttgtctttttcaacgtgcctgagaagctgcggcttcctgatgcctcccggaaagccaagcgtagcattgaggaggcctgcctcactctgcagcacttaaaccgcctgggcatccaggctgagcctctatatcgtgtggtcagcaataccattgagccactgaccctcttccacaaaatgggtgtgggccggctggacatgtatgtcctcaaccctgtcaaggacagcaaggagatgcagttcctcatgcaaaagtgggcaggcaatagtaaagccaagacaggcatcgtgctgcccaatgggaaggaggctgagatctccgtgccctaccttacctctatcactgctctggtggtctggctaccagccaatcccactgagaagattgtgcgtgtgctttttccaggaaatgctccccaaaacaagatcttggagggcctagaaaagcttcggcatctggacttcctgcgttaccctgtggccacgcagaaggacctggcttctggggctgtgcctaccaacctcaagcccagcaaaatcaaacagcgggctgatagcaaggagagcctcaaagccactaccaagacggccgtgagcaagttggccaaacgggaggaggtggtagaagagggagccaaggaggcacgttcagagctggccaaggagttagccaagacagagaagaaggcaaaagagtcatctgagaagcccccagagaagcctgccaagcctgagagggtgaagacagagtcaagtgaggcactgaaggcagagaagcgaaagctgatcaaagacaaggtagggaaaaagcaccttaaagaaaagatatcaaagctggaagaaaaaaaagacaaggagaaaaaagagatcaaaaaggagaggaaagagctcaagaaggatgaaggaaggaaggaggagaagaaggatgccaagaaggaggagaagaggaaagataccaaacctgagctcaagaagatttccaagccagacctaaagccctttactcctgaggtacgtaagaccctctataaagccaaggtccctggaagagtcaaaatagacaggagccgtgctatccgtggggagaaggagctgtcttctgagccccagacacccccagcccagaagggaactgtaccactcccaaccatcagtgggcacagggagctggtcctatcctcaccagaggacctcacacaggactttgaggagatgaagcgtgaggagagggctttgctggctgaacaaagggacacaggactaggagataagccattccctctagacactgcagaggagggacccccaagtacagctatccagggaacaccaccctctgttccagggctgggacaagaagaacatgtgatgaaggagaaagagcttgtcccagaggtccctgaggaacaaggcagcaaggacagaggcctagactctggggctgaaacagaggaagagaaagatacctgggaggaaaagaagcagagggaagcagagaggctcccagacagaacagaagccagagaggaaagtgaacctgaagtaaaggaggatgtgatagaaaaggctgagttagaagaaatggaggaggtacacccttcagatgaggaggaagaggacgcgacaaaagctgagggtttttaccaaaaacatatgcaggaacccttgaaggtaactccaaggagccgggaggcttttgggggtcgggaattgggactccagggcaaggcccctgagaaggagacctcgttattcctaagcagcctgaccacacctgcaggagccactgagcatgtctcttacatccaggatgagacaatccctggctactcagagactgagcagaccatctcagatgaggagatccatgatgagccggaggagcgcccagctccacccagatttcatacaagtacatatgacctgcccgggcctgaaggtgctggcccattcgaagccagccaacctgccgatagtgctgttcctgctacctctggcaaagtctatggaacgccagagactgaactcacctaccccactaacatagtggctgcccctttggctgaagaggaacatgtgtcctcggccacttcaatcactgagtgtgacaaactttcttcctttgccacatcagtggctgaggaccaatctgtggcctcacttacagctccccagacagaggagacaggcaagagctccctgctgcttgacacagtcacaagcatcccttcctcccgtactgaagctacgcagggcttggactatgtgccatcagctggtaccatctcacccacctcctcactggaagaagacaagggcttcaaatcaccaccctgtgaggacttctctgtgactggggagtcagagaagagaggagagatcatagggaaaggcttgtctggagagagagctgtggaagaggaagaggaggagacagcaaacgtagagatgtctgagaaactttgcagtcaatatggaactccagtgtttagtgcccctgggcatgccctacatccaggagaaccagcccttggagaagcagaggagcggtgccttagcccagatgacagcacagtgaagatggcttctcctccaccatctggcccacccagtgccacccacacaccctttcatcagtccccagtggaagaaaagtctgagccccaagactttcaggaggcagactcctggggagacactaagcgcacaccaggtgtgggcaaagaagatgctgctgaggagacagtcaagccagggcctgaagagggcacactagagaaggaagagaaagttcctcctcccaggagcccccaggcccaggaagcacctgtcaacattgatgaggggcttacaggctgtaccattcaactgttgccagcacaggataaagcaatagtctttgagattatggaggcaggagagcccacaggcccaattctgggagcagaagcccttcccggaggtttgaggactttaccccaagaacctggcaaacctcagaaagatgaggtgctcagatatcctgaccgaagcctctctcctgaagatgcagaatccctctctgtcctcagcgtgccctccccagacactgccaaccaagagcctacccccaagtctccctgtggcctgacagaacagtacctacacaaagaccgttggccagaggtatctccagaagacacccagtcactttctctgtcagaagagagtcccagcaaggagacctccctggatgtctcttctaagcagctctctccagaaagccttggcaccctccagtttggggaactaaaccttgggaaggaagaaatggggcatctgatgcaggccgaggatacctctcaccacacagctcccatgtctgttccagagccccatgcagccacagcgtcacctcccacagatgggacaactcgatactctgcacagacagacatcacagatgacagccttgacaggaagtcacctgccagctcattctctcactctacaccttcaggaaatgggaagtacttacctggggcgatcacaagccctgatgaacacattctgacacctgatagctccttctccaagagtcctgagtctttgccaggccctgccttggaggacattgccataaagtgggaagataaagttccagggttgaaagacagaacctcagaacagaagaaggaacctgagccaaaggatgaagttttacagcagaaagacaaaactctggagcacaaggaggtggtagagccgaaggatacagccatctatcagaaagatgaggctctgcatgtaaagaatgaggctgtgaaacagcaggataaggctttagaacaaaagggcagagacttagagcaaaaagacacagccctagaacagaaggacaaggccctggaaccaaaagacaaagacttagaagaaaaagacaaggccctggaacagaaggataagattccagaagagaaagacaaagccttagaacaaaaggatacagccctggaacagaaggacaaggccctggaaccaaaagataaagacttggaacaaaaggacagggtcctagaacagaaggagaagatcccagaagagaaagacaaagccttagatcaaaaagtcagaagtgttgaacataaggctccggaggacacggtcgctgaaatgaaggacagagacctagaacagacagacaaagcccctgaacagaaacaccaggcccaggaacaaaaggataaagtctcagaaaagaaggatcaggccttagaacaaaaatactgggctttgggacagaaggatgaagccctggaacaaaacattcaggctctggaagagaaccaccaaactcaggagcaggagagcctagtgcaggaggataaaaccaggaaaccaaagatgctagaggaaaaatccccagaaaaggtcaaggccatggaagagaagttagaagctcttctggagaagaccaaagctctgggcctggaagagagcctagtgcaggagggcagggccagagagcaggaagaaaagtactggagggggcaggatgtggtccaggagtggcaagaaacatctcctaccagagaggagccggctggagaacagaaagagcttgccccggcatgggaggacacatctcctgagcaggacaataggtattggaggggcagagaggatgtggccttggaacaggacacatactggagggagctaagctgtgagcggaaggtctggttccctcacgagctggatggccagggggcccgcccacactacactgaggaacgggaaagcactttcctagatgagggcccagatgatgagcaagaagtacccctgcgggaacacgcaacccggagcccctgggcctcagacttcaaggatttccaggaatcctcaccacagaaggggctagaggtggagcgctggcttgctgaatcaccagttgggttgccaccagaggaagaggacaaactgacccgctctccctttgagatcatctcccctccagcttccccacctgagatggttggacaaagggttccttcagccccaggacaagagagtcctatcccagaccctaagctcatgccacacatgaagaatgaacccactactccctcatggctggctgacatcccaccctgggtgcccaaggacagacccctcccccctgcacccctctccccagctcctggtccccccacacctgccccggaatcccatactcctgcacccttctcttggggcacagccgagtatgacagtgtggtggctgcagtgcaggagggggcagctgagttggaaggtgggccatactcccccctggggaaggactaccgcaaggctgaaggggaaagggaagaagaaggtagggctgaggctcctgacaaaagctcacacagctcaaaggtaccagaggccagcaaaagccatgccaccacggagcctgagcagactgagccggagcagagagagcccacaccctatcctgatgagagaagctttcagtatgcagacatctatgagcagatgatgcttactgggcttggccctgcatgccccactagagagcctccacttggagcagctggggattggcccccatgcctctcaaccaaggaggcagctgccggccgaaacacatctgcagagaaggagctttcatctcctatctcacccaagagcctccagtctgacactccaaccttcagctatgcagccctggcaggacccactgtacccccaaggccagagccagggccaagtatggagcccagcctcaccccacctgcagttcccccccgtgctcctatcctgagcaaaggcccaagcccccctcttaatggtaacatcctgagctgcagcccagataggaggtccccatcccccaaggaatcaggccggagtcactgggatgacagcactagtgactcagaactggagaagggggctcgggaacagccagaaaaagaggcccaatccccaagtcctcctcaccccattcctatggggtcccccacattatggccagaaactgaggcacatgttagccctcccttggactcacacctggggcctgcccgacccagtctggacttccctgcttcagcctttggcttctcctcattgcagccagctcccccacagctgccctctccagctgaaccccgctcggcaccctgtggctcccttgccttctctggggatcgagctctggctctggctccaggaccccccaccagaacccggcatgatgaatacctggaagtgaccaaggcccccagcctggattcctcactgccccagctcccatcacccagttctcctggggcccctctcctctccaatctgccacgacctgcctcaccagccctgtctgagggctcctcctctgaggctaccacgcctgtgatttcaagtgtggcggagcgcttctctccaagccttgaggctgcagaacaggagtctggagagctggacccaggaatggaaccagctgcccacagcctctgggacctcactcctctgagcccagcacccccagcttcactggacttggccctagctccagctccaagcctgcctggagacatgggtgatggcatcctgccgtgccacctggagtgctcagaggcagccacggagaagccaagccccttccaggttccctctgaggattgtgcagccaatggcccaactgaaaccagccctaaccccccaggccctgccccagccaaggctgaaaatgaagaggctgcggcttgccctgcctgggaacgtggggcctggcctgaaggagctgagaggagctcccggcctgacacattgctctcccctgagcagccagtgtgtcctgcagggggctccgggggcccacccagcagtgcctctcctgaggtcgaagctgggccccagggatgtgccactgagcctcggccccatcgtggggagctctccccatccttcctgaacccacctctgcccccatccatagatgatagggacctctcaactgaggaagttcggctagtaggaagaggggggcggcgccgggtaggggggccagggaccactgggggcccatgccctgtgactgatgagacaccccctacatcagccagtgactcaggctcctcacagtcagattctgatgtcccgccagaaactgaggagtgtccgtccatcacagctgaggcagccctcgactcagatgaagatggagacttcctacctgtggacaaagctgggggtgtcagtggtactcaccaccccaggcctggccatgacccacctcctctcccacagccagacccccgcccatcccctccccgccctgatgtgtgcatggctgaccccgaggggctcagctcagagtctgggagagtagagaggctacgggagaaggaaaaggttcaggggcgagtagggcgcagggccccaggcaaggccaagccagcgtcccctgcacggcgtctggatcttcggggaaaacgctcacccacccctggtaaagggcctgcagatcgagcatcccgggccccacctcgaccacgcagcaccacaagccaggtcaccccagcagaggaaaaggatggacacagccccatgtccaaaggcctagtcaatggactcaaggcaggaccaatggccttgagttccaagggcagctctggtgcccctgtatatgtggatctcgcctacatcccgaatcattgcagtggcaagactgctgaccttgacttcttccgtcgagtgcgtgcatcctactatgtggtcagtgggaatgaccctgccaatggcgagccaagccgggctgtgctggatgccctgctggagggcaaggcccagtggggggagaatcttcaggtgactctgatccctactcatgacacggaggtgactcgtgagtggtaccaacaaactcatgagcagcagcaacaactgaatgtcctggtcctggctagcagcagcaccgtggtgatgcaggatgagtccttccctgcctgcaagattgagttctgaaagagccgccctcccttccccaaggatccactcccccagctcctttagagaatggctactgctgagtcctttggggttgagggagatgggagctagggggaggggagggagatgtcttgttgtggggacttgggctgggctaaatgggaggggttgtccctccccatcatccattcctgtgaggtgtctcaaaccaaagttaacagggagaggatgggggaggggacaaattagaataggatagcatctgatgcctgagaaccctctcctagcactgtcaaatgctggtattgaatggggactgaggatgggtctcagagagcaacctcctccctcgtagagggagattatatccccaactccagggacctctttatctcaatctatttatttggcatcctgggagggatttccaatagtaatttatgtgacctggggcaggataccgtcagtgaggtgcccagagctgcaccctttcctccatttcccatcccccatctcctcaaccaccagggtctgagttctagcagggtcctgggggtatcccactgctatactgttctactgcttccctcagtatctgaatgtctcaatttaaaacttgaagctctttagaccaatagactggtgagaggagaaaggagcttatcccccagaccctgctttataccattcacatcccagggctgtgtccagacagcacaaaacggcaaggagagcccaagccccaatgccagaattcttccaaactccctgactctttgaagtttttactcaccccatttcaattatcctgatcccttctcatcccctgcttggcttctctgcatgtggtcatctgctgtggcttggtgtttaatgggttaaaaataagccactgcctgacatcccaacatttgacaccccagcaatgtgtgactcccccaacattccactatgccatcctgcagctgaaatgggaacactggctgcctctccaaacccgctcttggacagaggatctgggaggtggaagccaggccagaggacttggggaaaatgagatggaggaaggaaaaagggagaagctgagccacagcttaactcctacagagtgaaatgaaaacgggctgaaaataccaccccaggagaggacctcgccccaagcaagccagtgagcagccctgccagactactgccagactgagaaacccagaagctggtagtcatgtgggcttgccttctctgccaaacgactgggaaaccaaaatgagcccaccttgtgttcttcctagctccaccctccccgtgctgctgtgttctgctcctccccacgcttccctgctatagttcccagctgctgtaacggagccacctccaactctaacaataaaccaagttcattgcagatagtgta

SEQ ID NO: 127772 - DNA, 10553 bp, Artificial Sequence
  derived and/or modified sequence
gctgccggactaacactccgcgggtgtttccatggagaccgaggccgagcctgcgcggcctcacggcgttgccatggagacaactccggggctggggctccgaagtcccggcgcaccgctggctcagaaccccgcggagctgctgtgcgaggccggagccgcggtggcggctgcacgctgggacctgcagaagcactctttgctaattgtgatcggcgatatcggtacagagagtcagctgagggccgtgcgggcccaccttgaacaagggattctctcctggaacattgacctgtcatcctttgacttgaaccaacagttgagactcttcattacccggcacctagctcacttctcctcagaggtcaaaggccagaggaccctttgccaccagagtgagatcctagagaccatcatcctggtaaatcccagtgcagacagcatcagctctgaggttcatcatcttcttagcagctcatcagcttataaactactaatcttgagtgggcaaagtttagagcctgggggagacctcatcctacagagtggcacctactcatatgaaaactttgcccaggtccttcacaaccccgagatttcccaattgctcagcaatagagaccctgggatacaggccttccttaccgtgtcctgcttaggggaaggtgattggagccacctgggattatccagttcccaagagaccctgcacctccggctaaaccctgagcccactctgcccaccatggacggcgtggctgagttctccgagtatgtctctgagactgtggacgtgccatccccatttgacctactagagccccccacctcagggggcttcctcaagctctccaagccttgttgctacatcttcccaggtggtcgtggggactctgccctctttgctgtcaatggtttcaacatcctggtggatggtggctctgatcgcaagtcctgtttttggaagctggtacggcacttggaccgcattgactcggtgctactcacacacattggggcagacaacctgccaggcatcaatggactactgcagcgcaaagtggcagagctagaggaggagcagtcccagggctctagcagttacagcgactgggtgaagaaccttatctctcctgagcttggagttgtctttttcaacgtgcctgagaagctgcggcttcctgatgcctcccggaaagccaagcgtagcattgaggaggcctgcctcactctgcagcacttaaaccgcctgggcatccaggctgagcctctatatcgtgtggtcagcaataccattgagccactgaccctcttccacaaaatgggtgtgggccggctggacatgtatgtcctcaaccctgtcaaggacagcaaggagatgcagttcctcatgcaaaagtgggcaggcaatagtaaagccaagacaggcatcgtgctgcccaatgggaaggaggctgagatctccgtgccctaccttacctctatcactgctctggtggtctggctaccagccaatcccactgagaagattgtgcgtgtgctttttccaggaaatgctccccaaaacaagatcttggagggcctagaaaagcttcggcatctggacttcctgcgttaccctgtggccacgcagaaggacctggcttctggggctgtgcctaccaacctcaagcccagcaaaatcaaacagcgggctgatagcaaggagagcctcaaagccactaccaagacggccgtgagcaagttggccaaacgggaggaggtggtagaagagggagccaaggaggcacgttcagagctggccaaggagttagccaagacagagaagaaggcaaaagagtcatctgagaagcccccagagaagcctgccaagcctgagagggtgaagacagagtcaagtgaggcactgaaggcagagaagcgaaagctgatcaaagacaaggtagggaaaaagcaccttaaagaaaagatatcaaagctggaagaaaaaaaagacaaggagaaaaaagagatcaaaaaggagaggaaagagctcaagaaggatgaaggaaggaaggaggagaagaaggatgccaagaaggaggagaagaggaaagataccaaacctgagctcaagaagatttccaagccagacctaaagccctttactcctgaggtacgtaagaccctctataaagccaaggtccctggaagagtcaaaatagacaggagccgtgctatccgtggggagaaggagctgtcttctgagccccagacacccccagcccagaagggaactgtaccactcccaaccatcagtgggcacagggagctggtcctatcctcaccagaggacctcacacaggactttgaggagatgaagcgtgaggagagggctttgctggctgaacaaagggacacaggactaggagataagccattccctctagacactgcagaggagggacccccaagtacagctatccagggaacaccaccctctgttccagggctgggacaagaagaacatgtgatgaaggagaaagagcttgtcccagaggtccctgaggaacaaggcagcaaggacagaggcctagactctggggctgaaacagaggaagagaaagatacctgggaggaaaagaagcagagggaagcagagaggctcccagacagaacagaagccagagaggaaagtgaacctgaagtaaaggaggatgtgatagaaaaggctgagttagaagaaatggaggaggtacacccttcagatgaggaggaagaggacgcgacaaaagctgagggtttttaccaaaaacatatgcaggaacccttgaaggtaactccaaggagccgggaggcttttgggggtcgggaattgggactccagggcaaggcccctgagaaggagacctcgttattcctaagcagcctgaccacacctgcaggagccactgagcatgtctcttacatccaggatgagacaatccctggctactcagagactgagcagaccatctcagatgaggagatccatgatgagccggaggagcgcccagctccacccagatttcatacaagtacatatgacctgcccgggcctgaaggtgctggcccattcgaagccagccaacctgccgatagtgctgttcctgctacctctggcaaagtctatggaacgccagagactgaactcacctaccccactaacatagtggctgcccctttggctgaagaggaacatgtgtcctcggccacttcaatcactgagtgtgacaaactttcttcctttgccacatcagtggctgaggaccaatctgtggcctcacttacagctccccagacagaggagacaggcaagagctccctgctgcttgacacagtcacaagcatcccttcctcccgtactgaagctacgcagggcttggactatgtgccatcagctggtaccatctcacccacctcctcactggaagaagacaagggcttcaaatcaccaccctgtgaggacttctctgtgactggggagtcagagaagagaggagagatcatagggaaaggcttgtctggagagagagctgtggaagaggaagaggaggagacagcaaacgtagagatgtctgagaaactttgcagtcaatatggaactccagtgtttagtgcccctgggcatgccctacatccaggagaaccagcccttggagaagcagaggagcggtgccttagcccagatgacagcacagtgaagatggcttctcctccaccatctggcccacccagtgccacccacacaccctttcatcagtccccagtggaagaaaagtctgagccccaagactttcaggaggcagactcctggggagacactaagcgcacaccaggtgtgggcaaagaagatgctgctgaggagacagtcaagccagggcctgaagagggcacactagagaaggaagagaaagttcctcctcccaggagcccccaggcccaggaagcacctgtcaacattgatgaggggcttacaggctgtaccattcaactgttgccagcacaggataaagcaatagtctttgagattatggaggcaggagagcccacaggcccaattctgggagcagaagcccttcccggaggtttgaggactttaccccaagaacctggcaaacctcagaaagatgaggtgctcagatatcctgaccgaagcctctctcctgaagatgcagaatccctctctgtcctcagcgtgccctccccagacactgccaaccaagagcctacccccaagtctccctgtggcctgacagaacagtacctacacaaagaccgttggccagaggtatctccagaagacacccagtcactttctctgtcagaagagagtcccagcaaggagacctccctggatgtctcttctaagcagctctctccagaaagccttggcaccctccagtttggggaactaaaccttgggaaggaagaaatggggcatctgatgcaggccgaggatacctctcaccacacagctcccatgtctgttccagagccccatgcagccacagcgtcacctcccacagatgggacaactcgatactctgcacagacagacatcacagatgacagccttgacaggaagtcacctgccagctcattctctcactctacaccttcaggaaatgggaagtacttacctggggcgatcacaagccctgatgaacacattctgacacctgatagctccttctccaagagtcctgagtctttgccaggccctgccttggaggacattgccataaagtgggaagataaagttccagggttgaaagacagaacctcagaacagaagaaggaacctgagccaaaggatgaagttttacagcagaaagacaaaactctggagcacaaggaggtggtagagccgaaggatacagccatctatcagaaagatgaggctctgcatgtaaagaatgaggctgtgaaacagcaggataaggctttagaacaaaagggcagagacttagagcaaaaagacacagccctagaacagaaggacaaggccctggaaccaaaagacaaagacttagaagaaaaagacaaggccctggaacagaaggataagattccagaagagaaagacaaagccttagaacaaaaggatacagccctggaacagaaggacaaggccctggaaccaaaagataaagacttggaacaaaaggacagggtcctagaacagaaggagaagatcccagaagagaaagacaaagccttagatcaaaaagtcagaagtgttgaacataaggctccggaggacacggtcgctgaaatgaaggacagagacctagaacagacagacaaagcccctgaacagaaacaccaggcccaggaacaaaaggataaagtctcagaaaagaaggatcaggccttagaacaaaaatactgggctttgggacagaaggatgaagccctggaacaaaacattcaggctctggaagagaaccaccaaactcaggagcaggagagcctagtgcaggaggataaaaccaggaaaccaaagatgctagaggaaaaatccccagaaaaggtcaaggccatggaagagaagttagaagctcttctggagaagaccaaagctctgggcctggaagagagcctagtgcaggagggcagggccagagagcaggaagaaaagtactggagggggcaggatgtggtccaggagtggcaagaaacatctcctaccagagaggagccggctggagaacagaaagagcttgccccggcatgggaggacacatctcctgagcaggacaataggtattggaggggcagagaggatgtggccttggaacaggacacatactggagggagctaagctgtgagcggaaggtctggttccctcacgagctggatggccagggggcccgcccacactacactgaggaacgggaaagcactttcctagatgagggcccagatgatgagcaagaagtacccctgcgggaacacgcaacccggagcccctgggcctcagacttcaaggatttccaggaatcctcaccacagaaggggctagaggtggagcgctggcttgctgaatcaccagttgggttgccaccagaggaagaggacaaactgacccgctctccctttgagatcatctcccctccagcttccccacctgagatggttggacaaagggttccttcagccccaggacaagagagtcctatcccagaccctaagctcatgccacacatgaagaatgaacccactactccctcatggctggctgacatcccaccctgggtgcccaaggacagacccctcccccctgcacccctctccccagctcctggtccccccacacctgccccggaatcccatactcctgcacccttctcttggggcacagccgagtatgacagtgtggtggctgcagtgcaggagggggcagctgagttggaaggtgggccatactcccccctggggaaggactaccgcaaggctgaaggggaaagggaagaagaaggtagggctgaggctcctgacaaaagctcacacagctcaaaggtaccagaggccagcaaaagccatgccaccacggagcctgagcagactgagccggagcagagagagcccacaccctatcctgatgagagaagctttcagtatgcagacatctatgagcagatgatgcttactgggcttggccctgcatgccccactagagagcctccacttggagcagctggggattggcccccatgcctctcaaccaaggaggcagctgccggccgaaacacatctgcagagaaggagctttcatctcctatctcacccaagagcctccagtctgacactccaaccttcagctatgcagccctggcaggacccactgtacccccaaggccagagccagggccaagtatggagcccagcctcaccccacctgcagttcccccccgtgctcctatcctgagcaaaggcccaagcccccctcttaatggtaacatcctgagctgcagcccagataggaggtccccatcccccaaggaatcaggccggagtcactgggatgacagcactagtgactcagaactggagaagggggctcgggaacagccagaaaaagaggcccaatccccaagtcctcctcaccccattcctatggggtcccccacattatggccagaaactgaggcacatgttagccctcccttggactcacacctggggcctgcccgacccagtctggacttccctgcttcagcctttggcttctcctcattgcagccagctcccccacagctgccctctccagctgaaccccgctcggcaccctgtggctcccttgccttctctggggatcgagctctggctctggctccaggaccccccaccagaacccggcatgatgaatacctggaagtgaccaaggcccccagcctggattcctcactgccccagctcccatcacccagttctcctggggcccctctcctctccaatctgccacgacctgcctcaccagccctgtctgagggctcctcctctgaggctaccacgcctgtgatttcaagtgtggcggagcgcttctctccaagccttgaggctgcagaacaggagtctggagagctggacccaggaatggaaccagctgcccacagcctctgggacctcactcctctgagcccagcacccccagcttcactggacttggccctagctccagctccaagcctgcctggagacatgggtgatggcatcctgccgtgccacctggagtgctcagaggcagccacggagaagccaagccccttccaggttccctctgaggattgtgcagccaatggcccaactgaaaccagccctaaccccccaggccctgccccagccaaggctgaaaatgaagaggctgcggcttgccctgcctgggaacgtggggcctggcctgaaggagctgagaggagctcccggcctgacacattgctctcccctgagcagccagtgtgtcctgcagggggctccgggggcccacccagcagtgcctctcctgaggtcgaagctgggccccagggatgtgccactgagcctcggccccatcgtggggagctctccccatccttcctgaacccacctctgcccccatccatagatgatagggacctctcaactgaggaagttcggctagtaggaagaggggggcggcgccgggtaggggggccagggaccactgggggcccatgccctgtgactgatgagacaccccctacatcagccagtgactcaggctcctcacagtcagattctgatgtcccgccagaaactgaggagtgtccgtccatcacagctgaggcagccctcgactcagatgaagatggagacttcctacctgtggacaaagctgggggtgtcagtggtactcaccaccccaggcctggccatgacccacctcctctcccacagccagacccccgcccatcccctccccgccctgatgtgtgcatggctgaccccgaggggctcagctcagagtctgggagagtagagaggctacgggagaaggaaaaggttcaggggcgagtagggcgcagggccccaggcaaggccaagccagcgtcccctgcacggcgtctggatcttcggggaaaacgctcacccacccctggtaaagggcctgcagatcgagcatcccgggccccacctcgaccacgcagcaccacaagccaggtcaccccagcagaggaaaaggatggacacagccccatgtccaaaggcctagtcaatggactcaaggcaggaccaatggccttgagttccaagggcagctctggtgcccctgtatatgtggatctcgcctacatcccgaatcattgcagtggcaagactgctgaccttgacttcttccgtcgagtgcgtgcatcctactatgtggtcagtgggaatgaccctgccaatggcgagccaagccgggctgtgctggatgccctgctggagggcaaggcccagtggggggagaatcttcaggtgactctgatccctactcatgacacggaggtgactcgtgagtggtaccaacaaactcatgagcagcagcaacaactgaatgtcctggtcctggctagcagcagcaccgtggtgatgcaggatgagtccttccctgcctgcaagattgagttctgaaagagccgccctcccttccccaaggatccactcccccagctcctttagagaatggctactgctgagtcctttggggttgagggagatgggagctagggggaggggagggagatgtcttgttgtggggacttgggctgggctaaatgggaggggttgtccctccccatcatccattcctgtgaggtgtctcaaaccaaagttaacagggagaggatgggggaggggacaaattagaataggatagcatctgatgcctgagaaccctctcctagcactgtcaaatgctggtattgaatggggactgaggatgggtctcagagagcaacctcctccctcgtagagggagattatatccccaactccagggacctctttatctcaatctatttatttggcatcctgggagggatttccaatagtaatttatgtgacctggggcaggataccgtcagtgaggtgcccagagctgcaccctttcctccatttcccatcccccatctcctcaaccaccagggtctgagttctagcagggtcctgggggtatcccactgctatactgttctactgcttccctcagtatctgaatgtctcaatttaaaacttgaagctctttagaccaatagactggtgagaggagaaaggagcttatcccccagaccctgctttataccattcacatcccagggctgtgtccagacagcacaaaacggcaaggagagcccaagccccaatgccagaattcttccaaactccctgactctttgaagtttttactcaccccatttcaattatcctgatcccttctcatcccctgcttggcttctctgcatgtggtcatctgctgtggcttggtgtttaatgggttaaaaataagccactgcctgacatcccaacatttgacaccccagcaatgtgtgactcccccaacattccactatgccatcctgcagctgaaatgggaacactggctgcctctccaaacccgctcttggacagaggatctgggaggtggaagccaggccagaggacttggggaaaatgagatggaggaaggaaaaagggagaagctgagccacagcttaactcctacagagtgaaatgaaaacgggctgaaaataccaccccaggagaggacctcgccccaagcaagccagtgagcagccctgccagactactgccagactgagaaacccagaagctggtagtcatgtgggcttgccttctctgccaaacgactgggaaaccaaaatgagcccaccttgtgttcttcctagctccaccctccccgtgctgctgtgttctgctcctccccacgcttccctgctatagttcccagctgctgtaacggagccacctccaactctaacaataaaccaagttcattgcagatagtgta

SEQ ID NO: 127773 - DNA, 10281 bp, Artificial Sequence
  derived and/or modified sequence
actcccaccctaagtgctgcagactcttccctgaagctgccggctgaggccggagctgccgcctccatgagaggcttcctcctacaccccagggccagaggaccctttgccaccagagtgagatcctagagaccatcatcctggtaaatcccagtgcagacagcatcagctctgaggttcatcatcttcttagcagctcatcagcttataaactactaatcttgagtgggcaaagtttagagcctgggggagacctcatcctacagagtggcacctactcatatgaaaactttgcccaggtccttcacaaccccgagatttcccaattgctcagcaatagagaccctgggatacaggccttccttaccgtgtcctgcttaggggaaggtgattggagccacctgggattatccagttcccaagagaccctgcacctccggctaaaccctgagcccactctgcccaccatggacggcgtggctgagttctccgagtatgtctctgagactgtggacgtgccatccccatttgacctactagagccccccacctcagggggcttcctcaagctctccaagccttgttgctacatcttcccaggtggtcgtggggactctgccctctttgctgtcaatggtttcaacatcctggtggatggtggctctgatcgcaagtcctgtttttggaagctggtacggcacttggaccgcattgactcggtgctactcacacacattggggcagacaacctgccaggcatcaatggactactgcagcgcaaagtggcagagctagaggaggagcagtcccagggctctagcagttacagcgactgggtgaagaaccttatctctcctgagcttggagttgtctttttcaacgtgcctgagaagctgcggcttcctgatgcctcccggaaagccaagcgtagcattgaggaggcctgcctcactctgcagcacttaaaccgcctgggcatccaggctgagcctctatatcgtgtggtcagcaataccattgagccactgaccctcttccacaaaatgggtgtgggccggctggacatgtatgtcctcaaccctgtcaaggacagcaaggagatgcagttcctcatgcaaaagtgggcaggcaatagtaaagccaagacaggcatcgtgctgcccaatgggaaggaggctgagatctccgtgccctaccttacctctatcactgctctggtggtctggctaccagccaatcccactgagaagattgtgcgtgtgctttttccaggaaatgctccccaaaacaagatcttggagggcctagaaaagcttcggcatctggacttcctgcgttaccctgtggccacgcagaaggacctggcttctggggctgtgcctaccaacctcaagcccagcaaaatcaaacagcgggctgatagcaaggagagcctcaaagccactaccaagacggccgtgagcaagttggccaaacgggaggaggtggtagaagagggagccaaggaggcacgttcagagctggccaaggagttagccaagacagagaagaaggcaaaagagtcatctgagaagcccccagagaagcctgccaagcctgagagggtgaagacagagtcaagtgaggcactgaaggcagagaagcgaaagctgatcaaagacaaggtagggaaaaagcaccttaaagaaaagatatcaaagctggaagaaaaaaaagacaaggagaaaaaagagatcaaaaaggagaggaaagagctcaagaaggatgaaggaaggaaggaggagaagaaggatgccaagaaggaggagaagaggaaagataccaaacctgagctcaagaagatttccaagccagacctaaagccctttactcctgaggtacgtaagaccctctataaagccaaggtccctggaagagtcaaaatagacaggagccgtgctatccgtggggagaaggagctgtcttctgagccccagacacccccagcccagaagggaactgtaccactcccaaccatcagtgggcacagggagctggtcctatcctcaccagaggacctcacacaggactttgaggagatgaagcgtgaggagagggctttgctggctgaacaaagggacacaggactaggagataagccattccctctagacactgcagaggagggacccccaagtacagctatccagggaacaccaccctctgttccagggctgggacaagaagaacatgtgatgaaggagaaagagcttgtcccagaggtccctgaggaacaaggcagcaaggacagaggcctagactctggggctgaaacagaggaagagaaagatacctgggaggaaaagaagcagagggaagcagagaggctcccagacagaacagaagccagagaggaaagtgaacctgaagtaaaggaggatgtgatagaaaaggctgagttagaagaaatggaggaggtacacccttcagatgaggaggaagaggacgcgacaaaagctgagggtttttaccaaaaacatatgcaggaacccttgaaggtaactccaaggagccgggaggcttttgggggtcgggaattgggactccagggcaaggcccctgagaaggagacctcgttattcctaagcagcctgaccacacctgcaggagccactgagcatgtctcttacatccaggatgagacaatccctggctactcagagactgagcagaccatctcagatgaggagatccatgatgagccggaggagcgcccagctccacccagatttcatacaagtacatatgacctgcccgggcctgaaggtgctggcccattcgaagccagccaacctgccgatagtgctgttcctgctacctctggcaaagtctatggaacgccagagactgaactcacctaccccactaacatagtggctgcccctttggctgaagaggaacatgtgtcctcggccacttcaatcactgagtgtgacaaactttcttcctttgccacatcagtggctgaggaccaatctgtggcctcacttacagctccccagacagaggagacaggcaagagctccctgctgcttgacacagtcacaagcatcccttcctcccgtactgaagctacgcagggcttggactatgtgccatcagctggtaccatctcacccacctcctcactggaagaagacaagggcttcaaatcaccaccctgtgaggacttctctgtgactggggagtcagagaagagaggagagatcatagggaaaggcttgtctggagagagagctgtggaagaggaagaggaggagacagcaaacgtagagatgtctgagaaactttgcagtcaatatggaactccagtgtttagtgcccctgggcatgccctacatccaggagaaccagcccttggagaagcagaggagcggtgccttagcccagatgacagcacagtgaagatggcttctcctccaccatctggcccacccagtgccacccacacaccctttcatcagtccccagtggaagaaaagtctgagccccaagactttcaggaggcagactcctggggagacactaagcgcacaccaggtgtgggcaaagaagatgctgctgaggagacagtcaagccagggcctgaagagggcacactagagaaggaagagaaagttcctcctcccaggagcccccaggcccaggaagcacctgtcaacattgatgaggggcttacaggctgtaccattcaactgttgccagcacaggataaagcaatagtctttgagattatggaggcaggagagcccacaggcccaattctgggagcagaagcccttcccggaggtttgaggactttaccccaagaacctggcaaacctcagaaagatgaggtgctcagatatcctgaccgaagcctctctcctgaagatgcagaatccctctctgtcctcagcgtgccctccccagacactgccaaccaagagcctacccccaagtctccctgtggcctgacagaacagtacctacacaaagaccgttggccagaggtatctccagaagacacccagtcactttctctgtcagaagagagtcccagcaaggagacctccctggatgtctcttctaagcagctctctccagaaagccttggcaccctccagtttggggaactaaaccttgggaaggaagaaatggggcatctgatgcaggccgaggatacctctcaccacacagctcccatgtctgttccagagccccatgcagccacagcgtcacctcccacagatgggacaactcgatactctgcacagacagacatcacagatgacagccttgacaggaagtcacctgccagctcattctctcactctacaccttcaggaaatgggaagtacttacctggggcgatcacaagccctgatgaacacattctgacacctgatagctccttctccaagagtcctgagtctttgccaggccctgccttggaggacattgccataaagtgggaagataaagttccagggttgaaagacagaacctcagaacagaagaaggaacctgagccaaaggatgaagttttacagcagaaagacaaaactctggagcacaaggaggtggtagagccgaaggatacagccatctatcagaaagatgaggctctgcatgtaaagaatgaggctgtgaaacagcaggataaggctttagaacaaaagggcagagacttagagcaaaaagacacagccctagaacagaaggacaaggccctggaaccaaaagacaaagacttagaagaaaaagacaaggccctggaacagaaggataagattccagaagagaaagacaaagccttagaacaaaaggatacagccctggaacagaaggacaaggccctggaaccaaaagataaagacttggaacaaaaggacagggtcctagaacagaaggagaagatcccagaagagaaagacaaagccttagatcaaaaagtcagaagtgttgaacataaggctccggaggacacggtcgctgaaatgaaggacagagacctagaacagacagacaaagcccctgaacagaaacaccaggcccaggaacaaaaggataaagtctcagaaaagaaggatcaggccttagaacaaaaatactgggctttgggacagaaggatgaagccctggaacaaaacattcaggctctggaagagaaccaccaaactcaggagcaggagagcctagtgcaggaggataaaaccaggaaaccaaagatgctagaggaaaaatccccagaaaaggtcaaggccatggaagagaagttagaagctcttctggagaagaccaaagctctgggcctggaagagagcctagtgcaggagggcagggccagagagcaggaagaaaagtactggagggggcaggatgtggtccaggagtggcaagaaacatctcctaccagagaggagccggctggagaacagaaagagcttgccccggcatgggaggacacatctcctgagcaggacaataggtattggaggggcagagaggatgtggccttggaacaggacacatactggagggagctaagctgtgagcggaaggtctggttccctcacgagctggatggccagggggcccgcccacactacactgaggaacgggaaagcactttcctagatgagggcccagatgatgagcaagaagtacccctgcgggaacacgcaacccggagcccctgggcctcagacttcaaggatttccaggaatcctcaccacagaaggggctagaggtggagcgctggcttgctgaatcaccagttgggttgccaccagaggaagaggacaaactgacccgctctccctttgagatcatctcccctccagcttccccacctgagatggttggacaaagggttccttcagccccaggacaagagagtcctatcccagaccctaagctcatgccacacatgaagaatgaacccactactccctcatggctggctgacatcccaccctgggtgcccaaggacagacccctcccccctgcacccctctccccagctcctggtccccccacacctgccccggaatcccatactcctgcacccttctcttggggcacagccgagtatgacagtgtggtggctgcagtgcaggagggggcagctgagttggaaggtgggccatactcccccctggggaaggactaccgcaaggctgaaggggaaagggaagaagaaggtagggctgaggctcctgacaaaagctcacacagctcaaaggtaccagaggccagcaaaagccatgccaccacggagcctgagcagactgagccggagcagagagagcccacaccctatcctgatgagagaagctttcagtatgcagacatctatgagcagatgatgcttactgggcttggccctgcatgccccactagagagcctccacttggagcagctggggattggcccccatgcctctcaaccaaggaggcagctgccggccgaaacacatctgcagagaaggagctttcatctcctatctcacccaagagcctccagtctgacactccaaccttcagctatgcagccctggcaggacccactgtacccccaaggccagagccagggccaagtatggagcccagcctcaccccacctgcagttcccccccgtgctcctatcctgagcaaaggcccaagcccccctcttaatggtaacatcctgagctgcagcccagataggaggtccccatcccccaaggaatcaggccggagtcactgggatgacagcactagtgactcagaactggagaagggggctcgggaacagccagaaaaagaggcccaatccccaagtcctcctcaccccattcctatggggtcccccacattatggccagaaactgaggcacatgttagccctcccttggactcacacctggggcctgcccgacccagtctggacttccctgcttcagcctttggcttctcctcattgcagccagctcccccacagctgccctctccagctgaaccccgctcggcaccctgtggctcccttgccttctctggggatcgagctctggctctggctccaggaccccccaccagaacccggcatgatgaatacctggaagtgaccaaggcccccagcctggattcctcactgccccagctcccatcacccagttctcctggggcccctctcctctccaatctgccacgacctgcctcaccagccctgtctgagggctcctcctctgaggctaccacgcctgtgatttcaagtgtggcggagcgcttctctccaagccttgaggctgcagaacaggagtctggagagctggacccaggaatggaaccagctgcccacagcctctgggacctcactcctctgagcccagcacccccagcttcactggacttggccctagctccagctccaagcctgcctggagacatgggtgatggcatcctgccgtgccacctggagtgctcagaggcagccacggagaagccaagccccttccaggttccctctgaggattgtgcagccaatggcccaactgaaaccagccctaaccccccaggccctgccccagccaaggctgaaaatgaagaggctgcggcttgccctgcctgggaacgtggggcctggcctgaaggagctgagaggagctcccggcctgacacattgctctcccctgagcagccagtgtgtcctgcagggggctccgggggcccacccagcagtgcctctcctgaggtcgaagctgggccccagggatgtgccactgagcctcggccccatcgtggggagctctccccatccttcctgaacccacctctgcccccatccatagatgatagggacctctcaactgaggaagttcggctagtaggaagaggggggcggcgccgggtaggggggccagggaccactgggggcccatgccctgtgactgatgagacaccccctacatcagccagtgactcaggctcctcacagtcagattctgatgtcccgccagaaactgaggagtgtccgtccatcacagctgaggcagccctcgactcagatgaagatggagacttcctacctgtggacaaagctgggggtgtcagtggtactcaccaccccaggcctggccatgacccacctcctctcccacagccagacccccgcccatcccctccccgccctgatgtgtgcatggctgaccccgaggggctcagctcagagtctgggagagtagagaggctacgggagaaggaaaaggttcaggggcgagtagggcgcagggccccaggcaaggccaagccagcgtcccctgcacggcgtctggatcttcggggaaaacgctcacccacccctggtaaagggcctgcagatcgagcatcccgggccccacctcgaccacgcagcaccacaagccaggtcaccccagcagaggaaaaggatggacacagccccatgtccaaaggcctagtcaatggactcaaggcaggaccaatggccttgagttccaagggcagctctggtgcccctgtatatgtggatctcgcctacatcccgaatcattgcagtggcaagactgctgaccttgacttcttccgtcgagtgcgtgcatcctactatgtggtcagtgggaatgaccctgccaatggcgagccaagccgggctgtgctggatgccctgctggagggcaaggcccagtggggggagaatcttcaggtgagtgtgactctgatccctactcatgacacggaggtgactcgtgagtggtaccaacaaactcatgagcagcagcaacaactgaatgtcctggtcctggctagcagcagcaccgtggtgatgcaggatgagtccttccctgcctgcaagattgagttctgaaagagccgccctcccttccccaaggatccactcccccagctcctttagagaatggctactgctgagtcctttggggttgagggagatgggagctagggggaggggagggagatgtcttgttgtggggacttgggctgggctaaatgggaggggttgtccctccccatcatccattcctgtgaggtgtctcaaaccaaagttaacagggagaggatgggggaggggacaaattagaataggatagcatctgatgcctgagaaccctctcctagcactgtcaaatgctggtattgaatggggactgaggatgggtctcagagagcaacctcctccctcgtagagggagattatatccccaactccagggacctctttatctcaatctatttatttggcatcctgggagggatttccaatagtaatttatgtgacctggggcaggataccgtcagtgaggtgcccagagctgcaccctttcctccatttcccatcccccatctcctcaaccaccagggtctgagttctagcagggtcctgggggtatcccactgctatactgttctactgcttccctcagtatctgaatgtctcaatttaaaacttgaagctctttagaccaatagactggtgagaggagaaaggagcttatcccccagaccctgctttataccattcacatcccagggctgtgtccagacagcacaaaacggcaaggagagcccaagccccaatgccagaattcttccaaactccctgactctttgaagtttttactcaccccatttcaattatcctgatcccttctcatcccctgcttggcttctctgcatgtggtcatctgctgtggcttggtgtttaatgggttaaaaataagccactgcctgacatcccaacatttgacaccccagcaatgtgtgactcccccaacattccactatgccatcctgcagctgaaatgggaacactggctgcctctccaaacccgctcttggacagaggatctgggaggtggaagccaggccagaggacttggggaaaatgagatggaggaaggaaaaagggagaagctgagccacagcttaactcctacagagtgaaatgaaaacgggctgaaaataccaccccaggagaggacctcgccccaagcaagccagtgagcagccctgccagactactgccagactgagaaacccagaagctggtagtcatgtgggcttgccttctctgccaaacgactgggaaaccaaaatgagcccaccttgtgttcttcctagctccaccctccccgtgctgctgtgttctgctcctccccacgcttccctgctatagttcccagctgctgtaacggagccacctccaactctaacaataaaccaagttcattgcagatagtgta

SEQ ID NO: 127774 - DNA, 1881 bp, Artificial Sequence
  derived and/or modified sequence
atggacggcgtggctgagttctccgagtatgtctctgagactgtggacgtgccatccccatttgacctactagagccccccacctcagggggcttcctcaagctctccaagccttgttgctacatcttcccaggtggtcgtggggactctgccctctttgctgtcaatggtttcaacatcctggtggatggtggctctgatcgcaagtcctgtttttggaagctggtacggcacttggaccgcattgactcggtgctactcacacacattggggcagacaacctgccaggcatcaatggactactgcagcgcaaagtggcagagctagaggaggagcagtcccagggctctagcagttacagcgactgggtgaagaaccttatctctcctgagcttggagttgtctttttcaacgtgcctgagaagctgcggcttcctgatgcctcccggaaagccaagcgtagcattgaggaggcctgcctcactctgcagcacttaaaccgcctgggcatccaggctgagcctctatatcgtgtggtcagcaataccattgagccactgaccctcttccacaaaatgggtgtgggccggctggacatgtatgtcctcaaccctgtcaaggacagcaaggagatgcagttcctcatgcaaaagtgggcaggcaatagtaaagccaagacaggcatcgtgctgcccaatgggaaggaggctgagatctccgtgccctaccttacctctatcactgctctggtggtctggctaccagccaatcccactgagaagattgtgcgtgtgctttttccaggaaatgctccccaaaacaagatcttggagggcctagaaaagcttcggcatctggacttcctgcgttaccctgtggccacgcagaaggacctggcttctggggctgtgcctaccaacctcaagcccagcaaaatcaaacagcgggctgatagcaaggagagcctcaaagccactaccaagacggccgtgagcaagttggccaaacgggaggaggtggtagaagagggagccaaggaggcacgttcagagctggccaaggagttagccaagacagagaagaaggcaaaagagtcatctgagaagcccccagagaagcctgccaagcctgagagggtgaagacagagtcaagtgaggcactgaaggcagagaagcgaaagctgatcaaagacaaggtagggaaaaagcaccttaaagaaaagatatcaaagctggaagaaaaaaaagacaaggagaaaaaagagatcaaaaaggagaggaaagagctcaagaaggatgaaggaaggaaggaggagaagaaggatgccaagaaggaggagaagaggaaagataccaaacctgagctcaagaagatttccaagccagacctaaagccctttactcctgaggtacgtaagaccctctataaagccaaggtccctggaagagtcaaaatagacaggagccgtgctatccgtggggagaaggagctgtcttctgagccccagacacccccagcccagaagggaactgtaccactcccaaccatcagtgggcacagggagctggtcctatcctcaccagaggacctcacacaggactttgaggagatgaagcgtgaggagagggctttgctggctgaacaaagggacacaggactaggagataagccattccctctagacactgcagaggagggacccccaagtacagctatccagggaacaccaccctctgttccagggctgggacaagaagaacatgtgatgaaggagaaagagcttgtcccagaggtccctgaggaacaaggcagcaaggacagaggcctagactctggggctgaaacagaggaaaaaaaaaaaaaaaaaaaaaaaaaaaag

SEQ ID NO: 127775 - DNA, 279 bp, Artificial Sequence
  derived and/or modified sequence
atgagctgccagcagaaccagcagcagtgccagcccccccccaagtgccctagtccaaaatgtccacccaaatcccccgttcagtgcttacctcccgccagctccggttgtgccccttccagcgggggctgcggcccctccagcgaaggaggctgtttcctgaatcaccaccggcggcaccatcgctgccgaagacagaggcccaacagttgcgaccgcggaagcggccagcaggggggaggaagcgggtgtggccacggctccggcggctgttgctag

SEQ ID NO: 127776 - DNA, 8412 bp, Artificial Sequence
  derived and/or modified sequence
atggacggcgtggccgagttcagcgagtacgtgagcgagaccgtggatgtgcctagtccatttgaccttctggagcctcccacatcgggtgggtttctgaagctgagcaaaccatgttgttatatctttccggggggcaggggagattcagcactattcgccgtgaacggattcaacatacttgttgatggcggcagcgataggaagtcctgtttctggaaactcgttcgtcatcttgataggattgactctgttttgttaacacacatcggggcagacaacctgcctgggatcaacgggctcctccagcggaaagtcgcggagcttgaagaggagcaaagccagggctcctcatcctattccgattgggtgaagaatctgatctctccagagctcggagtggtcttctttaacgtcccagaaaagcttcggctgcccgacgcttcacggaaggcaaagaggagtattgaagaggcatgtctgactctgcagcacctcaacaggctgggcatccaggctgagcctctctacagggtggtgagcaacaccatcgagcctcttacactgttccataagatgggcgttggacgtctcgacatgtacgtactcaacccagttaaagacagtaaggagatgcaatttctgatgcagaagtgggccggcaattcaaaggccaaaacaggaatagtgctgccaaatggcaaggaggcggagatctccgtgccctacctgacctcaatcacagccctggtcgtgtggctgccggcaaatcctaccgaaaagatagtaagggtcctgttccccggcaatgccccccagaataagatccttgagggtctagaaaagctcagacatctggacttcctgcgataccctgttgccacgcagaaagacttagcctccggtgcggtcccgaccaaccttaaacctagtaagataaaacagcgcgcggactcaaaggagagcctgaaagcaacaactaagaccgccgtttctaaactggccaagagggaagaggtggttgaagagggggcaaaagaagcacggagtgagcttgctaaggaactcgcaaaaacagagaaaaaagctaaagaatccagtgaaaaaccacccgagaagcccgccaaaccggagcgggtgaagacggaatcctcagaggctcttaaggccgagaaacgcaagctgattaaagacaaggtgggcaaaaagcacctgaaagagaaaatttccaaattggaggagaagaaggacaaggaaaagaaggagatcaagaaagaaaggaaggaactaaagaaagacgagggaaggaaggaggagaagaaggacgctaagaaagaggaaaagagaaaggacaccaagcccgagttgaaaaagatctcaaagcccgaccttaagcctttcactcccgaggttcgaaagaccttatacaaggccaaagtgcccggcagagtcaaaatcgaccgcagtcgcgccatcagaggcgagaaagagctctcttccgagcctcagacgcctcccgcccagaaagggactgttccgctgccaaccatttcggggcatagggagctggtattatcttcccccgaagacctgactcaggacttcgaggaaatgaaacgagaagaacgcgcccttttagcagagcagcgggatacaggcttaggggacaagccctttcccctggacaccgccgaggaagggcccccctccactgccattcagggaactcccccctcagtcccgggccttggccaggaagaacacgtcatgaaggaaaaggaactcgtccctgaagtacctgaagagcagggttcaaaggaccgcgggctggatagcggggcagaaactgaggaggaaaaggatacctgggaggaaaaaaaacagcgagaggccgagcgtctgcctgacaggacagaggcaagagaggagagtgagccggaggtcaaggaagacgttatagagaaggctgagttggaagagatggaggaggttcatcccagtgacgaagaagaagaggacgcgacgaaagccgaagggttctaccagaaacatatgcaggagccactgaaagtgacacctagaagccgagaggccttcggtggtcgtgagttgggccttcagggcaaggccccagagaaggagacttcgctgttccttagctctctcaccaccccggccggggctaccgagcatgtgtcctatatacaggacgaaactatcccaggttattctgagacagagcagaccatctcggacgaggagatccatgatgagcctgaggaaagaccagctcccccacgattccatacaagcacttatgacctccctgggcctgagggggctgggccgtttgaagcgtctcaacccgcggacagtgccgtgcctgccacgagtggaaaggtgtacggaacccccgaaactgaattgacttatcccaccaatattgtcgcggcccctctcgctgaagaagaacatgtcagctccgcgacatctatcacagagtgtgacaagctctccagctttgctacatcagtagctgaagatcagtccgtggcctccctgactgccccccagacggaggaaaccgggaagtcctccctccttctggacaccgtgaccagcattccctcaagtcgcacagaagctacgcaggggctcgattatgtgccaagtgccggaactatctcgcctacatcctcactggaagaagacaaagggttcaaatctccaccatgcgaggatttcagtgtcaccggtgagagtgagaaacggggcgagattatcggaaagggtctgtcaggcgagagggctgtcgaagaggaagaagaagaaacagccaatgtcgagatgtcagagaaactgtgtagccagtatggaactcccgttttttccgcccccgggcatgctcttcaccctggcgagcccgccctgggtgaagccgaggagcgctgtctaagtcctgatgacagtacggtgaagatggccagccctccaccctccgggcctccgagtgccactcatacgccattccaccagtctccagtagaggaaaagtcagaacctcaggacttccaggaggcagactcgtggggagacactaagaggaccccaggagtgggcaaggaggacgcagccgaagagacagttaaacctggtcccgaggagggaacgctggaaaaggaggagaaggtaccacctccccgcagcccccaggcccaggaagcccctgttaatattgacgaaggcctgacaggctgcactatccaactgctgcccgcacaagacaaggctatcgtgttcgagattatggaagcaggcgaaccaaccggaccgatcctgggcgctgaggcactgcccggggggttgagaacgttacctcaggagcctgggaaaccacagaaggatgaggttctgcgctatcctgacagaagcctgtcaccggaggacgcagaatccctctcagtcctcagtgtcccctcaccggacactgccaaccaggaaccgacccctaagagtccatgtggactcacagaacagtaccttcataaggataggtggcctgaggtgtctccagaagatacgcagagtctcagtttgtccgaggagtccccctctaaggagacatcgttagacgtctcttccaagcagctctcccctgagagcctgggcaccctgcaattcggggagctgaacctgggtaaggaggagatgggccacttaatgcaggctgaagacacatcccaccataccgcccctatgtccgtgccggaacctcatgccgcaaccgcaagcccacctaccgacgggacaaccagatactctgcgcagaccgacatcactgacgattccctggaccgcaagtcaccagcctccagcttttcccactccactccttccggaaatggtaaatacctgccgggcgcaatcacttcacccgacgaacacatcctcactcccgattcctcttttagtaagtcacctgagtccctgcccgggccagcacttgaggatatcgctatcaagtgggaggataaggtccctggactgaaggataggacttcagagcaaaagaaagaaccagaaccaaaggacgaagttctgcaacagaaggataaaactctggagcataaggaggtggtggagcctaaagataccgctatataccagaaggatgaggccctgcacgtgaaaaatgaggctgttaaacagcaggataaggctttagaacagaaaggcagagatttggagcagaaggacaccgcactggagcagaaagacaaagccctcgagcctaaagataaagacttggaggaaaaggacaaggccctggaacagaaggataagattccagaagagaaggataaagccttagaacaaaaggatactgcactggaacaaaaagacaaggccctggagccaaaggacaaagacctagagcagaaggaccgcgtcttggagcaaaaggaaaaaattcccgaagagaaggacaaagccctcgatcagaaagtgcgttctgtggagcacaaggctcccgaagacactgttgccgagatgaaagaccgtgatttggagcaaacggataaagctcctgagcagaaacaccaagcacaggaacagaaggacaaagttagcgaaaaaaaagaccaggccttggagcagaagtactgggcactgggccagaaggatgaagcactggaacaaaacattcaggctctcgaggaaaatcatcagactcaggagcaagagagcttagtgcaggaagataagacaaggaaacctaagatgctggaggagaagagccctgagaaagttaaggccatggaagagaaactggaggccctactggagaaaactaaagccctgggactggaagaatcactggtgcaggaggggcgcgctcgagagcaggaggagaagtactggagggggcaagacgtggtgcaggagtggcaggaaacatctcccactagagaggaacccgccggtgaacaaaaggaactcgctcctgcatgggaggatactagcccagaacaggacaatcggtattggcggggacgagaagatgtcgcattggagcaggacacctattggagagagctgtcgtgtgaacggaaagtctggttcccccacgaactggacggccaaggtgccagacctcattacactgaagaacgggagtcaacattcctggacgaaggcccggacgatgaacaggaagtgcctctgcgggaacatgcaacccgctccccatgggcatccgacttcaaggatttccaggaaagttcacctcagaagggactcgaagtggaacggtggctggcagagtcccccgtggggcttccccccgaagaagaggataagctgacgaggtcacctttcgaaataatttcaccccccgcctcgcctccagaaatggtcggacaaagagtcccttccgcgcccggacaggaatcccccataccagatcccaaactcatgcctcacatgaaaaacgagcctactactcccagctggttagccgacattccaccgtgggtcccaaaagatcgtcctttgccgccagcaccgttgtcacctgcccctggaccgcccaccccggcccccgaaagtcacacacccgccccgttctcttggggcaccgccgagtatgacagtgtggttgccgccgtgcaggagggcgccgcagagttggagggtgggccttactcgcctttaggaaaggactacagaaaagcagagggcgaacgagaagaggaaggtcgcgcggaagctcctgataaatcttcacatagctcaaaggtacccgaagcttctaagagccacgccaccacagagcctgaacaaaccgaacctgaacagcgggaaccaacgccataccctgatgaaagaagcttccagtatgccgatatctatgaacaaatgatgctgactggcttgggccctgcctgtccaacacgggagcccccgctgggggcagccggtgactggcccccgtgtctgtccaccaaagaggccgccgcaggaagaaatacttctgcggagaaggaactttcgagtcccatttcacccaagtccctgcagtctgacacgcccaccttctcgtatgcggccctggccgggccaaccgtgcctccccgaccagagcctggccccagcatggagccgtctttaacaccccctgccgttccaccacgagcccccatcctaagtaagggtccttcccctcctctgaatggaaatatcctgtcttgttcacctgatcgaaggtctccatccccaaaggagtctgggagatcccattgggacgactcaacaagtgatagcgagctggagaaaggcgcccgggaacagcccgagaaagaagcacagtcccctagcccaccacatccaattccaatgggcagtccaacactgtggccagaaactgaggcacacgtctcaccccctcttgactctcacctcggtcccgcccgcccctctctggacttccctgcgtccgcatttggttttagttcattgcagcctgctcccccacagctgccaagtccggctgaacctcgtagtgccccatgcggctctctggccttctctggcgatagagctctcgctctggccccagggcctccaaccaggacgaggcatgacgagtaccttgaggtcacgaaggcaccttcgctggattctagtctcccgcaactccccagcccatctagccctggggccccattgctatctaatctgcccaggccagcctctcctgcactcagtgaaggttcaagctctgaggctaccacccctgtgatcagcagtgtagctgagcgcttttccccatcactcgaagccgcagagcaagaatccggagaactggaccccggaatggaaccggcggcccattcactgtgggatcttacccctttaagcccggcgccgcctgctagcctggacctcgccttggcccccgccccatcactcccaggagatatgggggacggaattttgccatgtcacctggagtgttccgaagctgcaacagaaaaaccctcaccatttcaggtacccagcgaggattgcgctgccaatggtcccaccgaaacgagtcccaatcccccaggccctgccccagccaaagcagaaaacgaagaggccgctgcttgtcccgcttgggagaggggggcatggccagagggtgcagaacgcagtagtaggcccgacaccctcctgtcgccggaacagcctgtctgtcccgctgggggttcaggagggcctccctcctctgcttctcctgaggtcgaagccggcccccagggctgtgcgacagaaccccgcccacaccgcggggagctgtccccatcgtttctgaacccgcccctgcccccgagcatcgacgacagagatttatcaaccgaggaagtgcgcttggtcggtcgcgggggccggcgcagagtcgggggccctggcaccacgggaggtccttgcccggtgaccgacgaaacccctccaacttctgcctcggatagcgggtcgtctcagagcgattccgacgttcctccagaaacagaggaatgcccaagtataactgccgaagccgccctggacagcgatgaagatggcgatttcctccccgtcgataaagcaggcggagtgagcggcacccaccaccctcggcctggccacgacccgcctcccctcccacagcctgaccctagaccctccccaccccgtccagacgtgtgtatggcagacccggaaggcctgagcagcgagtccggaagggtggagagattgagagagaaagagaaagtccagggtagggtgggccgtcgggctcccggcaaggcaaaacccgcaagcccagctcgccggctcgatctcaggggtaaaaggtccccaacgcccggaaaaggtcccgccgaccgggcatcgagggcacccccacgccctcgctctacgacgtcacaagttacccccgctgaagagaaggatggtcacagtcccatgagtaagggcttggtaaacggcctgaaagctggaccaatggcattgtcctctaagggcagctccggcgcccccgtctatgtcgacctggcctacattccaaaccactgctccggaaagactgcagatctggatttctttagacgagtacgggcatcctactacgtagtttccggtaatgacccagctaatggagagccctcccgggcagttctcgacgctcttttggaaggaaaagcccagtggggtgagaatcttcaggtgacgctcatcccgacacacgatactgaggttacccgggagtggtaccaacagactcatgagcagcagcagcagttgaacgtgctggtccttgctagttccagcactgtggtcatgcaagatgaaagttttcccgcttgcaagatcgaattctag

SEQ ID NO: 127777 - DNA, 9126 bp, Artificial Sequence
  derived and/or modified sequence
atggagaccgaggccgagcccgcccggccccacggcgtggccatggagacaactccaggccttggtctgaggtcacccggggctcccctggcacagaaccccgccgagttactctgcgaagctggcgcggcagtggcagccgcaagatgggacctgcagaagcatagccttcttatagttataggcgacatcggcaccgaatcacagttaagggccgtgcgagcccaccttgaacagggcattttgagctggaacatcgatctgtcatcgttcgacctcaaccaacagttaaggctgtttatcactcgccatctagcacattttagctcggaagtgaaaggtcaacggacactttgtcatcagtccgagattctagagacaatcattcttgtgaacccatcagcagacagcatctcgtcagaggtgcatcatctgctaagcagcagctctgcctacaagcttctcattctgagcgggcagagcttagaacccggaggtgacttaatactgcagagcggaacgtactcatacgagaattttgctcaggttttgcacaaccccgagatttctcagctcctgtcaaatcgcgacccaggaattcaggcctttttaaccgtgtcctgcctgggggagggagattggagtcatctgggcctttcctccagccaggagacgctgcaccttagactgaaccctgagccaaccctgccaaccatggatggcgtggcggaattttccgagtacgtttccgagacagtggacgtaccatcaccatttgatcttttggagccgcccactagtgggggattcctgaagttaagtaagccctgctgctacatctttccaggaggacgcggtgactccgctctctttgcggtgaacggcttcaatatccttgtggatggtgggagcgatcgtaagagctgcttctggaaactggtcaggcatctggacagaattgattctgtcctcctgacccacataggcgctgataatcttcccgggatcaacggtcttctccagaggaaggtggctgagttagaggaagaacagagccagggctccagcagctattccgattgggtcaaaaatcttatttctcccgagctcggggtagtgttcttcaacgtgcccgagaaactacggctgcctgatgcttcccgcaaagccaagcgctccattgaagaagcctgtctcacactgcagcacttgaaccgtctaggaatccaagcagagccgttgtaccgcgtggtctccaacactattgagcccctaacattattccacaagatgggagtcgggcggttggacatgtacgttctcaatcccgtgaaggatagcaaggaaatgcagtttctaatgcaaaagtgggctggaaatagcaaagcaaagaccggcatcgtcctccctaatggcaaggaggctgaaataagcgtgccatacctgacctctatcactgcgctggttgtatggctgcccgccaacccaaccgagaaaatcgtccgggtgctcttccctgggaatgctcctcagaataagattctagaggggctggaaaagctccgccacctcgacttcctgagataccccgtggcaacgcaaaaggatctcgcctccggggctgtacccaccaacctgaaaccatctaagattaaacagagggctgacagcaaggagagtctgaaggccacaacaaaaaccgcggtttccaaactggccaagcgagaagaagttgtggaggagggcgccaaagaagcccgttccgagctggccaaggaactcgccaaaaccgaaaaaaaggctaaggagtcctccgagaagcctccagagaagccagccaaacctgaacgggttaagactgaaagttccgaggcccttaaggccgaaaagcgaaagctgattaaggacaaggtcgggaaaaaacacctgaaagaaaaaatttcaaagctcgaagaaaaaaaggacaaggaaaaaaaggaaatcaaaaaggagaggaaggagctgaaaaaggacgaggggcgtaaagaggaaaagaaggacgccaagaaggaggagaaacgaaaagacacgaaaccagagcttaagaagatcagcaagcctgacctgaagcccttcacgcctgaagtccggaagaccctctataaggcgaaggtcccaggaagggtaaaaattgataggtctcgagcaatccgaggagagaaagaattgtccagcgagccacagacaccccccgcccagaaaggcacggtgccgctgcccaccatcagcggacaccgggaacttgtgttatctagtcctgaagatttgacccaagattttgaagagatgaagcgggaggaacgagccctgctggccgagcaaagagacaccgggttaggcgataagccgttccccttggacacagctgaggaaggcccaccttccacagcaattcagggcacccctccctccgtgccaggcctgggccaagaagagcacgtgatgaaagagaaggagttagtgcctgaagttcccgaagagcagggtagcaaagacaggggcctggactcgggagccgagacagaggaggagaaagacacgtgggaagaaaagaaacagagagaagccgaaaggctcccagatcggaccgaggcgcgtgaagaaagcgagccagaggtcaaggaggacgtgatagagaaagctgagttagaggagatggaagaggttcaccccagcgacgaagaggaggaggatgctaccaaggctgaggggttttaccaaaaacacatgcaggaaccattgaaagtgacaccacgcagccgggaggcgttcggagggcgggaactggggctgcagggtaaggcccctgagaaggagacatccctgttcctgagcagcctgacaactccggcaggtgcgactgagcacgtgagctatatacaagacgagactattcccggatatagcgagacggagcaaacgatttctgacgaagagatacacgacgaaccggaggagaggcctgctccacctagattccatacctcaacctacgatctacctggccccgagggggctgggccattcgaagcatcacaacccgcagactctgcagtcccagcaacgtcagggaaggtgtatggcaccccggaaacagaactcacgtacccgacaaacatcgtagcagccccactagctgaggaggagcatgtgtcctcagctacttccatcactgagtgtgataagctgtctagctttgccactagtgtcgccgaggaccagtccgtggcttcactcacagctccccaaacagaagagaccgggaagtcttctttattactggacacagttacaagcatcccgagcagccgcacagaggccactcagggcctggactatgtgccatcagcaggtaccataagccccacctcctcactggaagaggacaagggattcaagagccctccctgcgaagatttcagcgtgaccggggagagcgagaaaaggggagagattatcgggaagggtctaagcggggagcgagcagttgaggaagaggaggaagagacagccaacgtggaaatgtcagaaaagctctgttcacagtacgggacacctgtgttctctgccccagggcacgccttgcatcccggagaacccgctcttggagaggccgaagaaaggtgcctgtcccctgacgacagtacagtgaaaatggcaagcccacccccgagcgggccgccttcagctacccataccccattccaccagagtcctgtggaagaaaagtccgagcctcaagatttccaggaggctgatagttggggcgacacaaaaagaaccccaggggtcgggaaggaagacgccgctgaagagactgttaagcccggccccgaagaaggcacactggaaaaggaggagaaggtcccacccccacgatctccccaggcacaagaggctccagtgaatatcgacgagggtttaaccggatgcacaattcaactgctgcccgcccaagataaggcgatcgtgttcgagatcatggaggcgggagagcctaccggccccatactgggggctgaggcacttcctggcggcctgagaactcttccccaggagccagggaaacctcagaaggacgaggtgctaaggtacccagatagaagcctctctccagaagatgctgaatccctgtccgttctgagcgtcccctcaccagacactgcaaaccaggagcccactccgaaatctccatgcggcctaaccgagcaatacctacataaggataggtggcctgaggtgagtccagaagatacccagagtctcagtctgagcgaagagagccctagtaaggagacctctttggacgtctcttctaaacagctgagccccgaatctttggggactctccagttcggcgagcttaacctggggaaagaggaaatgggccacctgatgcaggccgaggatactagccatcatacggcacctatgagcgttcccgagccccacgctgctactgcaagtcccccaaccgatggcaccacccgctacagtgcccagactgatattactgatgattctcttgatagaaagagccccgcttcctcattcagtcatagcactccttcaggaaacggcaaatacctgccaggagctatcacatccccggacgaacatatcctcacccccgattccagcttctccaagagcccagaatcactcccaggacctgcgctcgaagacattgcaatcaagtgggaggataaagtacctggcctaaaggacagaacctccgaacagaagaaagaaccagaaccaaaggacgaagttctccagcagaaggataaaaccttagaacacaaggaggtggtagagcctaaggataccgccatctaccagaaggatgaagccctgcacgttaaaaatgaagccgttaagcagcaggacaaggcactcgaacagaagggccgcgatctagagcaaaaggacaccgcgctcgagcagaaggataaggcgctcgagccaaaggacaaagacctggaggagaaggacaaggccctagagcagaaggacaagataccagaggaaaaggacaaggctctcgagcagaaagacactgccctcgaacagaaagataaagccttagaacccaaagataaagatctggaacagaaggaccgcgtgttggaacagaaagaaaagatacctgaggaaaaggataaggcgcttgaccagaaagttaggagtgttgagcacaaggcccctgaagacacagtggcagagatgaaggaccgggatctggaacagactgacaaggcccccgaacaaaagcatcaggcacaggagcagaaggataaggtgtcagagaagaaagaccaagccctagagcagaagtactgggccctcggtcagaaagatgaagccttagagcagaacatccaggctctcgaagaaaatcatcaaacgcaggagcaggagagtcttgtgcaggaagacaagaccaggaagcctaaaatgctagaggagaagagcccagagaaggtcaaggcgatggaagagaagctggaggctttgctcgaaaaaacaaaggccttgggactcgaagaatcattggtccaggagggtagggctcgagagcaggaagagaagtattggaggggccaggacgtggtacaggaatggcaggagacaagtcccacgcgcgaggagcccgcaggtgagcagaaggagctggccccagcctgggaagacaccagccccgaacaagacaaccgttactggcgggggagagaggacgtcgcgttagaacaggacacatattggcgtgaactcagctgcgaacgtaaagtgtggttcccccatgagttggacggtcagggggcgcggccccattacacagaagaacgggagtcaacctttttagatgagggtccagatgatgagcaagaggtgcctctcagggagcacgcaacgcgaagcccatgggcctctgattttaaagatttccaagagtctagtcctcagaagggtctggaggttgaaagatggttggccgagtcaccagtggggttgccaccagaggaggaagacaagttgactaggagcccctttgagattatcagtcctcccgccagtcccccggagatggtagggcagagggtgccttccgcccccgggcaagagtctccgatccccgacccaaagttaatgccacatatgaagaatgagccaactactccctcttggctcgccgatatccccccatgggtaccgaaagaccgccctctgccccctgcgcctctgtcgcctgcccctggacctcccacgcctgcacctgaaagccacacgcccgctcccttcagttggggtacagcagagtacgatagtgttgtggccgccgtgcaggagggggccgcagaattggagggtggcccctattccccattgggtaaggactatagaaaggccgagggcgagcgcgaggaggaagggagggcagaggccccagataaatcaagccattcatcaaaagttcctgaggcatcaaagagccatgctacaacagagcccgaacagacagagcctgaacagagagaaccaaccccgtatcccgatgaacgcagttttcaatatgccgacatttacgagcagatgatgctgactggtctgggacccgcctgtccaactcgcgaacctcccctcggtgcagccggtgattggcctccttgtttatctaccaaggaagccgccgccggccgtaatacttctgccgaaaaggaactctcctctcccatatcccccaaaagtttgcagagcgacaccccgactttctcatacgccgcccttgctggacccacagtgcctccccgtcctgagcccggtccctccatggagccctctctgacgccaccagctgtcccgccacgtgcccctatcctgagcaaagggcctagcccaccgctgaatggaaacattctctcctgcagccctgacaggcgatccccaagcccaaaggagagcggccgcagccattgggacgatagcaccagtgatagtgagttagaaaagggcgccagggagcaacccgaaaaggaggctcagtctccctcaccgccacacccaattcctatgggatccccgaccttgtggccagagacagaagcccatgtgtctcccccactggattcgcatcttggacctgcaagaccgtccttggactttccagcttcagcttttggctttagcagcttacaacctgctccaccacagcttcccagtcccgccgagccaaggtctgctccttgcgggagtctcgcattttccggcgacagagcactggccctggctcccggcccacctactcgaacccgccatgacgagtatctggaagtcaccaaggccccttcactggattctagcctgcctcagctgccatctcccagctctcccggggcccctctactgtctaaccttcccaggccagcatccccggcactctctgaaggtagtagtagcgaagctacaactcctgtgatttcatcagttgccgaaagattctctcccagtctggaagctgcagagcaggagagtggggaactcgatccggggatggaaccagcagcccattccctatgggacctgacgccactgtcgccagcaccaccagccagtctcgatttagcactggctcctgccccctccttgccaggggacatgggagatggcatactgccatgtcacctggaatgttcagaagccgccaccgagaaaccatctccctttcaagtgcctagcgaggattgtgctgccaacggccctacagaaacaagccctaaccctcctgggcctgctccggccaaggctgaaaacgaggaagcagccgcatgccctgcatgggaaagaggtgcttggccggagggtgctgaacgcagttcccggccagacaccctgctctcccccgaacagcccgtgtgccccgccgggggaagcggcggccctccctcaagtgcctcccccgaggtggaggccggcccccagggctgtgctactgaacccagaccacaccggggagaactgtctccatccttcctgaacccccccttgccaccctccatagatgacagagatctgtctactgaggaagtgcgcctggtgggccggggcggtcgacggagagtcggcggaccagggaccactggaggtccctgccctgttacagacgaaacacccccgactagcgcctctgatagtggttctagccagtcagacagcgacgtgccgcctgaaacagaagaatgcccctcaattaccgcagaagctgcattggatagtgatgaggacggagattttctgcctgtagataaagcggggggcgtgagtggtacccaccacccacgcccaggacacgaccccccccccctgcctcagccagatcctcgaccttccccccctaggccggatgtgtgtatggcagacccagaggggctgtcttctgagtcaggtcgggtggaacgtctgcgcgaaaaggaaaaggtacagggaagggtcggaaggcgcgcccccggcaaagcaaaacctgcgagccccgcgcggcgtctagaccttaggggcaaacgctctccgacgccaggcaaagggccagcggacagggccagcagggctccccctaggccccgatccaccaccagccaagtgactccagccgaagagaaagacggccattcacccatgtccaagggtctagtgaatggcctgaaggctggcccaatggctctgtccagtaagggatcatcaggcgcccctgtgtacgtggacctggcctatatcccaaaccactgctccggcaaaacagccgacctagacttctttcggcgtgtgagagcttcctattatgttgtgtccgggaacgatcctgcaaatggcgaacctagccgcgccgtgttggatgccctgctggaaggaaaagcgcagtggggggaaaatctacaggtgaccctcatccctacacacgacacggaggtgaccagagagtggtaccagcagactcatgaacaacagcagcagctaaatgttctcgtactggcctcatcttccacagtcgtgatgcaggacgaatcatttccagcgtgcaagatcgagttttag

SEQ ID NO: 127778 - DNA, 8418 bp, Artificial Sequence
  derived and/or modified sequence
atggacggcgtggccgagttcagcgagtacgtgagcgagaccgtggacgtgcccagcccttttgacctgcttgaacctcccacaagcggtggcttcctgaagctctctaagccttgttgctacatctttcccgggggtagaggagacagcgctctgttcgccgtcaacggcttcaacattctggtggatggcggctccgatcggaaaagttgcttttggaagctcgttcgtcaccttgaccgaatcgatagcgtactgttaacacacatcggggcagacaatctaccgggaattaatggcctgcttcagaggaaagtcgcagagttagaagaggagcagagccagggcagtagttcatacagcgattgggtcaaaaacttgatttcacccgagctcggggtcgtgttcttcaacgtccccgagaaattgcggctgcctgatgcctcacgaaaagccaagcgttcaatagaagaggcctgtctgaccctacaacatctgaatcggctgggcatacaggccgaacctctctacagggtggtgtccaataccattgaaccactgactttgttccataaaatgggcgtgggacgactggacatgtatgtactcaatcctgtgaaggattctaaagagatgcagtttcttatgcagaagtgggccggaaattccaaagctaagacgggtatagtcttacccaatggaaaagaggccgagatcagcgtcccatacttgaccagcattaccgcactagtggtctggcttcctgccaatccaacagaaaagattgtgcgcgtcctcttccccggcaacgccccccagaacaaaatcctggagggactcgagaaactcagacatctcgacttccttcgataccccgtggccactcagaaggacctggcatccggagctgtgcccacgaacctgaagccatcaaaaatcaaacagcgggcggactccaaggagtctcttaaggccactaccaaaactgccgtgtctaagctggccaaaagggaagaagtggtagaggagggagctaaggaggcaagatccgagctggcaaaggaactagccaaaactgaaaagaaagccaaggagtcctctgagaagccccctgaaaaacccgccaaaccagaacgcgttaagacagagagctcagaagcattaaaggctgagaaacgaaagctgattaaagacaaggtgggcaagaagcatttgaaggagaagatttccaagctggaagagaaaaaggacaaggagaaaaaggaaattaaaaaagaaaggaaggagctgaagaaagacgagggccggaaagaggaaaagaaagacgcgaagaaggaggaaaaacgaaaggacactaagccggaattgaagaaaatctccaagccggacctaaaaccattcactcccgaagtgagaaagacactgtataaggctaaggtgcctggaagggtaaagatcgacagatcccgcgcgattaggggcgagaaggaactctcttctgaaccccaaactccacccgcccagaaaggcacggtccctctgcccacgatctctggccaccgagagctagttctcagcagccctgaggaccttacccaagacttcgaggagatgaagcgagaagagcgggctctcctggccgaacagcgggacacaggcctgggggataaaccttttcccttggacacggccgaggaagggcccccttcaacagcaattcagggaacgcccccttccgtaccaggactgggccaggaggagcatgtgatgaaagagaaagagctggtgcccgaggtcccagaagaacagggatctaaggacagaggcctggacagcggcgcagagacggaggaggaaaaggacacgtgggaggagaagaagcagcgcgaggccgagagactgccagaccgcacagaggcccgggaggagtccgaaccagaggtcaaggaggatgttatagagaaggccgaactggaggaaatggaggaggtccaccccagtgatgaagaggaggaagatgccactaaagccgaaggcttctaccaaaaacatatgcaggagcctctgaaggtgacacccagaagtagggaggcatttggtggtagagaattgggcctgcaaggcaaagctcctgagaaggagacgagtctcttcctatcctctctgacaacacccgctggcgctaccgagcacgtttcttacatccaagatgaaactataccaggatactctgaaacagaacagactatctctgacgaggaaattcacgacgaaccagaggaaagaccagcccctcccaggttccataccagtacctacgatctgccgggacctgaaggcgctggaccatttgaggcttcacagccagcggattccgcagtcccagctacatccggtaaagtgtacggcacacccgaaactgagctaacgtacccaactaatatcgtagcagctcctcttgccgaggaggaacacgtctcctccgcaacatcaatcacagaatgcgataaactgtcttccttcgcaacatccgttgctgaggaccaaagcgttgcaagcctcactgcaccccagacagaagagacaggaaagagttccctgctgctggacacggtgacctccatcccaagcagccgaaccgaagccacccaggggctggactacgtgccctccgctggaaccatctctcccacttcctcactcgaggaagataaaggcttcaagagtccaccctgcgaggactttagtgtcaccggcgagtctgagaaacgcggtgaaattattggcaagggactgagcggagagagagcagttgaagaagaggaagaggagacagccaacgttgagatgtccgagaaactgtgctctcagtatggcacccctgtgtttagcgctcccggacacgccctgcacccgggcgaacctgctctgggtgaggccgaggaacgctgtctgtctcctgacgacagcactgtaaaaatggcttctccaccgccttccggacccccaagtgccacccacacccccttccaccaaagtccagtcgaggagaaaagcgagccccaggattttcaggaagcagattcttggggggacactaagcggaccccgggggttggcaaggaagacgcagcagaagagactgtcaagccaggacccgaagaggggacactggaaaaagaggagaaagttcctccaccccgttcaccgcaggctcaggaggcaccagtgaatattgacgagggactgacaggatgcacaatccaacttcttcccgcccaggacaaggccatcgtgttcgaaatcatggaagccggtgaacccacaggtcctatcctgggcgcggaggcactgcccggtggcctgcggacgttgcctcaggagcccggaaagccacagaaggacgaagtgttgcgataccccgacagaagtctatcacctgaagatgccgaatctctgagtgtactgagcgtgccgagtcctgataccgccaaccaagagccaacccccaaatcgccctgcggtctgacggagcaatacctacataaagatcgctggcctgaggtcagccctgaagatacacagagtctgtctttgtccgaggagagtccgagtaaagagacgtccctcgacgtctctagcaagcagctgagccccgaatccttgggcaccctgcagtttggagagctgaatctagggaaagaagagatgggtcacctgatgcaggcagaggacacttcacatcacaccgcccccatgtctgtgcctgagccccacgcagccacagccagcccccccaccgatggcactaccaggtactctgcccagacagacattaccgatgacagtcttgatcggaaatctccggcatctagcttctcgcacagcacaccatccggcaatggcaaatatctgcccggtgcaatcacatcacccgacgaacatattttaaccccagacagcagctttagtaagagcccagagtccctgccgggaccagccttggaggacatcgcgataaagtgggaagacaaggtccccggtttgaaggacagaaccagcgagcaaaagaaagagcccgaaccaaaagatgaggtgctccagcagaaggacaagacactcgagcacaaagaagtcgtggaacccaaagatacagccatttaccagaaggatgaggcattgcacgtgaagaatgaggcagtgaaacagcaggataaagcactagaacagaaagggcgcgacctggaacaaaaggacaccgcattggagcaaaaggacaaggcacttgaacccaaggataaagatcttgaagaaaaagacaaagccctcgaacagaaagacaagattccggaggagaaggacaaggccttagaacagaaagacaccgcactggagcaaaaagataaagccctggaacccaaggacaaggaccttgagcagaaggatagagtgctggagcaaaaagagaaaattcctgaagagaaggataaagccttggaccagaaagtgcgatccgtggaacataaagctcctgaagacaccgtggccgagatgaaagatcgggatcttgagcagactgataaagcacccgaacagaaacatcaggctcaagagcaaaaggataaggtgtcagaaaaaaaggatcaagcgcttgagcagaagtattgggctctcgggcagaaggacgaggcacttgagcagaatatacaggccctggaggagaatcaccaaacccaagagcaggagtcacttgtgcaggaggataagaccagaaaaccaaaaatgctggaggaaaagagccccgagaaggtcaaagctatggaagagaaacttgaagctctgctggagaagactaaggccctgggactggaagagtccctggtgcaagaaggtcgtgccagggaacaggaagaaaaatactggaggggccaagacgtcgtccaggagtggcaagagacatcccccactagggaagagcccgctggcgagcagaaggaactcgcccccgcctgggaggacacctcacctgaacaggacaaccggtattggcgaggcagggaggacgtagccctggaacaggacacatactggagggaactgtcttgtgagaggaaggtttggttcccccacgagcttgacggccaaggagcacggcctcactacaccgaagagcgggagagtaccttcctggatgagggccctgatgacgagcaagaagtaccgcttagggaacacgcaacgcgtagtccatgggcatctgattttaaagattttcaagagagttctccacagaaaggcttggaagttgagaggtggttagctgagagtccagtaggtttgcctcccgaggaagaggataagctgaccagatccccttttgaaatcatctcgcctcctgcaagcccacccgagatggtgggacagagggtgccatccgctccaggccaggagtctcctatacctgaccctaaactgatgccccatatgaaaaacgagcccactactccatcttggctggctgatattccaccctgggtccctaaagaccgaccactgcctcctgcacctctgtctcctgcccccggccctcctacaccagctccagagagccacaccccagcccctttctcttggggtaccgccgagtatgattccgtggttgcagcagtgcaggagggggccgctgagctcgagggggggccttactcaccgctcggaaaagactacagaaaggcagagggagaacgagaagaggaggggagagccgaagcccccgacaagtcctctcatagcagtaaggtcccggaggcctcaaagagccatgcgaccactgaaccggagcaaactgaacctgaacagagggagcccactccctatcccgatgaaagatcttttcagtatgccgatatatatgagcagatgatgctgactggcctcggacccgcctgccccaccagggagccacccttgggcgctgctggagattggcccccatgtctttccacaaaggaggcagctgcgggacgcaatacaagcgctgaaaaagagctaagctctcccatctcacctaaaagcctccaatcagatactcctacgttttcgtacgccgccctcgcagggccgactgtgccacccagaccagaacccggccctagcatggaaccatctttaactccccctgcagtgccacctcgggcaccgattctcagcaaagggccatccccgcctttaaatggaaatatcctgtcctgttccccggatagaaggtcaccttcacccaaggagagtgggagatcccactgggatgacagtacatctgacagcgagctggagaagggggctcgcgagcagccagagaaagaggctcagagcccatccccaccccatcccattccaatggggagtcccacactatggcccgagacagaggcacatgtgtctcccccactagacagccatctgggacccgcccgccctagcctggactttcccgccagcgcttttggattttcgtcgcttcagcctgcccccccacagctcccaagcccggccgagccgaggagcgccccatgcggaagcttagctttttctggggacagagccctggccctcgcgccaggcccaccaacgaggaccagacacgatgagtacctggaggtcacgaaagctccttctctcgactccagcctgccccaactgccatctcctagtagccccggggccccactgctgagcaatctacctcggccggcgtctcctgccctgtcggagggctcatcatcagaggccaccacgcccgtgatctcatctgtggcggagaggttctcccccagccttgaggcggccgagcaggaatctggtgagctcgaccctggcatggaacctgcggctcactcgttgtgggatctgactcccctgtctcccgcaccacccgcgtctctcgatctggccttggcccccgcccccagcctcccgggcgatatgggcgatgggatccttccctgccatttagagtgtagcgaagcagctaccgaaaagcctagccctttccaagtgcctagcgaggattgcgctgctaacggtcctacagagacgtcaccaaaccctccaggaccagccccagcaaaggccgaaaatgaggaggcagccgcctgccccgcttgggaacggggtgcttggccagaaggagccgagcgctcgagccggcccgacacacttctgtcacctgaacagccagtgtgtcctgccggcggcagcggaggaccaccctcttccgcatctcccgaggtggaggccgggccccaaggctgtgccaccgaacctcggccccaccggggagagctaagtccaagctttctgaatcccccattgcccccgtcgatcgacgatagagacctgtcgaccgaggaggtgcgccttgtgggacgcggaggccgccggagggtgggtggccccgggactacagggggaccttgccccgtaactgatgaaacacctccaaccagtgctagtgattccggttcttcgcagagcgattctgatgtccctcccgaaacagaagagtgtcccagcattacagccgaggctgctctggatagcgacgaggatggagacttcttgcctgtggacaaagccgggggagtgagcgggacgcatcacccaaggccggggcacgacccccctccactcccccagcccgaccctcggccttcacccccccgccctgacgtttgtatggctgatccagagggcctctcttctgagagtggccgggtcgagaggctgagagagaaggagaaagtgcaaggacgggtgggtagacgcgcccctgggaaggctaaacctgcttctccagctaggagactggacctgcggggcaagcggagtccaactccgggcaaggggccagctgatcgagccagcagagctcctcctagaccgaggagtactacgtcgcaggtgacacccgccgaagaaaaagacggacactcccctatgtctaaagggctcgtgaacggtttgaaagcgggccctatggcactgtcgtcgaaggggagttctggggccccagtttatgtggatttggcctacattcctaatcattgctcagggaaaacggccgatctggatttcttccggcgggtgagagccagctactatgttgtctccggaaacgaccccgccaatggggaaccgagcagagctgtgcttgacgctctgctggaaggcaaggcccagtggggcgaaaacttacaggtctccgtgacacttatacctacacacgatacagaagtgacacgggaatggtaccagcagacccacgagcagcagcaacagcttaatgtgctggtcttggcatctagctccactgtcgtaatgcaggacgaaagctttccggcctgtaagatagagttctag

SEQ ID NO: 127779 - DNA, 1884 bp, Artificial Sequence
  derived and/or modified sequence
atggacggcgtggccgagttcagcgagtacgtgagcgagaccgtggatgtgcctagtcccttcgaccttttagaacctccgacttctgggggattcctgaagctgtcgaagccgtgctgttatatcttccccggagggcggggtgatagcgcgctctttgccgtgaatggctttaacatcctggtagatggcgggtctgatcggaagtcttgtttctggaaactcgttcgacatctagataggatcgactccgtgctgctgacccacatcggagcagataatctgcctggtatcaatggtctgttacagcggaaagtggcagagttggaggaggagcagtcccaaggcagcagctcctacagcgattgggtaaaaaatctgatctctcccgagcttggtgtggttttcttcaatgttcccgagaagttgagactgccggatgcatcccgcaaggcaaaacgatccattgaggaggcctgcctgaccctacagcatctgaaccggttagggatccaagccgaacccctgtatcgtgtcgtgagtaacaccatcgagcccctgaccttattccataagatgggcgtgggtagactcgatatgtatgtcctgaatcctgtcaaggactccaaagagatgcaattcctgatgcaaaaatgggctggaaatagtaaggcaaaaactggaatagtgctcccaaacggaaaggaagccgagatctcggtaccttatctcaccagcattactgccctcgttgtgtggctgccagcaaatcctacagaaaagatcgtgcgtgtcctgttccccggaaacgctccccagaacaagatcttggaaggcctggaaaagctccgtcacctcgacttccttcgctaccctgttgccacccaaaaggacctggcatccggcgctgtgccaacaaacctcaagccctccaaaatcaaacagagggccgacagcaaagagagtctgaaggcgacaacgaagacagccgtgtctaaactcgctaagagagaggaagtcgtcgaagagggggcaaaagaagcccgctccgagctggcaaaggagttagccaaaactgagaagaaagctaaggagtctagtgaaaagccaccggaaaaacccgccaagcctgagagggtaaaaacagaaagcagcgaggcgctgaaggcagaaaagcgaaaactgattaaggataaagtggggaaaaagcacctcaaagaaaaaattagcaaattagaggagaaaaaagacaaggaaaaaaaggaaatcaaaaaggaaagaaaagagctgaagaaggacgagggtcgtaaggaggagaagaaagatgcgaaaaaggaggagaagcgtaaggacactaagccagaactgaaaaaaattagtaagcccgacctgaagccttttaccccggaagtcaggaagacactttataaggctaaagtaccaggaagagtgaaaatcgatcggtcccgtgccatcagaggtgaaaaggaattgtcttccgagccccagacccctccggcccaaaagggtaccgtgccactcccgaccatttctggccatcgggagttggtactttcatcacctgaagacttgacacaggattttgaggaaatgaagagggaggaacgcgccttgctggccgagcagagggataccggcctcggtgataaacccttcccattggataccgccgaagagggtcccccttccaccgcgatccaggggacaccaccctccgtgcccggactaggccaggaggagcatgttatgaaagagaaggaactcgtgccagaagtgcctgaggaacagggatcaaaggacaggggtctggacagcggagccgagacagaggagaaaaaaaagaagaaaaagaagaagaagtag

SEQ ID NO: 127780 - DNA, 8411 bp, Artificial Sequence
  derived and/or modified sequence
atggatggggtggctgaattcagtgaatatgtgtccgagactgtggatgtcccgtctcccttcgatctgcttgaaccaccaacctcagggggattcctcaagctatccaagccctgttgctacatattcccaggaggaaggggcgactctgccctattcgcagtgaatggatttaacattctcgtggacgggggatccgataggaagtcatgcttctggaagcttgtacgccacctggacaggatcgatagtgttctcttaactcacatcggcgcagataatctaccaggtatcaacggcctgcttcagaggaaggtggccgaactcgaggaggagcagagtcagggatcctcttcgtattcagattgggtcaaaaatctgatcagtccagagttaggagtggtgtttttcaatgtgccagagaagttgagactgcccgacgcttctagaaaagccaaacggagtattgaggaagcatgcttaactctacagcacctgaaccgtcttgggatccaggccgaacctctgtatagagtggtcagcaatacgatcgaacccctgacactgtttcataagatgggagtgggcagactggacatgtatgtgctgaacccagttaaagactccaaagagatgcagttcttgatgcagaagtgggctggcaacagtaaggcaaaaaccgggattgtgctaccaaacggcaaagaagcagagatcagcgtcccttacctaactagcattaccgcactggtggtatggttacccgcaaatcctaccgagaaaattgtacgcgtcctgttcccaggaaacgcacctcagaacaagatcctcgaaggtcttgaaaaacttaggcacctcgatttccttcggtaccctgttgccactcagaaagacctggcgagtggcgctgtgcccactaacttgaagccgtctaagattaaacaacgggctgatagtaaagagagtcttaaggccaccacaaaaaccgctgtttctaagctggccaaacgcgaggaggtggttgaggaaggagccaaagaagctcggagcgagctggcgaaagagttagctaagactgagaagaaggctaaagaatcgagcgagaaaccacccgaaaagccagccaagcccgagcgggtgaagacagagagcagtgaggctctaaaagccgagaagcgtaagttgatcaaagataaagttgggaagaagcatcttaaggagaaaataagtaagctggaggaaaagaaggacaaggagaagaaagagattaagaaagaacgcaaagagctcaagaaggatgaaggcagaaaggaggagaagaaagacgctaaaaaggaggaaaagcggaaggatactaagccagagctgaagaagatctccaagcccgacctcaaacctttcacaccagaggtgaggaaaacactatataaagctaaagtgcccggtagagtcaagattgacagatctcgagccatccgaggggagaaagagctgtccagcgaacctcaaactccacccgcacaaaaggggacggtccccctgcccaccataagtggacacagggaacttgtcctgtcatctcccgaggatcttacccaagattttgaggagatgaagcgggaggagagagcactgctcgccgagcaaagagacactgggctcggtgacaaaccctttcccttggacactgccgaggagggaccacccagtacagccattcagggcactcccccaagcgttccgggtctgggacaggaggaacacgtgatgaaggagaaagaacttgtgcccgaggtcccagaggaacagggatcaaaggatcggggacttgattccggggctgaaacggaggaagagaaagatacctgggaggagaagaagcagagggaggccgagaggcttccggacagaactgaagcacgcgaagagagcgaaccggaggtcaaagaagacgttattgagaaagctgaactcgaagagatggaggaagtccacccgagtgatgaagaggaggaagacgctacaaaggctgaaggcttttaccaaaagcatatgcaagaacctctgaaggtcactcctcgcagcagagaagccttcggtggaagggaactgggcttacaaggtaaagcacccgaaaaggagacgagcttattccttagcagtctgaccacaccagccggagccactgagcatgtgtcgtacatccaggatgagactatccctggatactcagaaacggagcagaccatctcagacgaagaaattcatgacgagcctgaagagagacctgccccaccccgatttcacactagcacatacgatctaccaggaccagaaggagctgggcctttcgaggcgtcacagcccgcagactccgccgtcccagccacttctgggaaagtatatggcaccccggagacagagctcacctaccccactaacattgttgccgcaccattagcggaggaggagcacgtgtcttccgcgacttcaatcaccgagtgcgacaagctgagcagcttcgcaacatcagtggcagaagatcaaagtgtggcatctctgactgctccccagactgaagagaccggaaagagcagtctcctgctagacactgtgacaagtatcccgagcagcagaaccgaagcaacccagggactggactacgtgccttcagcgggtactattagtccgacctccagcctcgaagaagataaaggatttaaaagccccccttgcgaagacttcagcgttactggtgaaagcgaaaagcgcggagagatcatcggcaagggcctgtctggtgaacgggctgtcgaggaggaagaggaagagacagcaaacgttgagatgtccgagaagttgtgctctcagtacggtacacccgttttctcggctccagggcacgctctgcatccaggagagcccgctctgggagaagccgaagaaagatgtctgtccccagacgacagtactgtgaaaatggcctcccctcccccttctggaccgccatctgctactcacactccgtttcatcagagtcccgtggaagaaaagagtgaaccacaagatttccaggaggcagacagttggggcgatacaaagcgcacccccggagtgggaaaagaggatgcggcagaagagaccgtcaagccgggtccagaggaaggcaccttggaaaaggaagagaaagtgcctccaccacgcagtccccaggcacaggaggctcctgtaaatattgacgaggggctgaccggctgcacaatacagctgctgccagcccaggataaagcaattgtcttcgagattatggaagccggtgagcccacaggccctattttgggtgctgaagctctgccaggaggactgcgcactttaccacaggagcctggaaagccccagaaggatgaggtcctgagataccccgaccggagcttgagtccggaggatgccgaatctttatctgtgctgtcagtaccatcccccgacacagccaatcaggaacccacaccgaaaagtccgtgcggactcacagagcagtatttgcacaaagatagatggcccgaagtcagcccggaggacacccagtcactttcgttgagcgaggaaagcccatctaaggagacctccctggacgtctcttctaagcagctgagcccggagtcactggggaccctgcaattcggggagcttaatctgggaaaagaggaaatgggtcacctgatgcaagccgaagatacaagccaccataccgcccctatgagcgtgcccgagccacacgccgctacagcctctcccccaaccgatgggactaccaggtacagcgcccagaccgacatcacagacgatagcttggatcgtaaaagcccagccagctccttcagccatagcacgcccagcggcaacggaaagtaccttccaggcgcaataacctcacccgacgaacacatcctgacccccgattcttctttctccaaatcacctgaatcattgcccggaccagctctcgaagacattgccatcaagtgggaagacaaggtgcctggtcttaaggatcgaacctctgagcagaaaaaggaacccgaacccaaggatgaagtacttcaacaaaaagataaaactctggagcataaagaagtggtggaacctaaggatactgccatttaccagaaggacgaggcccttcacgttaaaaatgaggcggtgaagcagcaggataaggccctggaacagaagggcagagatctggagcagaaggacacagccctcgagcagaaagacaaagcccttgagccgaaggacaaagatttagaggagaaggataaggctctcgaacagaaggacaaaattcctgaggagaaagacaaagcactcgaacaaaaggacaccgctctggagcagaaagataaggcgctggagccaaaggacaaggacctggaacagaaagacagggttcttgaacagaaggagaagatccccgaggaaaaagacaaagcactggatcagaaggtacgatctgtggagcataaggctcccgaagacacagtggctgagatgaaggatagagatcttgaacagaccgacaaggcgccagaacagaagcaccaggcgcaggaacagaaggacaaagtgagtgaaaaaaaagatcaggcactggagcaaaagtactgggcgcttgggcagaaagatgaggctctggaacagaacattcaagctttagaagagaatcaccagacgcaggagcaggaaagtctggtccaggaggataaaaccaggaaaccaaagatgctcgaggagaaatccccagaaaaggtgaaagcgatggaagagaagcttgaggccctgctggaaaagacaaaagcattgggtcttgaggagagcttagtacaggaaggacgtgccagggagcaggaggagaagtattggcgtggacaagacgttgtccaagagtggcaggaaacctcaccaacccgagaggagcccgctggggaacagaaagaacttgcgccagcatgggaggacacaagccccgagcaggataaccggtattggaggggtcgtgaggacgtggctctggagcaggatacctattggagggagctgagttgtgagcgcaaggtctggtttccccatgagctggacggacagggagccaggcctcattacactgaagagcgggagtcaactttcttggatgaagggcctgatgacgagcaggaagtaccactaagagagcatgctacgaggagcccatgggccagcgatttcaaagacttccaggaaagttctccgcagaaaggacttgaagtcgaacgctggttggcagagtcgcctgtcggactgccccctgaagaggaggataagctgacacggtctcctttcgaaatcatctctccacctgccagcccgcctgaaatggtgggacaacgagtgccttctgccccaggacaggaatcccctatcccagaccctaagctcatgccacatatgaagaatgagcccacgaccccctcttggctggcggacatccccccttgggtccctaaagacaggccgctgcctccagcccctctatcccccgctcccggaccgccaacccccgcacctgaatcacatacccctgcgccattttcctggggcactgccgaatacgacagcgtcgtcgcagctgtgcaagaaggcgctgccgagctggaggggggaccgtacagccctctgggtaaggactaccgaaaagctgaaggtgaacgcgaggaggagggccgagctgaggctccagataagtcctcccacagcagcaaggtgccagaggcttccaaaagtcacgctaccactgaacctgaacagacagagcctgaacagagagaacctaccccctatccagatgagcggagtttccagtatgccgacatctatgaacagatgatgttgactgggttgggtccagcatgcccaaccagagaacccccactaggggctgccggagactggcctccctgtttatcaacaaaagaggctgccgctggaagaaacacaagtgctgagaaggaactcagcagcccaatcagccctaaaagcctccagtcagatactcctacattttcctacgccgcactggcaggccctaccgtcccaccaaggcccgagcccggaccgtcaatggagccttcactgacccccccagctgtccctccaagagcccctattctgtctaaagggcctagtcctccactaaatggtaatattttgtcatgttcgccagaccgccgtagccctagtcctaaagagtctggccgtagccactgggacgatagtaccagtgatagtgagcttgaaaagggcgcacgcgaacagcccgaaaaggaggcccagtccccttcgccccctcaccctatccccatgggctcgcctaccctgtggccagaaacggaggcccatgtcagtccccctctggattcccatctcggccctgctcgcccatcactggatttccctgcatctgcgttcggattttcctcactgcagccggctcctccacagctcccaagcccagccgagcctagaagcgctccctgcggcagcctggctttcagcggagacagggctctcgctctggcacctggccctccaacacgtactaggcatgatgagtacctggaggttaccaaggccccatccttggattcctccctgccgcagcttccctcaccctcttcgcctggagctccattgctgtcaaatcttccgagacctgccagccctgccctgagcgagggttcatcttcagaggccaccaccccggttatctcatccgtagcggaacgttttagcccctccctggaagccgctgagcaggaatcgggcgagctggatcctggtatggaacctgccgcacacagcctctgggacctcaccccattgagccctgctcctcctgcgtccctggacctcgcactggcgcctgccccttctttgcccggtgatatgggggacggcattctgccctgccatttagagtgttctgaggctgctaccgagaaaccatcaccatttcaggttccctccgaagattgtgctgccaacggaccgaccgagacctccccaaaccccccagggccagccccagcgaaggcggagaatgaggaagctgccgcatgccctgcatgggaacgtggggcttggcctgaaggcgctgagcggagctccagacctgacactctgcttagccctgagcagccggtttgtcccgctggcggatcgggaggtccgccaagcagcgcctccccggaggttgaagcgggacctcaggggtgcgcgacggaacctcggcctcataggggcgaattgtcccccagtttcttgaacccccctctccctccgagcatcgacgatcgcgacttgagcaccgaggaagtgaggcttgtgggaagagggggacgtcgccgagtgggcggtcctggcactacagggggaccttgcccagtcactgacgagacacctccgacatcagccagtgactccggatcctctcaaagcgattccgacgtgccgccagaaacagaggaatgcccctccataacagccgaagcagcactcgacagcgacgaggatggcgacttcttacccgtagataaggccggaggcgtatctgggacccatcatcctcgacctggacacgaccctccacctcttccccaacccgaccctagaccgtcaccacccaggccagacgtgtgtatggcggatcccgagggactgagtagtgagagtggcagggttgagagacttcgagaaaaagaaaaagtccagggcagagtgggcagacgggcacctggaaaagcgaaacctgcctccccggcaaggaggctcgacctcaggggtaaacgatctcccacccccggaaaaggaccagccgatcgagcaagccgcgcaccaccgcgacccaggagtaccacgagccaagtcaccccagccgaggaaaaagacggacactcacccatgtcaaagggcttagtaaacggactcaaagccggtcctatggccctcagctccaagggcagctccggggctcccgtgtatgtcgacctggcctatatccctaatcattgttctggaaaaaccgcagatttggatttctttcgccgagtgagagcgagctactacgtcgtgtctggtaacgacccagccaacggtgagccaagcagagccgtgctagatgctcttttagaggggaaggcacagtggggcgaaaacctccaggtaaccctaatccccacccacgacactgaagtgaccagagagtggtaccaacaaacccatgagcagcagcaacaacttaatgtgctagttctcgcttcttcttctaccgtggtgatgcaggatgaatcttttcccgcttgcaagatagagtttta

SEQ ID NO: 127781 - DNA, 9125 bp, Artificial Sequence
  derived and/or modified sequence
atggagaccgaagctgagcccgcacggcctcatggtgttgcaatggagaccacccccggactggggttgcggtcgccaggcgctcccctcgcccagaaccccgctgaattgctgtgtgaggccggagccgcagtggcagctgccagatgggacctgcagaagcatagtctgctaatcgtaatcggcgatattggtacagagtctcagttgcgggcagtgagagctcacctggaacaaggaatattgtcttggaatatagatttatccagcttcgatttgaatcagcagcttcgcctgttcatcacccgccatcttgcccacttctcaagcgaagtaaaaggacagagaacactgtgccaccagtctgagattctggagaccatcatactcgtgaatccctccgctgacagcatctccagcgaagtccaccacctgctgtcttcatcttccgcctataagctgcttatcctgtcaggccagtcattagagcctggaggcgacctgatactacagtccggtacatattcatatgagaactttgcgcaggtgctgcataaccccgaaattagtcagttgctcagcaatcgagacccaggtatccaggccttcttgacagtgagctgtttaggtgagggcgattggagccacctgggactttcaagctctcaggaaacccttcacttgcgtctcaatcctgaaccgaccctccccactatggatggagtggccgagttcagtgaatacgttagcgagacagtggacgttccatcaccttttgacctgttagaacctcctacttccgggggatttttaaaattgagcaagccttgttgttacatattcccaggcggaagaggcgacagcgccctctttgctgttaatgggttcaatatcctggttgatgggggtagcgataggaaatcttgcttctggaagttggtacgccatctcgaccgcattgatagcgtgctgcttacgcacatcggggctgacaacttaccaggcataaacggactattgcagcgcaaagtggcggaactcgaagaggagcaaagccaaggctcatccagttattcagattgggttaaaaatctgatctctcctgaattaggcgtggtgttctttaacgtgcctgagaagctgcgactgcccgatgcctcccggaaagcaaagcgatcaattgaggaggcctgcctgacgctgcagcatttgaatcggcttggcatccaggccgagcctctttatcgtgtggtgagtaacaccattgagccattgaccttgtttcacaaaatgggagtcggaaggctggacatgtatgtactgaatcccgtgaaggattcaaaggaaatgcagtttctgatgcagaaatgggcaggcaactccaaggccaagacaggcatcgtgctgcccaacggcaaggaggcagagatctctgttccctacttgacatcgattactgccttggtggtctggcttccagccaatcccaccgagaagattgttcgggtgctttttcctggcaacgcaccacagaacaaaatcttagagggactcgagaaactcaggcacctagactttctgcgctatcctgtcgctacccaaaaagatctggcctccggcgcagtgccgactaatctcaaaccgtcaaaaattaagcagagggccgattctaaggaaagcctgaaagctaccacgaagactgccgtatccaagctggctaagcgcgaggaggtggtcgaagagggcgcaaaggaggcgagaagtgaactggcaaaagagctcgcaaaaacggagaaaaaggccaaggaatcctccgagaaacccccagagaagcctgccaaaccagaaagggtcaaaacagaatcgagcgaagcgctgaaggcagagaagcgaaagctcattaaggacaaggtggggaagaagcacctgaaggaaaagatttccaagcttgaggagaaaaaagataaagagaagaaggagatcaaaaaggaaagaaaagagcttaaaaaagacgaaggtaggaaggaggagaagaaggacgcaaagaaagaggagaagaggaaagataccaagcctgaacttaagaaaatcagcaagccagacctgaaaccattcacacccgaagtccgcaagaccctgtataaagccaaagtgcctggtcgggtcaagattgacagaagtcgcgctatacggggagagaaggagctgagtagcgagccacaaacaccgccagcccagaaggggactgtacccttgcctacaatttctggtcacagagaactagtgctgtcttctcctgaagatctcacacaggatttcgaggagatgaagcgcgaggagagagccctgctcgccgaacagcgagacaccggtctgggggataaacccttcccgttggataccgctgaggaaggccctcccagtacagccattcaaggcacacctccaagtgtcccaggcctcgggcaggaagagcatgtgatgaaagagaaagagcttgtacctgaggtccccgaggagcaggggtccaaggataggggattggactcaggagctgagaccgaggaggagaaggatacttgggaggagaagaaacagagagaagcagaaaggcttcctgatcgaaccgaggctcgggaggaatccgagcccgaggtcaaagaggatgtgatcgaaaaggccgagctcgaggagatggaggaggtccacccctcagacgaggaggaggaggatgctaccaaggcagagggcttctatcagaagcacatgcaggaacctctcaaggtcacaccgagatcccgggaagcctttggagggagagaactgggattgcaaggtaaggccccagagaaagagacatccttgttcctgagctctctgactacgccagccggagctacggagcacgtttcctatatccaagatgagaccatacccggatactcagagactgaacagaccatctcagatgaggagatacatgatgaacccgaggagcgccctgcacccccacggtttcatacaagcacctatgacttgcctgggccagagggcgctggtccctttgaggcatctcagccagcagactcagccgtgccagccacttctggaaaggtctacggcacacccgagaccgagctcacttatcctactaatatcgtcgccgcaccgttagcagaagaagagcatgtgagctcggctacctctataacagagtgcgataaactttctagcttcgctacctcagtcgccgaggaccagagcgtggcctccttaactgctccacagacagaggagacaggaaaatccagtctcctcctggatactgtgacatccattcccagttcaagaactgaggcgacccagggtctggattatgtaccgtccgctgggacaatcagcccaacttctagtctcgaggaagacaaaggatttaagagcccaccttgcgaggacttttctgtgactggggaaagcgagaagagaggggaaatcatcggaaagggactctccggtgaaagagcggttgaagaagaagaagaggaaaccgccaacgtcgagatgtcagagaaactctgtagtcagtacggcacccccgtgttttcagctccgggtcacgctttacacccaggtgagccagctctaggggaggccgaggagagatgcctgtctccagacgactctaccgtaaaaatggccagcccccctccatctgggccacccagcgccacacatacccccttccatcagtcacctgtcgaggagaaaagcgaaccacaggattttcaggaggcagactcttggggcgacaccaagagaacgcccggagtggggaaggaagatgccgctgaggaaactgttaaacccggtccagaggaaggcaccctcgaaaaagaggagaaggtcccgccaccacggtcaccccaggcacaggaggcgcctgtgaatatcgatgaggggctcaccggctgtacaattcaattgctgcccgcacaggataaggcgatcgtgttcgaaattatggaggccggtgagcctactggtcctatcctgggagccgaggccctgccaggcggattgcgaacacttccccaggaaccagggaaaccccaaaaagatgaggtcctgagataccctgataggagcctgagcccagaggacgccgagtccctttcggtgctatccgttccttctcctgatactgcaaaccaggagcctaccccaaaatcaccttgcggcctaactgagcagtatttacataaagatcgatggccggaggtgagccccgaggacactcaaagtctttccctgtctgaagaatccccctcaaaggagacctccttggatgtctcatctaaacagctatcccctgagagcctcggcactttacagtttggcgaactgaatctgggcaaagaggaaatgggacacttgatgcaggccgaagacacatcacaccatacagcccctatgagtgtgccggaaccgcacgccgcaaccgcttctccccctaccgacggtacgactagatatagcgcgcagacagacatcaccgatgattccttggacaggaagagcccagcctcatctttttcccatagcacgcctagcgggaatggaaagtacctacccggtgcaatcacctctcctgacgaacacatcctgactcccgactccagcttctctaaatcacccgaatcgctacccggaccggctctcgaagacatagccattaagtgggaggacaaggtgcctggactgaaggaccgcactagcgaacagaagaaggagccggagcctaaggacgaggtgctccagcagaaagataagacactcgaacataaggaggtggtagagccaaaagacacggctatctatcagaaggacgaagccctccatgtgaaaaatgaagccgttaagcaacaggataaagcattggaacagaagggcagggatctcgagcaaaaggatacagctttggagcagaaggacaaggcgctggaaccgaaggataaggatctggaagagaaggataaagctctggaacaaaaagacaagatccccgaggagaaagacaaggctctggagcagaaagacactgctctggagcagaaggataaggcgttagaacctaaggacaaagacctggagcagaaggatcgcgtgttggagcagaaggagaaaatccctgaagagaaggacaaggccctggatcagaaagtgcgaagtgttgagcacaaggccccagaggacacagtggccgaaatgaaggaccgcgatctcgagcagaccgataaagccccagaacagaagcaccaggcacaggagcagaaagacaaggtgtccgagaaaaaagatcaggctctggagcagaagtactgggccctggggcagaaggacgaagccttggaacagaacattcaggccctggaagagaaccaccagactcaagaacaggaatccctggtgcaagaggacaagacacgaaaaccgaagatgctcgaagaaaagtctccagagaaggtaaaagctatggaagagaagctggaagcactcctggaaaaaaccaaggctcttggcctagaggagagccttgtgcaagaaggtcgcgctagagaacaggaggaaaagtattggcgtgggcaggacgtggtacaagagtggcaagaaacgtcccctacacgggaggagcccgctggcgaacagaaggagcttgcccctgcatgggaggatacctcccccgaacaggacaacaggtactggcgcggtcgcgaggatgtggccctggagcaggatacttactggagggagctcagctgtgaaaggaaggtgtggttcccacacgaactcgatggtcagggcgctcggccacactataccgaggagcgtgagagcaccttcctcgatgagggaccagacgacgagcaagaagtgcctctgagggaacatgccacgagaagtccctgggcatcagatttcaaagattttcaggaaagctctcctcaaaaaggtctggaggtagaacgctggctggctgagagccccgttggtttgcccccagaagaggaggacaagctcactagatccccattcgaaatcatctctccacccgcatctcctcccgaaatggttggccagcgcgtgccttcagctcctggccaggaatctcccattccagacccgaaactgatgccacacatgaagaacgagccaactaccccctcatggcttgccgatatcccaccatgggtccctaaggaccgtccccttcctcccgctccactgtctcctgcacccggtcccccaacgcccgcacctgagtcgcataccccagccccattcagctggggtacagcggagtatgattctgtcgtcgcagctgtccaggagggtgcagccgaactggaaggaggtccctatagccctctgggaaaggattatagaaaggcagagggggagcgcgaggaggagggccgtgccgaagcaccggataagtcctcacatagctctaaagtccccgaggcctcaaaatcgcatgccaccaccgagccagaacagaccgagccggagcagcgagagcctactccatatcccgatgagcgcagcttccagtatgctgatatatatgagcagatgatgctaactggcttagggcctgcatgtccaacaagagagccccctctcggcgcagctggcgactggccaccttgcctgagcacaaaggaagccgctgcgggaaggaatacctctgccgagaaggagctatcttcccccatttctcctaaaagcctgcagtcagacactccaaccttcagctacgctgctctggctggccctacggttccccctcggcctgagccaggtccttcgatggaaccgagccttaccccacccgcagtacctccaagggctcctatattgtctaaaggcccttctcctcctctgaatggcaatatcctgagttgctcgcccgaccgcagatccccaagccctaaggagtccgggcgaagccactgggatgatagtactagcgattcagaactggaaaaaggagctagggagcagcctgagaaggaggctcagagcccctccccccctcatcctattccaatggggtctcctactctctggccagagacagaggcccacgtgtctccccctttagactcccacctggggccagcaagaccgagtctcgacttccctgccagcgcatttggatttagtagccttcaacccgctcctccccagctgccatccccagctgagccacggtccgcgccatgcgggtcactcgccttttccggggatagagctctagctttggcaccaggccctccgactagaactagacacgatgaataccttgaagtgactaaagctccaagccttgattcctcactgccacagctcccctccccctcgagcccgggagcgcctttgctgtcaaacctgccacggccagcaagcccagctctgagtgagggctcctccagcgaggctacaaccccggtgatttcctctgtcgctgaaaggttctcaccatccctggaggctgcagagcaagagtcaggggagctcgaccctggcatggagccggcagcccattccttgtgggacctaacaccattgtcccctgccccaccggctagcctggacctggctttggcccctgcaccgtctcttccaggtgacatgggcgacggcattctcccctgtcacttggagtgtagtgaggctgcaacggaaaagcccagccccttccaggtcccctccgaggactgcgctgcgaacggccctacagaaacatcccctaacccgccaggtccagctcctgccaaggccgaaaatgaggaggccgctgcttgccccgcttgggagcgcggagcctggccggagggcgcagagagatctagtcggccagacacactgctgtcccctgagcagcctgtctgtcccgctggcggatctggcggacctcccagttctgcatcaccggaagtggaagccggaccacaggggtgtgcaaccgaaccgaggcctcaccggggtgagcttagtcccagcttccttaacccccctcttccaccgtcaatcgacgacagagacttatctactgaggaagtgcgattggtggggcgtggagggagacggcgagtcgggggaccaggtaccactggagggccttgtcctgtaacagatgagacccccccaacatctgcctccgactcaggctccagccagagcgacagcgatgtgccacccgagaccgaggagtgccctagtattacagctgaagcagctttagatagtgatgaggatggggattttcttccagtggacaaggctggcggtgtgagtggcacacaccatccacgccctggccatgacccaccacccctgccccagcctgaccctagaccctcccccccaagacccgatgtttgtatggctgatcctgaaggactttcttctgagtcgggtagagtggagagactgcgagagaaggagaaggtgcagggtagagttggcagaagagcaccagggaaggcgaagcccgcttctccggcaagaagattggacctgaggggcaaacgatccccaacccccggaaaaggtccagctgaccgcgcttcgagagctcccccaagaccccgaagcacaacgtcccaggttacccctgcggaagagaaggacggccacagcccaatgtcgaaaggactggtcaacgggctgaaagccggacctatggcactgagctccaaaggtagtagcggagctccggtttatgtggatcttgcgtacatccctaatcactgttcaggtaagacagccgatcttgatttttttcggagagtcagagcatcctactatgttgttagtggaaatgaccccgcaaacggggagccttcccgtgccgtgctcgatgctctgttagagggcaaggcgcaatggggagagaacttacaagtgacactgatacccactcacgacaccgaggtgaccagggagtggtatcaacaaacacacgagcagcagcaacaattgaacgtgctcgtgcttgcatccagtagcactgtcgttatgcaggatgagagttttcccgcatgtaaaattgaattcta

SEQ ID NO: 127782 - DNA, 8417 bp, Artificial Sequence
  derived and/or modified sequence
atggacggcgttgccgaattctcagagtatgttagtgagaccgtggacgtgccaagtccatttgacttgctggaaccacctactagcggtggcttcctgaaactgtctaagccttgttgctatattttccccggtggccgtggcgattctgcactttttgctgttaacgggtttaacattctcgtggatggaggatcagaccgcaagtcctgcttctggaagttagttcgccatttagatagaattgatagcgtcttgttgacacatatcggggcagacaacctccccggtataaatgggcttctccagcggaaggttgccgaactggaggaggaacagtcccagggttcttcgagctactctgactgggtaaagaatctgatctctcctgagttgggcgttgtgtttttcaatgtgccagagaaactgcgactacctgatgccagccgtaaggcaaagcgatcaatcgaggaagcttgcctgacactccagcatcttaaccgcttaggaatccaggcagagcccctttaccgggttgtgtcaaataccatcgaaccgcttaccttgttccataagatgggcgtgggacggctggatatgtatgttctgaatccggtgaaggattccaaagagatgcaatttctgatgcagaaatgggcaggaaactctaaagcgaagaccggtattgtgctgccaaacggtaaggaggcggagatcagtgtcccttaccttacttcaattaccgccctcgtggtatggttacctgccaaccctacagaaaaaatagttcgagtgttgtttccgggaaatgccccacagaataagatcctggaaggcctcgagaaattacggcatctggatttcctacgatatccagttgccacgcagaaagacctggcttctggtgctgtcccaaccaacctgaaacctagcaagatcaagcagagggctgatagcaaagagagcctgaaggctaccaccaaaactgctgtgagcaaattggccaaaagggaggaggttgtagaagaaggagcaaaagaagcaagatcagagttggctaaggagctggccaagacagagaagaaggccaaagaatcaagtgagaagcctcccgagaaacctgccaagccagagcgcgtgaaaactgaatcatcagaagctttgaaggcagaaaagaggaagctgatcaaggataaagtgggaaagaagcatctaaaagaaaagatcagcaagcttgaagaaaagaaggataaagaaaaaaaggagatcaagaaggagcggaaggaattaaagaaggacgaggggagaaaggaagaaaaaaaggatgcaaaaaaagaagaaaaacggaaggatactaaaccagaactgaagaagattagtaagcctgatctgaagcctttcacccccgaggtgcgcaagacactttacaaagctaaggtccccggacgcgtgaaaatagaccgctctcgggctatcaggggtgagaaagagctgtcaagcgaaccccaaaccccacctgcccaaaaaggcactgtcccccttcctacaatctccgggcatagagagttggtcctctcgagccccgaagatctaacacaggactttgaagagatgaaaagggaggagagagccctattggctgagcagcgcgatacgggcctcggcgacaagccattccctttggatactgccgaggaggggcctccaagcacagcgatccagggtacgccaccttcggttcccggtctgggccaggaggagcatgttatgaaggagaaagagctggtgccggaagtccccgaggagcagggtagcaaggaccggggactcgacagtggggctgagacagaggaggaaaaagacacatgggaggaaaagaagcaacgggaagctgaaagactgcccgatcgcaccgaagctcgagaggaatcggagcctgaagtgaaggaagatgtcatcgaaaaggccgagctcgaagagatggaggaggtccatccatctgacgaagaagaagaggatgccactaaagccgagggattttaccagaaacatatgcaagaaccgctgaaggtgaccccccgaagccgggaggctttcggaggaagagagcttggcctgcagggcaaagccccagagaaagagaccagcctcttcttaagctccctaaccactccggctggggctacagaacatgtctcatacattcaagacgaaaccatccccggttacagtgagactgagcagacaatttcagacgaagagatccatgacgaacccgaggagcgcccagcaccaccaaggttccatacctctacatacgatttgccaggtcccgaaggcgctgggcctttcgaggcttctcagcctgccgacagtgccgtgcccgctacctctgggaaggtgtacgggacacccgagaccgagctgacctatcctactaacattgtggcagcccctctggcggaggaagagcatgtatcttccgccaccagcattacagaatgcgacaagctgtccagttttgctacatcagtggcggaggaccagtccgtcgcctctcttaccgcaccacagaccgaggaaacaggcaaaagcagtctcctgctggatacagtaaccagcattccttcctcccggacagaagcgacccagggactcgactatgttcccagtgccggaacaatctccccaacatcctctctcgaggaggataaggggttcaagagccctccttgtgaagatttttcagtgaccggagagtccgagaaaaggggggaaatcatcggcaaagggttaagcggggagagagccgtagaggaggaagaggaagagactgcaaatgtcgagatgagtgagaagttgtgctctcagtacggtactcccgtcttttctgcccctggccacgccctccaccctggtgaacctgccttgggcgaagctgaggagagatgtctgtcacccgatgactctacagtgaagatggcctcaccgcctccatctgggccaccatctgccactcacaccccttttcaccagagtccagttgaagagaaaagcgaaccacaagactttcaggaagccgatagctggggcgataccaagcggactccgggagtgggcaaagaagatgcggctgaggaaaccgtgaaacctgggccagaagagggcaccctggaaaaggaagagaaggtgccaccacccagatcccctcaagcgcaagaggcccctgtaaacatcgatgaaggcctgacagggtgtacaatccagctactcccagctcaggacaaggccatagttttcgagatcatggaagcgggagagcctaccgggcctatcttgggcgcagaggcgctaccaggcggactgagaaccctcccgcaggaacccggaaagccacagaaggacgaggtcttgcgctaccccgatcggagtcttagccctgaagacgccgaatccctgtctgtgttgagtgtgccaagcccagacaccgctaaccaggagcccaccccgaagtcgccatgtgggcttacagagcaatacttgcacaaagaccggtggccggaggtttctccagaagatacacagtcactctccctgtccgaggaaagtccctccaaagaaacatctctggatgtgtcctccaagcagttatcccctgaatctctcggcactttgcagttcggcgagctgaacctgggaaaggaggaaatgggacatttaatgcaagcagaggacacttctcatcacaccgcacctatgagcgtccctgaacctcatgcggcaacagcgagtccacctactgatgggacaacccggtatagtgcgcagactgacattaccgacgacagtttagacagaaaatcacctgcttcctccttcagccacagcacccccagcggaaatggaaagtaccttccaggagcaataacgtccccagacgagcacatactcaccccagacagttctttttctaagagccctgagagcctgcccggtcccgcactcgaggacatcgccatcaagtgggaagacaaagtccctggcctgaaagatagaacctccgagcagaagaaggaaccggagcccaaagacgaggtgttgcagcagaaggataaaacccttgagcacaaggaggtcgtggaaccgaaagacacagcgatctaccagaaagatgaggccctgcatgttaaaaacgaggccgtcaagcagcaggacaaggcccttgagcagaaagggcgtgatcttgagcagaaggacactgcactggagcagaaggacaaggctctcgaacctaaggacaaggatctggaagaaaaagacaaggccttggaacagaaggataagataccagaggaaaaagataaggcgttagaacaaaaagacaccgccctggaacagaaggataaggctctcgaacctaaggacaaggatctggaacagaaggaccgcgtcttggagcaaaaagagaaaattccagaggaaaaagataaggccctggaccagaaggtgagatccgtcgagcacaaagccccagaagataccgtggctgagatgaaggatcgtgacttggaacaaacagacaaagcccctgagcagaaacaccaggctcaggagcaaaaagacaaggtgtctgaaaagaaagaccaggccctcgaacagaagtactgggcacttggccagaaggatgaggcactagagcagaacatacaggctcttgaagagaaccaccagacgcaggagcaggaaagcctggtccaggaggataagacaaggaagcccaaaatgctagaagagaagagccccgaaaaagtcaaagccatggaagaaaagctcgaagccctgttagagaagaccaaagctctgggcctcgaagaaagtttggtccaggagggtcgggcaagggagcaggaggagaagtactggagaggacaggacgtggtccaggaatggcaggaaacctcgcccactcgcgaggaacctgcaggggagcagaaggaactggcaccggcatgggaggataccagtccagagcaggacaatcgctactggaggggcagggaggacgtcgctctggagcaggatacctattggcgggagctatcatgtgagcgaaaagtctggttcccccatgagcttgacgggcagggcgctagaccccattacacagaggaaagagaatctacgtttctggacgaaggtcccgatgatgaacaggaggtgccccttcgggagcatgcaacacgcagcccttgggccagtgattttaaggacttccaagaaagtagccctcaaaagggactggaagttgagcgttggctcgccgagtctccagtgggactgcctcctgaagaggaggacaagctaactcgcagtcccttcgaaataatctcgccccctgcctcacctcccgagatggtcggccaacgggtcccaagtgcccctgggcaggaatcaccaataccggaccccaaattaatgcctcatatgaagaatgaaccaacaactccttcctggcttgccgatatccccccatgggtcccaaaggataggcccttaccgccagccccactgagcccagcgcctggccctcctacccccgctcctgagtctcatactcctgcgccattctcctgggggactgctgaatacgacagcgtggtggcggcagtgcaggagggggcagcggaactggagggcggtccatactcccctctgggcaaggactaccgcaaagctgaaggcgagagagaggaggaggggagggccgaggcccctgacaaaagctcccacagctccaaggtgccagaggcttctaaaagtcacgcaactacagagcccgaacagacggagcctgaacagagggagcccactccttaccctgacgaaagaagcttccaatacgccgacatctacgagcaaatgatgctcacagggctgggccctgcctgtccgacacgcgaaccccctctgggtgcagctggtgattggccgccatgtctttccactaaggaagcagccgctgggaggaacacctctgccgagaaagaactgtccagccctatcagtccaaagtcgctccagagtgacaccccaactttctcctacgccgctttagccggaccgactgtgccaccacggccagagcccggtccgtccatggaacctagcctgacgccacccgcagttccgccacgcgctcccattctgtccaaaggacccagcccccctctgaatggcaacatcttatcttgctcccccgataggagaagcccttctcctaaagagagcggcagatctcattgggacgatagtacttccgattccgaattggagaaaggcgctcgggaacagcccgagaaagaggctcaatctccatcaccgcctcaccctatcccgatgggtagccctacattgtggccagaaaccgaggcccatgtctcccccccactcgacagtcaccttggacccgctcggccttcattggacttccctgccagcgccttcggattctccagtctgcagcccgcaccacctcagttgcctagtcccgctgagccacgctccgccccttgtggtagtctggcctttagtggggaccgagcccttgccctggctcctggacctccaacacggacaagacacgacgagtaccttgaggtcaccaaagccccttctcttgattcctctttaccgcagttaccgagtcctagcagccctggcgctcctttgctgtcaaacctcccgaggcctgcatctcccgcactgtctgagggaagttctagtgaagccacaacacccgtcatttcctcagtcgcagaaagattctcccctagcctcgaggctgctgagcaggagtccggggagctggatcctggaatggaaccagccgcacactctttgtgggacctgacgccgctttctcctgctccaccagcctcactagatttagctcttgccccagccccaagcctgccgggagacatgggcgacggtattctgccctgtcatttagagtgctccgaagccgcaactgagaagccatctccctttcaggtcccaagtgaggattgtgctgccaacggtcctacggagacttcgcctaacccaccaggcccagctccagccaaggctgaaaatgaagaagccgctgcctgtcccgcttgggaacgaggcgcatggccagagggggctgaaaggtcttctcggccagatacgcttctcagtcccgaacagccagtttgccccgctgggggttcagggggaccacccagctcagcatcgcctgaggtggaagcgggaccccaagggtgtgcgaccgaacctcgcccacatcgcggtgaactgtcaccctcgttccttaatccacccctgcctccctccatcgatgaccgggatctatctaccgaagaagtgcgcttagtggggagagggggaagacgccgtgtcggcggacctggaaccactggtggaccgtgtcctgtcacagatgagactcccccaacatccgcgtcagattccggctcctctcagagcgatagcgatgtgcctccagaaacagaagaatgccccagcattactgctgaggcagctttggactctgatgaggacggcgacttcctccccgtcgataaagctgggggagtcagcggaacccaccatcctagacctggacacgacccacctccactaccacaaccagatcccagaccaagcccacctcggccagacgtgtgtatggctgacccggagggattatcaagcgagtccggaagggttgagagactaagggaaaaagaaaaagtgcaaggcagggtggggaggcgagctcccggaaaagccaagccagcaagcccggcacgtaggctcgatttgaggggaaagaggagccctacgcccggtaaaggcccagctgaccgagcctcccgggcacctcctcgcccacgctctaccaccagtcaggtcacaccagcggaagaaaaagacggccactctcccatgtcaaagggactggtgaacgggttaaaggccggaccaatggcactgagctccaaaggcagttcgggggctcccgtctacgtagacttagcctacatccccaatcactgtagtggaaagacagccgatctggattttttccgcagagtgcgggcaagttattacgtggtgtccggaaatgatcctgccaatggcgagccatcgagagccgtgctggacgccctactggaagggaaggcccaatggggtgagaatcttcaggttagtgtgaccctgatccctactcatgataccgaagtgactagggagtggtaccaacagacccacgaacagcagcagcagctgaatgtactagttctagcctcttcaagtaccgtcgtgatgcaggacgagagctttccagcctgcaaaattgaattcta

SEQ ID NO: 127783 - DNA, 1884 bp, Artificial Sequence
  derived and/or modified sequence
atggacggcgtcgccgaatttagtgaatacgtgtccgagaccgtggacgttccctcaccgttcgatctgctggagcccccaacttctggcggatttcttaagctgagtaagccatgttgttacatcttccctggcggacgaggcgactccgcattgtttgcagtcaatggattcaacatcttggtagacggaggcagcgatagaaaaagttgtttctggaagctagtcagacatcttgacagaattgattcagttctactgacgcatatcggcgctgacaacttgcctggaatcaatggtctgctgcaacgcaaagttgctgagcttgaggaggaacagagtcaaggctcatcctcgtacagcgattgggttaaaaatttaatctctcctgagttgggagtagtgttttttaatgttcctgaaaagctgcgcctgcctgacgccagtaggaaagccaagaggtccattgaagaagcctgtctcactctgcagcacctcaatagacttgggattcaggcggaacctctgtatcgcgtggtctccaacacaatcgaaccgctgaccctgtttcataaaatgggagttggcaggctcgatatgtatgttctcaatccggtgaaagacagcaaagagatgcagttcctgatgcaaaagtgggcagggaattccaaggctaagaccgggatcgtgttacctaatggcaaagaagccgagatctcggttccatatttgacgtccatcactgccctcgttgtctggctgcccgcaaatcctaccgagaaaatagtgcgggtattattcccaggcaacgctccccagaataaaatcttagagggcctcgaaaagcttcggcaccttgactttttgaggtacccagtagccactcagaaagacctcgctagtggggctgttcctaccaacctcaagccaagcaagatcaagcaacgggcagatagtaaagagagcctgaaggccacaaccaaaacggctgtgtccaagctggccaagcgcgaggaggtcgtagaggagggagctaaggaggccaggtcagaacttgctaaggagctggcgaagactgagaaaaaggccaaagaaagttcagaaaaaccaccagagaagcccgctaaacctgagcgggtgaaaacagagagcagcgaggcccttaaggcggagaagagaaagctgatcaaagataaggtcgggaaaaaacatttgaaagagaaaattagcaaactcgaggaaaaaaaggacaaggagaagaaggaaatcaaaaaggaacggaaagaactgaagaaggatgaggggaggaaggaggaaaaaaaggatgctaagaaagaagaaaagcgaaaagacacgaaacctgagttgaaaaaaattagcaaaccggacttaaagcccttcactccagaggtgcgaaagacactgtataaagcaaaagtgcctggcagagtcaagattgaccggtccagggcaatcaggggcgagaaagagctctcctctgagccacagacgcctcctgcacagaaaggcacggttcccctgcccacgatctccgggcaccgcgaactagtcctgtcttcccccgaagatttaacccaggacttcgaggagatgaagagagaggaacgagcactgctggctgaacagcgagatactggcctcggtgacaagccgttccccctggacacagccgaagagggtccaccatcaacagctatccaggggacgcccccaagtgtgccaggactcggacaggaggagcacgtaatgaaagagaaagagctcgtgccggaagtgccggaggaacagggctccaaggaccgcggactggatagtggggcagaaacagaagaaaaaaaaaaaaaaaaaaagaagaagaagtag

SEQ ID NO: 127784 - DNA, 8412 bp, Artificial Sequence
  derived and/or modified sequence
atggacggcgtggccgagttcagcgagtacgtgagcgagaccgtggacgtgcccagccccttcgacctgctggagccccccaccagcggcggcttcctgaagctgagcaagccctgctgctacatcttccccggcggcagaggcgacagcgccctgttcgccgtgaacggcttcaacatcctggtggacggcggcagcgacagaaagagctgcttctggaagctggtgagacacctggacagaatcgacagcgtgctgctgacccacatcggcgccgacaacctgcccggcatcaacggcctgctgcagagaaaggtggccgagctggaggaggagcagagccagggcagcagcagctacagcgactgggtgaagaacctgatcagccccgagctgggcgtggtgttcttcaacgtgcccgagaagctgagactgcccgacgccagcagaaaggccaagagaagcatcgaggaggcctgcctgaccctgcagcacctgaacagactgggcatccaggccgagcccctgtacagagtggtgagcaacaccatcgagcccctgaccctgttccacaagatgggcgtgggcagactggacatgtacgtgctgaaccccgtgaaggacagcaaggagatgcagttcctgatgcagaagtgggccggcaacagcaaggccaagaccggcatcgtgctgcccaacggcaaggaggccgagatcagcgtgccctacctgaccagcatcaccgccctggtggtgtggctgcccgccaaccccaccgagaagatcgtgagagtgctgttccccggcaacgccccccagaacaagatcctggagggcctggagaagctgagacacctggacttcctgagataccccgtggccacccagaaggacctggccagcggcgccgtgcccaccaacctgaagcccagcaagatcaagcagagagccgacagcaaggagagcctgaaggccaccaccaagaccgccgtgagcaagctggccaagagagaggaggtggtggaggagggcgccaaggaggccagaagcgagctggccaaggagctggccaagaccgagaagaaggccaaggagagcagcgagaagccccccgagaagcccgccaagcccgagagagtgaagaccgagagcagcgaggccctgaaggccgagaagagaaagctgatcaaggacaaggtgggcaagaagcacctgaaggagaagatcagcaagctggaggagaagaaggacaaggagaagaaggagatcaagaaggagagaaaggagctgaagaaggacgagggcagaaaggaggagaagaaggacgccaagaaggaggagaagagaaaggacaccaagcccgagctgaagaagatcagcaagcccgacctgaagcccttcacccccgaggtgagaaagaccctgtacaaggccaaggtgcccggcagagtgaagatcgacagaagcagagccatcagaggcgagaaggagctgagcagcgagccccagaccccccccgcccagaagggcaccgtgcccctgcccaccatcagcggccacagagagctggtgctgagcagccccgaggacctgacccaggacttcgaggagatgaagagagaggagagagccctgctggccgagcagagagacaccggcctgggcgacaagcccttccccctggacaccgccgaggagggcccccccagcaccgccatccagggcaccccccccagcgtgcccggcctgggccaggaggagcacgtgatgaaggagaaggagctggtgcccgaggtgcccgaggagcagggcagcaaggacagaggcctggacagcggcgccgagaccgaggaggagaaggacacctgggaggagaagaagcagagagaggccgagagactgcccgacagaaccgaggccagagaggagagcgagcccgaggtgaaggaggacgtgatcgagaaggccgagctggaggagatggaggaggtgcaccccagcgacgaggaggaggaggacgccaccaaggccgagggcttctaccagaagcacatgcaggagcccctgaaggtgacccccagaagcagagaggccttcggcggcagagagctgggcctgcagggcaaggcccccgagaaggagaccagcctgttcctgagcagcctgaccacccccgccggcgccaccgagcacgtgagctacatccaggacgagaccatccccggctacagcgagaccgagcagaccatcagcgacgaggagatccacgacgagcccgaggagagacccgccccccccagattccacaccagcacctacgacctgcccggccccgagggcgccggccccttcgaggccagccagcccgccgacagcgccgtgcccgccaccagcggcaaggtgtacggcacccccgagaccgagctgacctaccccaccaacatcgtggccgcccccctggccgaggaggagcacgtgagcagcgccaccagcatcaccgagtgcgacaagctgagcagcttcgccaccagcgtggccgaggaccagagcgtggccagcctgaccgccccccagaccgaggagaccggcaagagcagcctgctgctggacaccgtgaccagcatccccagcagcagaaccgaggccacccagggcctggactacgtgcccagcgccggcaccatcagccccaccagcagcctggaggaggacaagggcttcaagagccccccctgcgaggacttcagcgtgaccggcgagagcgagaagagaggcgagatcatcggcaagggcctgagcggcgagagagccgtggaggaggaggaggaggagaccgccaacgtggagatgagcgagaagctgtgcagccagtacggcacccccgtgttcagcgcccccggccacgccctgcaccccggcgagcccgccctgggcgaggccgaggagagatgcctgagccccgacgacagcaccgtgaagatggccagccccccccccagcggcccccccagcgccacccacacccccttccaccagagccccgtggaggagaagagcgagccccaggacttccaggaggccgacagctggggcgacaccaagagaacccccggcgtgggcaaggaggacgccgccgaggagaccgtgaagcccggccccgaggagggcaccctggagaaggaggagaaggtgcccccccccagaagcccccaggcccaggaggcccccgtgaacatcgacgagggcctgaccggctgcaccatccagctgctgcccgcccaggacaaggccatcgtgttcgagatcatggaggccggcgagcccaccggccccatcctgggcgccgaggccctgcccggcggcctgagaaccctgccccaggagcccggcaagccccagaaggacgaggtgctgagataccccgacagaagcctgagccccgaggacgccgagagcctgagcgtgctgagcgtgcccagccccgacaccgccaaccaggagcccacccccaagagcccctgcggcctgaccgagcagtacctgcacaaggacagatggcccgaggtgagccccgaggacacccagagcctgagcctgagcgaggagagccccagcaaggagaccagcctggacgtgagcagcaagcagctgagccccgagagcctgggcaccctgcagttcggcgagctgaacctgggcaaggaggagatgggccacctgatgcaggccgaggacaccagccaccacaccgcccccatgagcgtgcccgagccccacgccgccaccgccagcccccccaccgacggcaccaccagatacagcgcccagaccgacatcaccgacgacagcctggacagaaagagccccgccagcagcttcagccacagcacccccagcggcaacggcaagtacctgcccggcgccatcaccagccccgacgagcacatcctgacccccgacagcagcttcagcaagagccccgagagcctgcccggccccgccctggaggacatcgccatcaagtgggaggacaaggtgcccggcctgaaggacagaaccagcgagcagaagaaggagcccgagcccaaggacgaggtgctgcagcagaaggacaagaccctggagcacaaggaggtggtggagcccaaggacaccgccatctaccagaaggacgaggccctgcacgtgaagaacgaggccgtgaagcagcaggacaaggccctggagcagaagggcagagacctggagcagaaggacaccgccctggagcagaaggacaaggccctggagcccaaggacaaggacctggaggagaaggacaaggccctggagcagaaggacaagatccccgaggagaaggacaaggccctggagcagaaggacaccgccctggagcagaaggacaaggccctggagcccaaggacaaggacctggagcagaaggacagagtgctggagcagaaggagaagatccccgaggagaaggacaaggccctggaccagaaggtgagaagcgtggagcacaaggcccccgaggacaccgtggccgagatgaaggacagagacctggagcagaccgacaaggcccccgagcagaagcaccaggcccaggagcagaaggacaaggtgagcgagaagaaggaccaggccctggagcagaagtactgggccctgggccagaaggacgaggccctggagcagaacatccaggccctggaggagaaccaccagacccaggagcaggagagcctggtgcaggaggacaagaccagaaagcccaagatgctggaggagaagagccccgagaaggtgaaggccatggaggagaagctggaggccctgctggagaagaccaaggccctgggcctggaggagagcctggtgcaggagggcagagccagagagcaggaggagaagtactggagaggccaggacgtggtgcaggagtggcaggagaccagccccaccagagaggagcccgccggcgagcagaaggagctggcccccgcctgggaggacaccagccccgagcaggacaacagatactggagaggcagagaggacgtggccctggagcaggacacctactggagagagctgagctgcgagagaaaggtgtggttcccccacgagctggacggccagggcgccagaccccactacaccgaggagagagagagcaccttcctggacgagggccccgacgacgagcaggaggtgcccctgagagagcacgccaccagaagcccctgggccagcgacttcaaggacttccaggagagcagcccccagaagggcctggaggtggagagatggctggccgagagccccgtgggcctgccccccgaggaggaggacaagctgaccagaagccccttcgagatcatcagcccccccgccagcccccccgagatggtgggccagagagtgcccagcgcccccggccaggagagccccatccccgaccccaagctgatgccccacatgaagaacgagcccaccacccccagctggctggccgacatccccccctgggtgcccaaggacagacccctgccccccgcccccctgagccccgcccccggcccccccacccccgcccccgagagccacacccccgcccccttcagctggggcaccgccgagtacgacagcgtggtggccgccgtgcaggagggcgccgccgagctggagggcggcccctacagccccctgggcaaggactacagaaaggccgagggcgagagagaggaggagggcagagccgaggcccccgacaagagcagccacagcagcaaggtgcccgaggccagcaagagccacgccaccaccgagcccgagcagaccgagcccgagcagagagagcccaccccctaccccgacgagagaagcttccagtacgccgacatctacgagcagatgatgctgaccggcctgggccccgcctgccccaccagagagccccccctgggcgccgccggcgactggcccccctgcctgagcaccaaggaggccgccgccggcagaaacaccagcgccgagaaggagctgagcagccccatcagccccaagagcctgcagagcgacacccccaccttcagctacgccgccctggccggccccaccgtgccccccagacccgagcccggccccagcatggagcccagcctgaccccccccgccgtgccccccagagcccccatcctgagcaagggccccagcccccccctgaacggcaacatcctgagctgcagccccgacagaagaagccccagccccaaggagagcggcagaagccactgggacgacagcaccagcgacagcgagctggagaagggcgccagagagcagcccgagaaggaggcccagagccccagccccccccaccccatccccatgggcagccccaccctgtggcccgagaccgaggcccacgtgagcccccccctggacagccacctgggccccgccagacccagcctggacttccccgccagcgccttcggcttcagcagcctgcagcccgcccccccccagctgcccagccccgccgagcccagaagcgccccctgcggcagcctggccttcagcggcgacagagccctggccctggcccccggcccccccaccagaaccagacacgacgagtacctggaggtgaccaaggcccccagcctggacagcagcctgccccagctgcccagccccagcagccccggcgcccccctgctgagcaacctgcccagacccgccagccccgccctgagcgagggcagcagcagcgaggccaccacccccgtgatcagcagcgtggccgagagattcagccccagcctggaggccgccgagcaggagagcggcgagctggaccccggcatggagcccgccgcccacagcctgtgggacctgacccccctgagccccgccccccccgccagcctggacctggccctggcccccgcccccagcctgcccggcgacatgggcgacggcatcctgccctgccacctggagtgcagcgaggccgccaccgagaagcccagccccttccaggtgcccagcgaggactgcgccgccaacggccccaccgagaccagccccaacccccccggccccgcccccgccaaggccgagaacgaggaggccgccgcctgccccgcctgggagagaggcgcctggcccgagggcgccgagagaagcagcagacccgacaccctgctgagccccgagcagcccgtgtgccccgccggcggcagcggcggcccccccagcagcgccagccccgaggtggaggccggcccccagggctgcgccaccgagcccagaccccacagaggcgagctgagccccagcttcctgaacccccccctgccccccagcatcgacgacagagacctgagcaccgaggaggtgagactggtgggcagaggcggcagaagaagagtgggcggccccggcaccaccggcggcccctgccccgtgaccgacgagaccccccccaccagcgccagcgacagcggcagcagccagagcgacagcgacgtgccccccgagaccgaggagtgccccagcatcaccgccgaggccgccctggacagcgacgaggacggcgacttcctgcccgtggacaaggccggcggcgtgagcggcacccaccaccccagacccggccacgaccccccccccctgccccagcccgaccccagacccagcccccccagacccgacgtgtgcatggccgaccccgagggcctgagcagcgagagcggcagagtggagagactgagagagaaggagaaggtgcagggcagagtgggcagaagagcccccggcaaggccaagcccgccagccccgccagaagactggacctgagaggcaagagaagccccacccccggcaagggccccgccgacagagccagcagagccccccccagacccagaagcaccaccagccaggtgacccccgccgaggagaaggacggccacagccccatgagcaagggcctggtgaacggcctgaaggccggccccatggccctgagcagcaagggcagcagcggcgcccccgtgtacgtggacctggcctacatccccaaccactgcagcggcaagaccgccgacctggacttcttcagaagagtgagagccagctactacgtggtgagcggcaacgaccccgccaacggcgagcccagcagagccgtgctggacgccctgctggagggcaaggcccagtggggcgagaacctgcaggtgaccctgatccccacccacgacaccgaggtgaccagagagtggtaccagcagacccacgagcagcagcagcagctgaacgtgctggtgctggccagcagcagcaccgtggtgatgcaggacgagagcttccccgcctgcaagatcgagttctag

SEQ ID NO: 127785 - DNA, 9126 bp, Artificial Sequence
  derived and/or modified sequence
atggagaccgaggccgagcccgccagaccccacggcgtggccatggagaccacccccggcctgggcctgagaagccccggcgcccccctggcccagaaccccgccgagctgctgtgcgaggccggcgccgccgtggccgccgccagatgggacctgcagaagcacagcctgctgatcgtgatcggcgacatcggcaccgagagccagctgagagccgtgagagcccacctggagcagggcatcctgagctggaacatcgacctgagcagcttcgacctgaaccagcagctgagactgttcatcaccagacacctggcccacttcagcagcgaggtgaagggccagagaaccctgtgccaccagagcgagatcctggagaccatcatcctggtgaaccccagcgccgacagcatcagcagcgaggtgcaccacctgctgagcagcagcagcgcctacaagctgctgatcctgagcggccagagcctggagcccggcggcgacctgatcctgcagagcggcacctacagctacgagaacttcgcccaggtgctgcacaaccccgagatcagccagctgctgagcaacagagaccccggcatccaggccttcctgaccgtgagctgcctgggcgagggcgactggagccacctgggcctgagcagcagccaggagaccctgcacctgagactgaaccccgagcccaccctgcccaccatggacggcgtggccgagttcagcgagtacgtgagcgagaccgtggacgtgcccagccccttcgacctgctggagccccccaccagcggcggcttcctgaagctgagcaagccctgctgctacatcttccccggcggcagaggcgacagcgccctgttcgccgtgaacggcttcaacatcctggtggacggcggcagcgacagaaagagctgcttctggaagctggtgagacacctggacagaatcgacagcgtgctgctgacccacatcggcgccgacaacctgcccggcatcaacggcctgctgcagagaaaggtggccgagctggaggaggagcagagccagggcagcagcagctacagcgactgggtgaagaacctgatcagccccgagctgggcgtggtgttcttcaacgtgcccgagaagctgagactgcccgacgccagcagaaaggccaagagaagcatcgaggaggcctgcctgaccctgcagcacctgaacagactgggcatccaggccgagcccctgtacagagtggtgagcaacaccatcgagcccctgaccctgttccacaagatgggcgtgggcagactggacatgtacgtgctgaaccccgtgaaggacagcaaggagatgcagttcctgatgcagaagtgggccggcaacagcaaggccaagaccggcatcgtgctgcccaacggcaaggaggccgagatcagcgtgccctacctgaccagcatcaccgccctggtggtgtggctgcccgccaaccccaccgagaagatcgtgagagtgctgttccccggcaacgccccccagaacaagatcctggagggcctggagaagctgagacacctggacttcctgagataccccgtggccacccagaaggacctggccagcggcgccgtgcccaccaacctgaagcccagcaagatcaagcagagagccgacagcaaggagagcctgaaggccaccaccaagaccgccgtgagcaagctggccaagagagaggaggtggtggaggagggcgccaaggaggccagaagcgagctggccaaggagctggccaagaccgagaagaaggccaaggagagcagcgagaagccccccgagaagcccgccaagcccgagagagtgaagaccgagagcagcgaggccctgaaggccgagaagagaaagctgatcaaggacaaggtgggcaagaagcacctgaaggagaagatcagcaagctggaggagaagaaggacaaggagaagaaggagatcaagaaggagagaaaggagctgaagaaggacgagggcagaaaggaggagaagaaggacgccaagaaggaggagaagagaaaggacaccaagcccgagctgaagaagatcagcaagcccgacctgaagcccttcacccccgaggtgagaaagaccctgtacaaggccaaggtgcccggcagagtgaagatcgacagaagcagagccatcagaggcgagaaggagctgagcagcgagccccagaccccccccgcccagaagggcaccgtgcccctgcccaccatcagcggccacagagagctggtgctgagcagccccgaggacctgacccaggacttcgaggagatgaagagagaggagagagccctgctggccgagcagagagacaccggcctgggcgacaagcccttccccctggacaccgccgaggagggcccccccagcaccgccatccagggcaccccccccagcgtgcccggcctgggccaggaggagcacgtgatgaaggagaaggagctggtgcccgaggtgcccgaggagcagggcagcaaggacagaggcctggacagcggcgccgagaccgaggaggagaaggacacctgggaggagaagaagcagagagaggccgagagactgcccgacagaaccgaggccagagaggagagcgagcccgaggtgaaggaggacgtgatcgagaaggccgagctggaggagatggaggaggtgcaccccagcgacgaggaggaggaggacgccaccaaggccgagggcttctaccagaagcacatgcaggagcccctgaaggtgacccccagaagcagagaggccttcggcggcagagagctgggcctgcagggcaaggcccccgagaaggagaccagcctgttcctgagcagcctgaccacccccgccggcgccaccgagcacgtgagctacatccaggacgagaccatccccggctacagcgagaccgagcagaccatcagcgacgaggagatccacgacgagcccgaggagagacccgccccccccagattccacaccagcacctacgacctgcccggccccgagggcgccggccccttcgaggccagccagcccgccgacagcgccgtgcccgccaccagcggcaaggtgtacggcacccccgagaccgagctgacctaccccaccaacatcgtggccgcccccctggccgaggaggagcacgtgagcagcgccaccagcatcaccgagtgcgacaagctgagcagcttcgccaccagcgtggccgaggaccagagcgtggccagcctgaccgccccccagaccgaggagaccggcaagagcagcctgctgctggacaccgtgaccagcatccccagcagcagaaccgaggccacccagggcctggactacgtgcccagcgccggcaccatcagccccaccagcagcctggaggaggacaagggcttcaagagccccccctgcgaggacttcagcgtgaccggcgagagcgagaagagaggcgagatcatcggcaagggcctgagcggcgagagagccgtggaggaggaggaggaggagaccgccaacgtggagatgagcgagaagctgtgcagccagtacggcacccccgtgttcagcgcccccggccacgccctgcaccccggcgagcccgccctgggcgaggccgaggagagatgcctgagccccgacgacagcaccgtgaagatggccagccccccccccagcggcccccccagcgccacccacacccccttccaccagagccccgtggaggagaagagcgagccccaggacttccaggaggccgacagctggggcgacaccaagagaacccccggcgtgggcaaggaggacgccgccgaggagaccgtgaagcccggccccgaggagggcaccctggagaaggaggagaaggtgcccccccccagaagcccccaggcccaggaggcccccgtgaacatcgacgagggcctgaccggctgcaccatccagctgctgcccgcccaggacaaggccatcgtgttcgagatcatggaggccggcgagcccaccggccccatcctgggcgccgaggccctgcccggcggcctgagaaccctgccccaggagcccggcaagccccagaaggacgaggtgctgagataccccgacagaagcctgagccccgaggacgccgagagcctgagcgtgctgagcgtgcccagccccgacaccgccaaccaggagcccacccccaagagcccctgcggcctgaccgagcagtacctgcacaaggacagatggcccgaggtgagccccgaggacacccagagcctgagcctgagcgaggagagccccagcaaggagaccagcctggacgtgagcagcaagcagctgagccccgagagcctgggcaccctgcagttcggcgagctgaacctgggcaaggaggagatgggccacctgatgcaggccgaggacaccagccaccacaccgcccccatgagcgtgcccgagccccacgccgccaccgccagcccccccaccgacggcaccaccagatacagcgcccagaccgacatcaccgacgacagcctggacagaaagagccccgccagcagcttcagccacagcacccccagcggcaacggcaagtacctgcccggcgccatcaccagccccgacgagcacatcctgacccccgacagcagcttcagcaagagccccgagagcctgcccggccccgccctggaggacatcgccatcaagtgggaggacaaggtgcccggcctgaaggacagaaccagcgagcagaagaaggagcccgagcccaaggacgaggtgctgcagcagaaggacaagaccctggagcacaaggaggtggtggagcccaaggacaccgccatctaccagaaggacgaggccctgcacgtgaagaacgaggccgtgaagcagcaggacaaggccctggagcagaagggcagagacctggagcagaaggacaccgccctggagcagaaggacaaggccctggagcccaaggacaaggacctggaggagaaggacaaggccctggagcagaaggacaagatccccgaggagaaggacaaggccctggagcagaaggacaccgccctggagcagaaggacaaggccctggagcccaaggacaaggacctggagcagaaggacagagtgctggagcagaaggagaagatccccgaggagaaggacaaggccctggaccagaaggtgagaagcgtggagcacaaggcccccgaggacaccgtggccgagatgaaggacagagacctggagcagaccgacaaggcccccgagcagaagcaccaggcccaggagcagaaggacaaggtgagcgagaagaaggaccaggccctggagcagaagtactgggccctgggccagaaggacgaggccctggagcagaacatccaggccctggaggagaaccaccagacccaggagcaggagagcctggtgcaggaggacaagaccagaaagcccaagatgctggaggagaagagccccgagaaggtgaaggccatggaggagaagctggaggccctgctggagaagaccaaggccctgggcctggaggagagcctggtgcaggagggcagagccagagagcaggaggagaagtactggagaggccaggacgtggtgcaggagtggcaggagaccagccccaccagagaggagcccgccggcgagcagaaggagctggcccccgcctgggaggacaccagccccgagcaggacaacagatactggagaggcagagaggacgtggccctggagcaggacacctactggagagagctgagctgcgagagaaaggtgtggttcccccacgagctggacggccagggcgccagaccccactacaccgaggagagagagagcaccttcctggacgagggccccgacgacgagcaggaggtgcccctgagagagcacgccaccagaagcccctgggccagcgacttcaaggacttccaggagagcagcccccagaagggcctggaggtggagagatggctggccgagagccccgtgggcctgccccccgaggaggaggacaagctgaccagaagccccttcgagatcatcagcccccccgccagcccccccgagatggtgggccagagagtgcccagcgcccccggccaggagagccccatccccgaccccaagctgatgccccacatgaagaacgagcccaccacccccagctggctggccgacatccccccctgggtgcccaaggacagacccctgccccccgcccccctgagccccgcccccggcccccccacccccgcccccgagagccacacccccgcccccttcagctggggcaccgccgagtacgacagcgtggtggccgccgtgcaggagggcgccgccgagctggagggcggcccctacagccccctgggcaaggactacagaaaggccgagggcgagagagaggaggagggcagagccgaggcccccgacaagagcagccacagcagcaaggtgcccgaggccagcaagagccacgccaccaccgagcccgagcagaccgagcccgagcagagagagcccaccccctaccccgacgagagaagcttccagtacgccgacatctacgagcagatgatgctgaccggcctgggccccgcctgccccaccagagagccccccctgggcgccgccggcgactggcccccctgcctgagcaccaaggaggccgccgccggcagaaacaccagcgccgagaaggagctgagcagccccatcagccccaagagcctgcagagcgacacccccaccttcagctacgccgccctggccggccccaccgtgccccccagacccgagcccggccccagcatggagcccagcctgaccccccccgccgtgccccccagagcccccatcctgagcaagggccccagcccccccctgaacggcaacatcctgagctgcagccccgacagaagaagccccagccccaaggagagcggcagaagccactgggacgacagcaccagcgacagcgagctggagaagggcgccagagagcagcccgagaaggaggcccagagccccagccccccccaccccatccccatgggcagccccaccctgtggcccgagaccgaggcccacgtgagcccccccctggacagccacctgggccccgccagacccagcctggacttccccgccagcgccttcggcttcagcagcctgcagcccgcccccccccagctgcccagccccgccgagcccagaagcgccccctgcggcagcctggccttcagcggcgacagagccctggccctggcccccggcccccccaccagaaccagacacgacgagtacctggaggtgaccaaggcccccagcctggacagcagcctgccccagctgcccagccccagcagccccggcgcccccctgctgagcaacctgcccagacccgccagccccgccctgagcgagggcagcagcagcgaggccaccacccccgtgatcagcagcgtggccgagagattcagccccagcctggaggccgccgagcaggagagcggcgagctggaccccggcatggagcccgccgcccacagcctgtgggacctgacccccctgagccccgccccccccgccagcctggacctggccctggcccccgcccccagcctgcccggcgacatgggcgacggcatcctgccctgccacctggagtgcagcgaggccgccaccgagaagcccagccccttccaggtgcccagcgaggactgcgccgccaacggccccaccgagaccagccccaacccccccggccccgcccccgccaaggccgagaacgaggaggccgccgcctgccccgcctgggagagaggcgcctggcccgagggcgccgagagaagcagcagacccgacaccctgctgagccccgagcagcccgtgtgccccgccggcggcagcggcggcccccccagcagcgccagccccgaggtggaggccggcccccagggctgcgccaccgagcccagaccccacagaggcgagctgagccccagcttcctgaacccccccctgccccccagcatcgacgacagagacctgagcaccgaggaggtgagactggtgggcagaggcggcagaagaagagtgggcggccccggcaccaccggcggcccctgccccgtgaccgacgagaccccccccaccagcgccagcgacagcggcagcagccagagcgacagcgacgtgccccccgagaccgaggagtgccccagcatcaccgccgaggccgccctggacagcgacgaggacggcgacttcctgcccgtggacaaggccggcggcgtgagcggcacccaccaccccagacccggccacgaccccccccccctgccccagcccgaccccagacccagcccccccagacccgacgtgtgcatggccgaccccgagggcctgagcagcgagagcggcagagtggagagactgagagagaaggagaaggtgcagggcagagtgggcagaagagcccccggcaaggccaagcccgccagccccgccagaagactggacctgagaggcaagagaagccccacccccggcaagggccccgccgacagagccagcagagccccccccagacccagaagcaccaccagccaggtgacccccgccgaggagaaggacggccacagccccatgagcaagggcctggtgaacggcctgaaggccggccccatggccctgagcagcaagggcagcagcggcgcccccgtgtacgtggacctggcctacatccccaaccactgcagcggcaagaccgccgacctggacttcttcagaagagtgagagccagctactacgtggtgagcggcaacgaccccgccaacggcgagcccagcagagccgtgctggacgccctgctggagggcaaggcccagtggggcgagaacctgcaggtgaccctgatccccacccacgacaccgaggtgaccagagagtggtaccagcagacccacgagcagcagcagcagctgaacgtgctggtgctggccagcagcagcaccgtggtgatgcaggacgagagcttccccgcctgcaagatcgagttctag

SEQ ID NO: 127786 - DNA, 8418 bp, Artificial Sequence
  derived and/or modified sequence
atggacggcgtggccgagttcagcgagtacgtgagcgagaccgtggacgtgcccagccccttcgacctgctggagccccccaccagcggcggcttcctgaagctgagcaagccctgctgctacatcttccccggcggcagaggcgacagcgccctgttcgccgtgaacggcttcaacatcctggtggacggcggcagcgacagaaagagctgcttctggaagctggtgagacacctggacagaatcgacagcgtgctgctgacccacatcggcgccgacaacctgcccggcatcaacggcctgctgcagagaaaggtggccgagctggaggaggagcagagccagggcagcagcagctacagcgactgggtgaagaacctgatcagccccgagctgggcgtggtgttcttcaacgtgcccgagaagctgagactgcccgacgccagcagaaaggccaagagaagcatcgaggaggcctgcctgaccctgcagcacctgaacagactgggcatccaggccgagcccctgtacagagtggtgagcaacaccatcgagcccctgaccctgttccacaagatgggcgtgggcagactggacatgtacgtgctgaaccccgtgaaggacagcaaggagatgcagttcctgatgcagaagtgggccggcaacagcaaggccaagaccggcatcgtgctgcccaacggcaaggaggccgagatcagcgtgccctacctgaccagcatcaccgccctggtggtgtggctgcccgccaaccccaccgagaagatcgtgagagtgctgttccccggcaacgccccccagaacaagatcctggagggcctggagaagctgagacacctggacttcctgagataccccgtggccacccagaaggacctggccagcggcgccgtgcccaccaacctgaagcccagcaagatcaagcagagagccgacagcaaggagagcctgaaggccaccaccaagaccgccgtgagcaagctggccaagagagaggaggtggtggaggagggcgccaaggaggccagaagcgagctggccaaggagctggccaagaccgagaagaaggccaaggagagcagcgagaagccccccgagaagcccgccaagcccgagagagtgaagaccgagagcagcgaggccctgaaggccgagaagagaaagctgatcaaggacaaggtgggcaagaagcacctgaaggagaagatcagcaagctggaggagaagaaggacaaggagaagaaggagatcaagaaggagagaaaggagctgaagaaggacgagggcagaaaggaggagaagaaggacgccaagaaggaggagaagagaaaggacaccaagcccgagctgaagaagatcagcaagcccgacctgaagcccttcacccccgaggtgagaaagaccctgtacaaggccaaggtgcccggcagagtgaagatcgacagaagcagagccatcagaggcgagaaggagctgagcagcgagccccagaccccccccgcccagaagggcaccgtgcccctgcccaccatcagcggccacagagagctggtgctgagcagccccgaggacctgacccaggacttcgaggagatgaagagagaggagagagccctgctggccgagcagagagacaccggcctgggcgacaagcccttccccctggacaccgccgaggagggcccccccagcaccgccatccagggcaccccccccagcgtgcccggcctgggccaggaggagcacgtgatgaaggagaaggagctggtgcccgaggtgcccgaggagcagggcagcaaggacagaggcctggacagcggcgccgagaccgaggaggagaaggacacctgggaggagaagaagcagagagaggccgagagactgcccgacagaaccgaggccagagaggagagcgagcccgaggtgaaggaggacgtgatcgagaaggccgagctggaggagatggaggaggtgcaccccagcgacgaggaggaggaggacgccaccaaggccgagggcttctaccagaagcacatgcaggagcccctgaaggtgacccccagaagcagagaggccttcggcggcagagagctgggcctgcagggcaaggcccccgagaaggagaccagcctgttcctgagcagcctgaccacccccgccggcgccaccgagcacgtgagctacatccaggacgagaccatccccggctacagcgagaccgagcagaccatcagcgacgaggagatccacgacgagcccgaggagagacccgccccccccagattccacaccagcacctacgacctgcccggccccgagggcgccggccccttcgaggccagccagcccgccgacagcgccgtgcccgccaccagcggcaaggtgtacggcacccccgagaccgagctgacctaccccaccaacatcgtggccgcccccctggccgaggaggagcacgtgagcagcgccaccagcatcaccgagtgcgacaagctgagcagcttcgccaccagcgtggccgaggaccagagcgtggccagcctgaccgccccccagaccgaggagaccggcaagagcagcctgctgctggacaccgtgaccagcatccccagcagcagaaccgaggccacccagggcctggactacgtgcccagcgccggcaccatcagccccaccagcagcctggaggaggacaagggcttcaagagccccccctgcgaggacttcagcgtgaccggcgagagcgagaagagaggcgagatcatcggcaagggcctgagcggcgagagagccgtggaggaggaggaggaggagaccgccaacgtggagatgagcgagaagctgtgcagccagtacggcacccccgtgttcagcgcccccggccacgccctgcaccccggcgagcccgccctgggcgaggccgaggagagatgcctgagccccgacgacagcaccgtgaagatggccagccccccccccagcggcccccccagcgccacccacacccccttccaccagagccccgtggaggagaagagcgagccccaggacttccaggaggccgacagctggggcgacaccaagagaacccccggcgtgggcaaggaggacgccgccgaggagaccgtgaagcccggccccgaggagggcaccctggagaaggaggagaaggtgcccccccccagaagcccccaggcccaggaggcccccgtgaacatcgacgagggcctgaccggctgcaccatccagctgctgcccgcccaggacaaggccatcgtgttcgagatcatggaggccggcgagcccaccggccccatcctgggcgccgaggccctgcccggcggcctgagaaccctgccccaggagcccggcaagccccagaaggacgaggtgctgagataccccgacagaagcctgagccccgaggacgccgagagcctgagcgtgctgagcgtgcccagccccgacaccgccaaccaggagcccacccccaagagcccctgcggcctgaccgagcagtacctgcacaaggacagatggcccgaggtgagccccgaggacacccagagcctgagcctgagcgaggagagccccagcaaggagaccagcctggacgtgagcagcaagcagctgagccccgagagcctgggcaccctgcagttcggcgagctgaacctgggcaaggaggagatgggccacctgatgcaggccgaggacaccagccaccacaccgcccccatgagcgtgcccgagccccacgccgccaccgccagcccccccaccgacggcaccaccagatacagcgcccagaccgacatcaccgacgacagcctggacagaaagagccccgccagcagcttcagccacagcacccccagcggcaacggcaagtacctgcccggcgccatcaccagccccgacgagcacatcctgacccccgacagcagcttcagcaagagccccgagagcctgcccggccccgccctggaggacatcgccatcaagtgggaggacaaggtgcccggcctgaaggacagaaccagcgagcagaagaaggagcccgagcccaaggacgaggtgctgcagcagaaggacaagaccctggagcacaaggaggtggtggagcccaaggacaccgccatctaccagaaggacgaggccctgcacgtgaagaacgaggccgtgaagcagcaggacaaggccctggagcagaagggcagagacctggagcagaaggacaccgccctggagcagaaggacaaggccctggagcccaaggacaaggacctggaggagaaggacaaggccctggagcagaaggacaagatccccgaggagaaggacaaggccctggagcagaaggacaccgccctggagcagaaggacaaggccctggagcccaaggacaaggacctggagcagaaggacagagtgctggagcagaaggagaagatccccgaggagaaggacaaggccctggaccagaaggtgagaagcgtggagcacaaggcccccgaggacaccgtggccgagatgaaggacagagacctggagcagaccgacaaggcccccgagcagaagcaccaggcccaggagcagaaggacaaggtgagcgagaagaaggaccaggccctggagcagaagtactgggccctgggccagaaggacgaggccctggagcagaacatccaggccctggaggagaaccaccagacccaggagcaggagagcctggtgcaggaggacaagaccagaaagcccaagatgctggaggagaagagccccgagaaggtgaaggccatggaggagaagctggaggccctgctggagaagaccaaggccctgggcctggaggagagcctggtgcaggagggcagagccagagagcaggaggagaagtactggagaggccaggacgtggtgcaggagtggcaggagaccagccccaccagagaggagcccgccggcgagcagaaggagctggcccccgcctgggaggacaccagccccgagcaggacaacagatactggagaggcagagaggacgtggccctggagcaggacacctactggagagagctgagctgcgagagaaaggtgtggttcccccacgagctggacggccagggcgccagaccccactacaccgaggagagagagagcaccttcctggacgagggccccgacgacgagcaggaggtgcccctgagagagcacgccaccagaagcccctgggccagcgacttcaaggacttccaggagagcagcccccagaagggcctggaggtggagagatggctggccgagagccccgtgggcctgccccccgaggaggaggacaagctgaccagaagccccttcgagatcatcagcccccccgccagcccccccgagatggtgggccagagagtgcccagcgcccccggccaggagagccccatccccgaccccaagctgatgccccacatgaagaacgagcccaccacccccagctggctggccgacatccccccctgggtgcccaaggacagacccctgccccccgcccccctgagccccgcccccggcccccccacccccgcccccgagagccacacccccgcccccttcagctggggcaccgccgagtacgacagcgtggtggccgccgtgcaggagggcgccgccgagctggagggcggcccctacagccccctgggcaaggactacagaaaggccgagggcgagagagaggaggagggcagagccgaggcccccgacaagagcagccacagcagcaaggtgcccgaggccagcaagagccacgccaccaccgagcccgagcagaccgagcccgagcagagagagcccaccccctaccccgacgagagaagcttccagtacgccgacatctacgagcagatgatgctgaccggcctgggccccgcctgccccaccagagagccccccctgggcgccgccggcgactggcccccctgcctgagcaccaaggaggccgccgccggcagaaacaccagcgccgagaaggagctgagcagccccatcagccccaagagcctgcagagcgacacccccaccttcagctacgccgccctggccggccccaccgtgccccccagacccgagcccggccccagcatggagcccagcctgaccccccccgccgtgccccccagagcccccatcctgagcaagggccccagcccccccctgaacggcaacatcctgagctgcagccccgacagaagaagccccagccccaaggagagcggcagaagccactgggacgacagcaccagcgacagcgagctggagaagggcgccagagagcagcccgagaaggaggcccagagccccagccccccccaccccatccccatgggcagccccaccctgtggcccgagaccgaggcccacgtgagcccccccctggacagccacctgggccccgccagacccagcctggacttccccgccagcgccttcggcttcagcagcctgcagcccgcccccccccagctgcccagccccgccgagcccagaagcgccccctgcggcagcctggccttcagcggcgacagagccctggccctggcccccggcccccccaccagaaccagacacgacgagtacctggaggtgaccaaggcccccagcctggacagcagcctgccccagctgcccagccccagcagccccggcgcccccctgctgagcaacctgcccagacccgccagccccgccctgagcgagggcagcagcagcgaggccaccacccccgtgatcagcagcgtggccgagagattcagccccagcctggaggccgccgagcaggagagcggcgagctggaccccggcatggagcccgccgcccacagcctgtgggacctgacccccctgagccccgccccccccgccagcctggacctggccctggcccccgcccccagcctgcccggcgacatgggcgacggcatcctgccctgccacctggagtgcagcgaggccgccaccgagaagcccagccccttccaggtgcccagcgaggactgcgccgccaacggccccaccgagaccagccccaacccccccggccccgcccccgccaaggccgagaacgaggaggccgccgcctgccccgcctgggagagaggcgcctggcccgagggcgccgagagaagcagcagacccgacaccctgctgagccccgagcagcccgtgtgccccgccggcggcagcggcggcccccccagcagcgccagccccgaggtggaggccggcccccagggctgcgccaccgagcccagaccccacagaggcgagctgagccccagcttcctgaacccccccctgccccccagcatcgacgacagagacctgagcaccgaggaggtgagactggtgggcagaggcggcagaagaagagtgggcggccccggcaccaccggcggcccctgccccgtgaccgacgagaccccccccaccagcgccagcgacagcggcagcagccagagcgacagcgacgtgccccccgagaccgaggagtgccccagcatcaccgccgaggccgccctggacagcgacgaggacggcgacttcctgcccgtggacaaggccggcggcgtgagcggcacccaccaccccagacccggccacgaccccccccccctgccccagcccgaccccagacccagcccccccagacccgacgtgtgcatggccgaccccgagggcctgagcagcgagagcggcagagtggagagactgagagagaaggagaaggtgcagggcagagtgggcagaagagcccccggcaaggccaagcccgccagccccgccagaagactggacctgagaggcaagagaagccccacccccggcaagggccccgccgacagagccagcagagccccccccagacccagaagcaccaccagccaggtgacccccgccgaggagaaggacggccacagccccatgagcaagggcctggtgaacggcctgaaggccggccccatggccctgagcagcaagggcagcagcggcgcccccgtgtacgtggacctggcctacatccccaaccactgcagcggcaagaccgccgacctggacttcttcagaagagtgagagccagctactacgtggtgagcggcaacgaccccgccaacggcgagcccagcagagccgtgctggacgccctgctggagggcaaggcccagtggggcgagaacctgcaggtgagcgtgaccctgatccccacccacgacaccgaggtgaccagagagtggtaccagcagacccacgagcagcagcagcagctgaacgtgctggtgctggccagcagcagcaccgtggtgatgcaggacgagagcttccccgcctgcaagatcgagttctag

SEQ ID NO: 127787 - DNA, 1884 bp, Artificial Sequence
  derived and/or modified sequence
atggacggcgtggccgagttcagcgagtacgtgagcgagaccgtggacgtgcccagccccttcgacctgctggagccccccaccagcggcggcttcctgaagctgagcaagccctgctgctacatcttccccggcggcagaggcgacagcgccctgttcgccgtgaacggcttcaacatcctggtggacggcggcagcgacagaaagagctgcttctggaagctggtgagacacctggacagaatcgacagcgtgctgctgacccacatcggcgccgacaacctgcccggcatcaacggcctgctgcagagaaaggtggccgagctggaggaggagcagagccagggcagcagcagctacagcgactgggtgaagaacctgatcagccccgagctgggcgtggtgttcttcaacgtgcccgagaagctgagactgcccgacgccagcagaaaggccaagagaagcatcgaggaggcctgcctgaccctgcagcacctgaacagactgggcatccaggccgagcccctgtacagagtggtgagcaacaccatcgagcccctgaccctgttccacaagatgggcgtgggcagactggacatgtacgtgctgaaccccgtgaaggacagcaaggagatgcagttcctgatgcagaagtgggccggcaacagcaaggccaagaccggcatcgtgctgcccaacggcaaggaggccgagatcagcgtgccctacctgaccagcatcaccgccctggtggtgtggctgcccgccaaccccaccgagaagatcgtgagagtgctgttccccggcaacgccccccagaacaagatcctggagggcctggagaagctgagacacctggacttcctgagataccccgtggccacccagaaggacctggccagcggcgccgtgcccaccaacctgaagcccagcaagatcaagcagagagccgacagcaaggagagcctgaaggccaccaccaagaccgccgtgagcaagctggccaagagagaggaggtggtggaggagggcgccaaggaggccagaagcgagctggccaaggagctggccaagaccgagaagaaggccaaggagagcagcgagaagccccccgagaagcccgccaagcccgagagagtgaagaccgagagcagcgaggccctgaaggccgagaagagaaagctgatcaaggacaaggtgggcaagaagcacctgaaggagaagatcagcaagctggaggagaagaaggacaaggagaagaaggagatcaagaaggagagaaaggagctgaagaaggacgagggcagaaaggaggagaagaaggacgccaagaaggaggagaagagaaaggacaccaagcccgagctgaagaagatcagcaagcccgacctgaagcccttcacccccgaggtgagaaagaccctgtacaaggccaaggtgcccggcagagtgaagatcgacagaagcagagccatcagaggcgagaaggagctgagcagcgagccccagaccccccccgcccagaagggcaccgtgcccctgcccaccatcagcggccacagagagctggtgctgagcagccccgaggacctgacccaggacttcgaggagatgaagagagaggagagagccctgctggccgagcagagagacaccggcctgggcgacaagcccttccccctggacaccgccgaggagggcccccccagcaccgccatccagggcaccccccccagcgtgcccggcctgggccaggaggagcacgtgatgaaggagaaggagctggtgcccgaggtgcccgaggagcagggcagcaaggacagaggcctggacagcggcgccgagaccgaggagaagaagaagaagaagaagaagaagaagtag

SEQ ID NO: 127788 - protein, 1827 aa, Artificial Sequence
  derived and/or modified sequence
MADERKDEAKAPHWTSAPLTEASAHSHPPEIKDQGGAGEGLVRSANGFPYREDEEGAFGEHGSQGTYSNTKENGINGELTSADRETAEEVSARIVQVVTAEAVAVLKGEQEKEAQHKDQTAALPLAAEETANLPPSPPPSPASEQTVTVEEDLLTASKMEFHDQQELTPSTAEPSDQKEKESEKQSKPGEDLKHAALVSQPETTKTYPDKKDMQGTEEEKAPLALFGHTLVASLEDMKQKTEPSLVVPGIDLPKEPPTPKEQKDWFIEMPTEAKKDEWGLVAPISPGPLTPMREKDVFDDIPKWEGKQFDSPMPSPFQGGSFTLPLDVMKNEIVTETSPFAPAFLQPDDKKSLQQTSGPATAKDSFKIEEPHEAKPDKMAEAPPSEAMTLPKDAHIPVVEEHVMGKVLEEEKEAINQETVQQRDTFTPSGQEPILTEKETELKLEEKTTISDKEAVPKESKPPKPADEEIGIIQTSTEHTFSEQKDQEPTTDMLKQDSFPVSLEQAVTDSAMTSKTLEKAMTEPSALIEKSSIQELFEMRVDDKDKIEGVGAATSAELDMPFYEDKSGMSKYFETSALKEEATKSIEPGSDYYELSDTRESVHESIDTMSPMHKNGDKEFQTGKESQPSPPAQEAGYSTLAQSYPSDLPEEPSSPQERMFTIDPKVYGEKRDLHSKNKDDLTLSRSLGLGGRSAIEQRSMSINLPMSCLDSIALGFNFGRGHDLSPLASDILTNTSGSMDEGDDYLPATTPALEKAPCFPVESKEEEQIEKVKATGEESTQAEISCESPFLAKDFYKNGTVMAPDLPEMLDLAGTRSRLASVSADAEVARRKSVPSETVVEDSRTGLPPVTDENHVIVKTDSQLEDLGYCVFNKYTVPLPSPVQDSENLSGESGTFYEGTDDKVRRDLATDLSLIEVKLAAAGRVKDEFSVDKEASAHISGDKSGLSKEFDQEKKANDRLDTVLEKSEEHADSKEHAKKTEEAGDEIETFGLGVTYEQALAKDLSIPTDASSEKAEKGLSSVPEIAEVEPSKKVEQGLDFAVQGQLDVKISDFGQMASGLNIDDRRATELKLEATQDMTPSSKAPQEADAFMGVESGHMKEGTKVSETEVKEKVAKPDLVHQEAVDKEESYESSGEHESLTMESLKADEGKKETSPESSLIQDEIAVKLSVEIPCPPAVSEADLATDERADVQMEFIQGPKEESKETPDISITPSDVAEPLHETIVSEPAEIQSEEEEIEAQGEYDKLLFRSDTLQITDLGVSGAREEFVETCPSEHKGVIESVVTIEDDFITVVQTTTDEGESGSHSVRFAALEQPEVERRPSPHDEEEFEVEEAAEAQAEPKDGSPEAPASPEREEVALSEYKTETYDDYKDETTIDDSIMDADSLWVDTQDDDRSIMTEQLETIPKEEKAEKEARRSSLEKHRKEKPFKTGRGRISTPERKVAKKEPSTVSRDEVRRKKAVYKKAELAKKTEVQAHSPSRKFILKPAIKYTRPTHLSCVKRKTTAAGGESALAPSVFKQAKDKVSDGVTKSPEKRSSLPRPSSILPPRRGVSGDRDENSFSLNSSISSSARRTTRSEPIRRAGKSGTSTPTTPGSTAITPGTPPSYSSRTPGTPGTPSYPRTPHTPGTPKSAILVPSEKKVAIIRTPPKSPATPKQLRLINQPLPDLKNVKSKIGSTDNIKYQPKGGQVQIVTKKIDLSHVTSKCGSLKNIRHRPGGGRVKIESVKLDFKEKAQAKVGSLDNAHHVPGGGNVKIDSQKLNFREHAKARVDHGAEIITQSPGRSSVASPRRLSNVSSSGSINLLESPQLATLAEDVTAALAKQGL

SEQ ID NO: 127789 - DNA, 5484 bp, Artificial Sequence
  derived and/or modified sequence
atggcggacgaacgcaaggatgaggcaaaagccccccattggacctccgcccccctcactgaggcctctgcccactctcacccacccgagattaaggatcagggcggagctggggaagggctcgtgcgtagcgccaacggcttcccctatagggaggatgaagaaggggccttcggtgagcatggttcccaggggacatattctaatacaaaggaaaacggcattaacggggaacttacctctgccgaccgcgaaaccgcagaagaggtctcagcccgcattgtgcaagtcgtcacggcagaagccgtggccgtgttgaagggggaacaagagaaggaagcccagcataaagatcagactgccgcgctgcctctggcagccgaggagaccgcaaatctgcctccgagcccccccccatctcctgccagcgagcagacagttaccgttgaggaagacttgctcaccgccagtaagatggagttccacgaccagcaggagctgaccccctccacagctgaaccaagtgatcagaaagaaaaggagtctgagaagcagtccaagccaggcgaggatctgaagcacgctgcgttggtgagccagccagaaacaactaaaacctaccctgacaaaaaagatatgcagggtaccgaagaagaaaaggctcctttggcactctttggccacacgctcgtagcctctctggaggacatgaaacagaagacagagccatctctggtggtacctggtatagaccttcccaaagaacctcccacgcccaaggaacagaaggattggtttatcgagatgcctacagaagcaaagaaggacgaatggggtcttgtagctcctatttcgcctggtccattaacccccatgagagaaaaggatgtgttcgatgatattccaaagtgggaaggaaagcagttcgattcacccatgccttctccatttcagggcgggtcctttacccttcctctcgatgttatgaaaaatgagattgtgaccgaaacttctcccttcgcacctgcattcttacagccagacgacaagaaatcactccagcagaccagcgggcctgcgacggcaaaggacagctttaaaattgaagaaccccatgaggctaagccggacaaaatggccgaggccccgcctagtgaagcaatgaccctgccaaaggacgcgcatataccagtggtcgaggagcatgtcatgggcaaggttctggaagaggaaaaagaagcaatcaatcaagagactgtacagcagcgggacactttcactccttctgggcaggaacccatcttgactgagaaggagaccgaactgaaactggaggagaagacgacaatttccgataaagaggccgttccaaaagaatctaagcccccaaaacccgccgacgaagagatcgggatcattcaaacctcgacagaacacaccttttccgaacagaaagaccaggaaccaaccactgacatgttaaagcaggatagctttccagtgtcactcgagcaggctgtcacagattccgccatgacatctaagacgttagagaaagccatgaccgagccttcggccctgattgaaaaatcttcaatccaggagctcttcgaaatgagggtcgatgataaagacaaaattgaaggtgtcggagccgctactagcgcggaactcgacatgcccttttatgaggataagtccggcatgagcaagtacttcgagacatctgctttgaaggaggaggcaacaaaatccatcgaaccgggtagcgactactatgagctctcggatacaagggagtctgtacacgagtcgatcgatacaatgagccctatgcacaaaaacggagataaggaattccagaccggaaaggagagtcagccctcaccacctgcacaagaggctggctactctacacttgcacagagctacccttcagatctaccagaagaaccaagctctccccaggagcgtatgttcaccattgaccccaaggtctacggcgagaagcgtgacctccattccaagaacaaggacgacctaacgttatctaggtccctgggattgggcgggcgtagcgctattgagcaacgctcgatgagcataaatctcccgatgagctgcctcgactcgatcgccctgggcttcaacttcggccgcggacacgatctctcacctcttgcaagcgatatcctgacaaacacctctgggagtatggatgaaggagacgactatctgccagccacaacaccagcactggagaaggctccatgtttcccggtggaatctaaggaagaggagcagatagagaaggttaaggctaccggcgaagagagtacgcaagccgagatttcctgcgagtcccccttcttggcaaaagacttctataagaatggcaccgtgatggctcccgatctcccagagatgctagacctagcgggcactcggtccagattagcctcagtctccgctgatgcagaggtggcccggaggaaatcagttccgtctgaaaccgtggttgaggattctcggaccggtctgccacccgtgacagatgagaaccatgtcattgtcaaaactgactcacaactagaagatctggggtactgtgttttcaacaagtacaccgtccccctcccaagcccagtacaggattctgagaatctgagtggtgagagcggaacattttatgagggcacagacgacaaggtgcggagggatctcgccaccgacctttctcttatcgaggtgaagcttgcagccgccggtcgagttaaagatgaattttcagtagacaaagaggcatccgcccacattagcggagacaaatcaggcctgagtaaagaatttgatcaggaaaagaaggcaaacgacaggttggacaccgtcttggagaagtctgaagaacacgccgactcaaaagagcatgctaaaaagacggaagaggctggagacgaaatcgaaacgttcgggcttggggtgacctacgaacaggcccttgccaaggatctgagcatcccaactgatgcaagctcagagaaggcagagaagggtctcagttccgttcccgaaattgccgaagtcgagccttctaaaaaggtggagcagggattagatttcgccgtgcagggccagctagatgtgaagatcagcgattttgggcagatggctagtggtctcaatatagatgacagaagagctaccgagctgaagttagaggctacccaggacatgaccccgtcaagcaaggctccacaggaggctgatgcctttatgggcgtggaatctggacatatgaaggagggcacgaaagtctccgaaactgaggtaaaagagaaggtggcaaagccagatttggtccatcaggaagccgtggataaggaggaatcctacgaatctagtggagagcacgagagtctgacaatggagtcacttaaggcagacgagggtaagaaggagacgtctcccgaaagttccttgattcaagatgagatagccgtgaagctttcagtcgagattccctgtccaccagccgtctctgaggccgatctggccacggacgaaagggcagatgtacagatggagttcattcagggccctaaggaggagagtaaggagacacctgatatttctattacccccagtgacgtagcagaaccgctacacgagacaatcgtgagcgagcccgctgagatccagagcgaagaagaggagatcgaggcacaaggcgagtatgacaagctgctgttcaggtctgatacacttcagatcaccgatctgggcgttagcggcgctagggaagagttcgtggaaacgtgtccttccgaacacaagggggtgattgagtctgttgtcacgatcgaagacgatttcatcaccgtggtgcaaacaaccacagatgagggagaaagtggatcacattcagttaggttcgccgccctcgaacagcccgaagtcgaaagaaggcccagtccacatgacgaggaagaattcgaagtagaggaggctgccgaggctcaggccgaacccaaggatggttcacctgaagcaccagcttcccccgagagagaggaagtcgcactaagtgagtacaagaccgagacgtacgatgattacaaagatgagacaaccatcgatgacagcattatggacgccgactccctctgggtggacacacaggatgacgatagatccatcatgaccgagcaactcgaaactattcctaaagaagagaaagcggaaaaggaagctagaagatcgagtctagagaagcataggaaggagaagccttttaaaacaggaagagggcggatcagcactcctgagcgtaaggttgctaaaaaggaacccagcaccgtgtcaagagacgaagtgcgccgcaaaaaagccgtttataagaaagccgaactcgccaaaaaaacagaagtgcaggctcacagcccatctaggaaattcatattgaaacctgcaattaagtacaccaggcctacacatctcagctgcgtgaagaggaaaacaactgcagcgggcggtgagtccgccttagctcccagcgttttcaaacaggctaaggacaaggtgagcgacggggtaaccaagtcaccggagaagcgcagctccctgccacgccccagttccattctgccacccaggaggggagtttcaggcgatcgggacgaaaattctttttccctgaactccagtattagttccagtgcaagacggaccacccggtctgagcctatccgcagagcaggcaagtctggaacctctactcctaccactcctggatccacggccataacccccggcactcctccttcatattctagccgaacacccgggacgcctgggacaccttcataccccagaaccccccatacccctgggacccctaagtctgccatactagtgcctagtgagaaaaaggtggctatcattcgcacacctcctaagagtcctgccacccccaagcaactccgcctgatcaaccagccactgcctgaccttaaaaatgttaagagtaagatcgggtccacagataatattaagtaccagcctaaggggggccaagtgcagatcgtgactaaaaagatagatttgtcacatgtgacttcaaagtgcggtagcctgaaaaacatccgccatagacccggaggtgggcgcgtaaagatcgagtctgtgaagctcgatttcaaagaaaaggcccaggccaaggtgggcagcctcgacaatgcccatcacgtgcccggcggcggaaatgtcaagattgatagccagaaactcaactttcgtgaacacgcaaaggcccgcgttgaccatggtgccgagatcatcacccagtccccgggtaggtcctccgtggcttcaccccgtcgcctgagtaacgtctctagttcaggctccatcaatctcctcgaatccccacagctcgctaccctagctgaagatgtcacagctgctttggctaagcaggggctttag

SEQ ID NO: 127790 - DNA, 5484 bp, Artificial Sequence
  derived and/or modified sequence
atggctgatgagaggaaggatgaggccaaggccccccactggaccagcgcccccctgacagaggccagcgcccacagccaccccccagagatcaaggaccagggcggggccggggagggcctggtgcgcagcgccaacggcttcccctaccgggaggatgaggagggcgccttcggggagcacggcagccagggcacctacagcaacaccaaggaaaatggcatcaacggggagctgaccagcgctgaccgggagacagctgaggaggtgtctgcccgcatcgtgcaggtggtgacagctgaggccgtggccgtgctgaagggggagcaggagaaggaggcccagcacaaggaccagacagctgccctgcccctggccgctgaggagacagccaacctgccccccagccccccacccagccctgccagcgagcagacagtgacagtggaggaggacctgctgacagccagcaagatggagttccatgaccagcaggagctgacccccagcacagctgagcccagcgaccagaaggagaaggagagcgagaagcagagcaagccaggagaggacctgaagcatgctgccctggtgtcccagcctgagaccaccaagacctacccagacaagaaggacatgcagggcacagaggaggagaaggcccccctggccctgtttggccacaccctggtggccagcctggaggacatgaagcagaagacagagcccagcctggtggtgcccggcatcgacctgcccaaggagccccccacccccaaggagcagaaggactggttcatcgagatgcccacagaggccaagaaggatgagtggggcctggtggcccccatcagccctggccccctgacccccatgagggagaaggatgtgtttgatgacatccccaagtgggagggcaagcagtttgacagccccatgcccagccccttccagggcggcagcttcaccctgcccctggatgtgatgaagaatgaaattgtgacagagaccagcccctttgccccagccttcctgcagccagatgacaagaagagcctgcagcagaccagcggccctgccacagccaaggacagcttcaagattgaggagccccatgaggccaagccagacaagatggccgaggcccctccttctgaggccatgaccctgcccaaggatgcccacatccctgtggtggaggagcacgtgatgggcaaggtgctggaggaggagaaggaggccatcaaccaggagaccgtgcagcagagggacaccttcaccccatctggccaggagcccatcctgacagagaaggagacagagctgaagctggaggagaagaccaccatcagtgacaaggaggccgtgcccaaggagagcaagccacccaagccagcagatgaggagatcggcatcatccagaccagcacagagcacaccttcagcgagcagaaggaccaggagcccaccacagacatgctgaagcaggacagcttccctgtgtccctggagcaggccgtgacagacagcgccatgaccagcaagaccctggagaaggccatgacagagcccagcgccctgattgagaagagcagcatccaggagctgtttgagatgagggtggatgacaaggacaagattgaaggagtgggcgccgccaccagcgctgagctggacatgcccttctatgaggacaagagcggcatgagcaagtactttgagaccagcgccctgaaggaggaggccaccaagagcattgagcccggcagtgactactatgagctgagtgacacccgggagagcgtgcatgagagcattgacaccatgagccccatgcacaagaatggagacaaggagttccagacaggcaaggagagccagcccagccccccagcccaggaggccggctacagcaccctggcccagagctaccccagcgacctgcctgaggagcccagcagcccccaggagaggatgttcaccatcgaccccaaggtgtatggagagaagagggacctgcacagcaagaacaaggatgacctgaccctgagccgcagcctgggcctgggcggccgcagcgccatcgagcagaggtccatgagcatcaacctgcccatgagctgcctggacagcatcgccctgggcttcaactttggccggggccatgacctgagccccctggccagtgacatcctgaccaacaccagcggctccatggatgaaggagatgactacctgcctgccaccaccccagccctggagaaggccccctgcttccctgtggagagcaaggaggaggagcagatcgagaaggtgaaggccactggagaggagagcacccaggccgagatcagctgtgagagccccttcctggccaaggacttctacaagaatggcaccgtgatggccccagacctgcctgagatgctggacctggccggcaccaggagccggctggcctctgtgtctgcagatgctgaggtggcccggaggaagtctgtgcccagcgagaccgtggtggaggacagcaggacaggcctgccccctgtgacagatgaaaatcatgtgattgtgaagacagacagccagctggaggacctgggctactgtgtgttcaacaagtacacagtgcccctgcccagccctgtgcaggacagcgagaacctgagcggggagagcggcaccttctatgagggcacagatgacaaggtgagaagagacctggccacagacctgagcctgattgaggtgaagctggccgccgccggccgggtgaaggatgagttctctgtggacaaggaggccagcgcccacatcagcggggacaagagcggcctgagcaaggagtttgaccaggagaagaaggccaatgaccggctggacacagtgctggagaagtctgaggagcacgccgacagcaaggagcacgccaagaagacagaggaggccggagatgaaattgagaccttcggcctgggcgtgacctatgagcaggccctggccaaggacctgagcatccccacagatgccagcagcgagaaggccgagaagggcctgagctctgtgcctgagattgctgaggtggagcccagcaagaaggtggagcagggcctggactttgctgtgcagggccagctggatgtgaagatcagtgactttggccagatggccagcggcctgaacattgatgacagaagagccacagagctgaagctggaggccacccaggacatgacccccagcagcaaggccccccaggaggctgatgccttcatgggcgtggagagcggccacatgaaggagggcaccaaggtgtctgaaacagaggtgaaggagaaggtggccaagccagacctggtgcaccaggaggccgtggacaaggaggagagctatgagagcagcggggagcacgagagcctgaccatggagagcctgaaggcagatgagggcaagaaggagaccagccctgagagcagcctcatccaggatgaaattgctgtgaagctgtctgtggagatcccctgccccccagctgtgtctgaggccgacctggccacagatgagcgggcagatgtgcagatggagttcatccagggccccaaggaggagagcaaggagaccccagacatcagcatcacccccagtgatgtggccgagcccctgcacgagaccatcgtgtctgagcctgctgagatccagagcgaggaggaggagattgaggcccagggcgagtatgacaagctgctcttcagaagtgacaccctgcagatcacagacctgggcgtgtctggggcccgggaggagtttgtggagacctgccccagcgagcacaagggcgtgattgaatctgtggtgaccattgaagatgacttcatcaccgtggtgcagaccaccacagatgaaggagagagcggcagccacagcgtgcgctttgctgccctggagcagcctgaggtggagcggcggcccagcccccatgatgaggaggagtttgaggtggaggaggccgctgaggcccaggccgagcccaaggatggcagccctgaggccccagccagccctgagcgggaggaggtggccctgtctgagtacaagacagagacctatgatgactacaaggatgagaccaccattgatgacagcatcatggatgctgacagcctgtgggtggacacccaggatgatgacaggagcatcatgacagagcagctggagaccatccccaaggaggagaaggccgagaaggaggcccggcgcagcagcctggagaagcacaggaaggagaagcccttcaagacaggccggggccgcatcagcaccccagagaggaaggtggccaagaaggagcccagcacagtgtccagagatgaggtgcggaggaagaaggctgtgtacaagaaggccgagctggccaagaagacagaggtgcaggcccacagccccagcaggaagttcatcctgaagccagccatcaagtacacccggcccacccacctgagctgtgtgaagaggaagaccacagctgctggaggagagagcgccctggcccccagcgtcttcaagcaggccaaggacaaggtgtctgatggagtgaccaagagccctgagaagaggagcagcctgccccggcccagcagcatcctgcccccaagaagaggagtgtctggggacagagatgagaacagcttcagcctgaacagcagcatcagcagcagcgcccggaggaccaccaggtctgagcccatcagaagagctgggaagagcggcaccagcacccccaccaccccaggcagcacagccatcaccccaggcaccccacccagctacagcagcaggaccccaggcaccccaggcacccccagctaccccaggaccccccacaccccaggcacccccaagagcgccatcctggtgcccagcgagaagaaggtggccatcatccgcaccccacccaagagccctgccacccccaagcagctgcggctcatcaaccagcccctgcctgacctgaagaatgtgaagagcaagattggcagcacagacaacatcaagtaccagcccaagggcggccaggtgcagatcgtgaccaagaagattgacctgagccacgtgaccagcaaatgtggcagcctgaagaacatccgccacaggcctgggggcggccgggtgaagattgaatctgtgaagctggacttcaaggagaaggcccaggccaaggtgggcagcctggacaatgcccaccacgtgcctgggggcggcaatgtgaagattgacagccagaagctgaacttccgggagcacgccaaggcccgggtggaccacggggctgagatcatcacccagagccctggccgcagctctgtggccagcccccggcggctgagcaatgtgagcagcagcggcagcatcaacctgctggagagcccccagctggccaccctggccgaggatgtgacagctgccctggccaagcagggcctgtag

SEQ ID NO: 127791 - DNA, 9711 bp, Artificial Sequence
  derived and/or modified sequence
atggcaaaccgctaaatcgtaagtgagggctgcatcctattgtcagtgaatgatggcggagctgagtggcttgtcatcattctcgaaaattctgagactagtgagctctctccctctctcccactcgccttattttcctgttcgccactgcggggacttctaatttgcagcttccctttccccggcacacacagacacgagctggtggcttgcagactgcgtctgtctggagctagagagccagagagccagcctgtggggataatgctcccggagaaggattctgcagcagttctcaaaggctagacttgagtggtattgctgcatatgcgctgattcttcagcttgtctctaaccgaggaagcattgattgggagctactcattcagaaaattaaaagaaagaagccagaaaatattatcaaccctttgagaacacgacacaacgaactttatattttaccacttccttgaatagttgcaggagaaataacaaggcattgaagaatggcagatgaacggaaagatgaagcaaaggcacctcactggacctcagcaccgctaacagaggcatctgcacactcacatccacctgagattaaggatcaaggcggagcaggggaaggacttgtccgaagcgccaatggattcccatacagggaggatgaagagggtgcctttggagagcatgggtcacagggcacctattcaaataccaaagagaatgggatcaacggagagctgacctcagctgacagagaaacagcagaggaggtgtctgcaaggatagttcaagtagtcactgctgaggctgtagcagtcctgaaaggtgaacaagagaaagaagctcaacataaagaccagactgcagctctgcctttagcagctgaagaaacagctaatctgcctccttctccacccccatcacctgcctcagaacagactgtcacagtggaggaagatttacttacagcctcgaagatggagttccacgatcaacaggaattgactccctctacagctgagccttcagaccagaaggaaaaggagtcagagaagcaaagtaagcctggtgaagaccttaaacatgctgccttagtttctcagccagagacaactaaaacttaccctgataaaaaggacatgcaaggcacggaagaagaaaaagcacccctagctttgtttgggcacactcttgttgccagcctggaagacatgaaacagaagacagaaccaagccttgtagtacctggcattgacctccctaaagagcctccaactccaaaagaacaaaaggactggttcatcgaaatgccaacggaagcaaaaaaggatgagtggggtttagttgcccccatatctcctggccctctgactcccatgagggaaaaagatgtatttgatgatatcccaaaatgggaagggaaacagtttgattctcccatgccaagtccctttcaagggggaagcttcactcttcctttagatgtcatgaagaatgaaatagttacagaaacatcgccctttgcccctgcctttttacagccagatgacaaaaaatctctgcaacaaaccagtggcccagctactgccaaagatagttttaaaattgaagagccccatgaggctaaacctgacaaaatggcagaagcaccaccctcagaggcaatgaccttacccaaagatgctcacattccagttgtagaagaacatgttatggggaaagttttagaggaagaaaaggaggccataaatcaagagactgtgcagcaaagggatactttcacccccagtggacaggaacctatacttactgaaaaggaaactgagctgaagcttgaagaaaaaaccaccatttctgacaaagaagctgtgccaaaagagagtaaacccccaaaacctgcagatgaagaaataggcataattcagacctccacagagcacactttctcagaacagaaagaccaagagcctaccacagatatgttgaaacaggactcgttccctgtaagtttggagcaagcagttacagattcagccatgacctctaaaacactggagaaagccatgaccgaaccatctgcattaattgaaaagagctcaattcaggaactttttgaaatgagagttgatgacaaagataagattgaaggagttggagctgcaacatcagctgagcttgatatgccattttatgaagataaatcaggaatgtccaagtactttgaaacatctgccttgaaagaagaagcaacaaaaagcattgagccaggcagtgattactatgaactgagtgacactagagaaagtgtccatgagtctattgataccatgtctcccatgcataaaaatggtgacaaggagtttcaaacaggaaaagaatcccagcccagtcctccagcacaagaagcagggtacagcactctcgcacagagttatccatcagatttacctgaagaacccagttctcctcaagaaagaatgttcactattgatccaaaagtgtatggagagaaaagggacctccacagtaagaataaggatgatttgacccttagcaggagtttaggacttggtggtaggtctgcaatagaacaaagaagcatgtcaatcaatttgccgatgtcttgcctagattccatagcccttggatttaactttggtcggggacatgatctttctcctctggcttccgatattctaaccaacactagtggaagtatggatgaaggggatgattaccttccagccaccacacctgcactggagaaagccccttgcttccctgtagaaagcaaagaggaagaacagatagagaaagtaaaagctactggagaagaaagtactcaagcggagatatcatgtgagtctcctttcctagccaaagatttttacaaaaatggtactgtcatggcacctgaccttcctgaaatgctagatctggcaggcacaaggtcaagattggcttctgtgagtgcagatgctgaggttgccaggaggaaatcagtcccatcagagactgtggttgaggatagtcgtactggcttgcccccggtaactgatgaaaaccatgtcattgtaaaaacggacagtcagctcgaagacctgggctactgtgtgttcaataagtacacagtcccattgccatcacctgttcaagacagtgagaatttatcaggggagagtggtaccttttacgaaggcactgatgataaagttcgaagagatttggccacagacctttcactgattgaagtgaaactggcagcagccggaagagtcaaagatgagttcagtgttgacaaagaagcatccgcgcatatctctggtgacaaatcaggactgagtaaggagtttgaccaagagaagaaagctaatgataggttggatactgtactagaaaagagtgaagaacatgctgattcaaaagaacatgccaagaaaactgaagaggctggtgatgaaatagaaacattcggattaggagtaacctatgagcaagctttggccaaagatttgtcaataccaacagatgcatcctctgagaaagcagagaagggtcttagttcagtgccagagatagctgaggtagaaccatccaaaaaggtggaacaaggtctggattttgctgtccagggtcaactagatgttaaaattagtgactttggacagatggcttcagggctaaacatagatgatagaagggcaacagagctaaaacttgaggctacacaggacatgaccccctcatccaaagcaccgcaggaggcagatgcatttatgggtgttgagtctggccacatgaaagaaggcactaaagttagtgagacagaagtcaaagagaaggtggccaagcctgacttggtgcaccaggaggctgtagacaaggaggagtcctatgaatctagtggtgagcatgaaagtctcaccatggagtccttgaaagctgatgagggcaagaaggaaacatctccagaatcatctctaattcaagatgagattgccgtcaaattgtcagtggaaataccttgcccacctgctgtttcagaggctgatttagccacagatgagagagctgatgtccagatggaatttattcaggggccaaaagaagaaagcaaagagaccccagatatatccatcacgccttctgatgttgcagagccattgcatgaaacgatcgtatctgaaccagcagagattcagagtgaggaagaagagatagaagcccagggagaatatgataaactgctcttccgctcagacacccttcagataactgacctgggtgtctcaggtgccagggaggaatttgtggagacctgcccaagtgaacacaaaggagtgattgagtctgttgtgaccatcgaggatgatttcatcactgtagtgcaaaccacaactgatgaaggggagtcagggtcccacagcgtgcgttttgcagccctagagcagcctgaggtggaaaggagaccatctcctcatgatgaagaagagtttgaagtagaagaggcagctgaagcccaggcagaacccaaagatggttccccagaggctccagcttcccctgagagagaagaggttgcactttctgaatataagacagaaacctatgacgattacaaagatgagaccaccattgacgactccatcatggacgctgacagcctctgggtggacactcaagatgatgataggagcatcatgacagaacagttagaaactattcctaaagaggagaaagctgaaaaggaagctcggagatcatctcttgagaaacatagaaaagaaaagccttttaaaaccgggagaggcagaatttccactcctgaaagaaaagtagctaaaaaggaacctagcacagtctccagagatgaagtgagaaggaaaaaagcagtttataagaaggctgaacttgctaaaaaaacagaagttcaggcccactctccctccaggaaattcattttaaaacctgctatcaaatatactagaccaactcatctctcctgtgttaagcggaaaaccacagcagcaggtggggaatcagctctggctcccagtgtatttaaacaggcaaaggacaaagtctctgacggagtaaccaagagcccagaaaagcgctcttctctcccaagaccttcctccattctccctcctcggcgaggtgtgtcaggagacagagatgagaattccttctctctcaacagttctatctcttcttcagcacggcggaccaccaggtcagagccaattcgcagagcagggaagagtggtacctcaacacccactacccctgggtctactgccatcactcctggcaccccaccaagttattcttcacgcacaccaggcactcctggaacccctagctatcccaggacccctcacacaccaggaacccccaagtctgccatcttggtgccgagtgagaagaaggtcgccatcatacgtactcctccaaaatctcctgcgactcccaagcagcttcggcttattaaccaaccactgccagacctgaagaatgtcaaatccaaaatcggatcaacagacaacatcaaataccagcctaaaggggggcaggtacaaattgttaccaagaaaatagacctaagccatgtgacatccaaatgtggctctctgaagaacatccgccacaggccaggtggcggacgtgtgaaaattgagagtgtaaaactagatttcaaagaaaaggcccaagctaaagttggttctcttgataatgctcatcatgtacctggaggtggtaatgtcaagattgacagccaaaagttgaacttcagagagcatgctaaagcccgtgtggaccatggggctgagatcattacacagtccccaggcagatccagcgtggcatcaccccgacgactcagcaatgtctcctcgtctggaagcatcaacctgctcgaatctcctcagcttgccactttggctgaggatgtcactgctgcactcgctaagcagggcttgtgaatatttctcatttagcattgaaataataatatttaggcatgagctcttggcaggagtgggctctgagcagttgttatattcattctttataaaccataaaataaataatctcatccccaaactgtagtaattgttacaattttctatttaaaaaatgaatagtacatgcagaaattgacctgatttccatttgcaacaggaagacactggctttacatgggttcaattggacaattatttttgctctgctctgttttgcatggagtattattattttaaaaattgcatttttacctttcatgtgcctgaaggctatccactacattctgaaggccttgttaaaatccaagctgctcatttcactattctgtttctgagtgagaagataaaaactgcccattgtaacttatttcaggttaaattaaaccaaggagtctgattgcaggaagggaagagcatgtaagaaataagtttttttaaagtgttattttgtataaatgggaagaaagattcaattaagttattaacatttgggacctggataattatatcagagtatgtcagtccaataaattatttaactaattaaaaaatagttgcaaagcatttgagctgtggttgaggaagtggtgtaaaagtgcatccattaggaatgatgcactttcattaggatggactcgtgtctgattagaatgtcagttgatcagctagatttgtgtccacactaccagtttcacaccccctttccatctgtttgatacagtattatagatataaatatatatatatttctctgtggccatttgtgatacttcctcatatacttgaatattatacttctttattcacagtatctgtgtctcctgcaccctttggtgttgcaattttagatatgtgaaagtagatgttagcagggttctctccctatttaaaaaaaatacattaaaaaagacaaaaaattttagcatgaagttgctttctgtaacaactcaaagccgtaaccctgttttagtgccagatacaagtctctcccgtgatgctagacaaaaaattatttttctttgctttcaccaacatggagtttgtgggggtgggtccagttatacatgaaagggtttacagattgttggtttaagattatggatttatctcatttttaatcacaggatagtttggggtttattcctattattattcatgaaaccgacttaagattttttctttatttttctttttttttccatttgctaaagttgaaagttgaaactaactataatagtttgaaacatgttttctcatttttccaaatagtatctgtttattaaattctctaatagaagatgtttgtctttcttacccaaagtaaagatcccctgatcagaaagaaaaaatacaatactttgggaagctatagctataaaacacttgagacacagatatctaaatcagtttttttccaagactccaacattgcactctgtaaagtaacacactgtgatctagtattatttatcagtagataatactgttctgactgtatatacagtctagaactcacaaatcaattagttcctctcacaaatcattcatcttagacttacaaataaggaatgaaatagtcaatggcctgattaaggcaaagagctaccaggctagatggacactttttaaaaattttatctgttctttttcttgctcagggctggtaggttggatctgaaccattaaaatcaaatggtccactaggcgtatgatctctttgagccaaatcagttcctgaatataaaggaggaaatgatgaggatgtactgaggcaacggggaagtatagaaacatccaagacaaaagccaagggatgcaaaggcagagacacaggtgctttttggtgacccagtggatatggcaaccagtgtaactgccatacaagaaaccctaggagcaaacccacaccactcattctcagctaagagattttacacaggcaaacgtgtcttaaaccatctataaatcagttattttatatgacagtcaaaaccttagaaaccttaggatcattatatctattttctgcctattaattgctgtgaggtttgatttgaccaatctgggcaatttattcatcagcttcccttgaagtgcaccagaaaatagaagaaaggtgtgtggagacttagggtattttattacatgttttcatagtcttaaatagtgattaaatttctctagaaagaagttaacagctcattagaaaagttttaacctgtgaaataagtatttttctcaacattctttaaagtttttatataagttaacactaggtaaacattctgcatactagaagtcagtttattacaaatacatgtcaaaaataaagattatacaaggcaccaaactactagatttggcattaaaacaaatgtttatttctaatcacaacaaaattataatgaataaatgttcttgctttgtatggaaatacaattctttattaaagttaacagaaaggaactgatcgtttgtaccagtaaaagagagaaacacacaggttaaatatcttcttgtggggttaaggggtagaacctatcttgccttcactctcaagataacgactcaaattaagctttttgagcaccactcttgtggggacacacatacgctgatctaggaatgaaatcttcgtggtctcaattctagatctactatgccagtttctctctggctttagcctttgagaacctgtataagaatacgtaagtaatccagagctgtgaagagtttaaaggccaacttctccagtgaactcaacctctgggtcacttgcaaccagaaattggatacctcataatgatgcaggaaagacccgagttcatgatgagtttcaaaggccacgttcatttaggaaccaactctctctggatttacctgctgagttccagcagcgtgatgggctgacatcccacctacaagtatgacacctgtgtaacaccagctaggtacggctggagaaggctgaagagagaatgccattaaatggaagaatgtactgattgtagtgaccttctccacacacacacacacacacacacacacacacacctacagtaatacagcaagcgtggaataatcagccaatatataacattccatcagtattttattaaggaaataacctgaatgtggttgattttgacatagctgcaattacagttttcttctatttttcaagccacaataaggaaaataaactactcatggtctaaatactagagataaagtagattcatggcttggtaaggaaattttaagcattccttcaaagattgacgtgctaaaataagcattgatgttttgagtttttttacacctaggatttttagcttgggtgtgtaggtgaaggccaagactctctgcaggaaaaagcttattttcaaactcagaaaataaaatgtcaatcataaaaatctacttcaactttagcaaaaagaaaaaaaaatcaacaaaaagtatactctgtatgctgggattccgaggttccaacacactgttacaaatctgtggggggtttctttcttctgataattctagagcctgttaccatagaaaggcatttcttcaatggctggttgtagttagttcatgtttttcaatcaaatttgcaaatgtatttgttgctgtatagtgattgttttgcaaaataaaattgcttgtcacctaactgcta

SEQ ID NO: 127792 - DNA, 5484 bp, Artificial Sequence
  derived and/or modified sequence
atggccgacgagcggaaggacgaggccaaggccccccactggacctccgctcctttaaccgaggcttctgctcatagccatcctcccgaaattaaggaccagggaggtgctggtgaggggctggtcagaagtgcaaacggcttcccctatagggaagacgaggagggtgcatttggggaacatggctcccagggcacctattccaacactaaagagaatgggatcaatggtgagctgacaagcgcagatcgagaaaccgcagaagaggtctccgctcgcattgttcaggttgtgacagcggaagcagtggctgtactcaagggggaacaggaaaaagaagcacagcataaggaccaaaccgctgccttaccgctggcagcagaggagactgcgaacctgcccccaagcccacccccctcccccgctagcgaacagacggtgaccgttgaggaagatctgctcacggccagcaagatggaattccatgaccagcaagaacttaccccaagcacagcagaacccagcgatcaaaaggaaaaagagtcggagaaacagtccaagcccggagaagacctgaaacatgctgctttggtctcgcaaccagagacaaccaagacatatccggataaaaaggacatgcaggggactgaggaggaaaaggcccctctggccttattcgggcacaccctggtggcctccttggaggatatgaagcagaaaactgaaccgtccttggtggtgccaggaatcgatctccccaaggaaccccctactcctaaagaacagaaagactggttcatagaaatgcctacagaggctaaaaaggacgagtggggcctcgtggcccccatctctcctgggccgttaacccccatgcgggagaaagacgtgtttgatgatatccctaagtgggagggtaagcaatttgactccccgatgccatctccttttcaaggggggagctttaccctacccctggatgtcatgaagaatgaaatcgttacagaaacttctccctttgctccggcgtttctacaaccagacgataaaaaatctctacagcagacttcaggcccagcaacggctaaggactcctttaagatagaagagccccatgaggccaagccggacaaaatggcggaggcgccaccatctgaggctatgaccctccctaaagacgcacacattcccgtcgtggaggagcacgtgatgggtaaggtgctcgaagaagagaaagaggcgatcaaccaggagaccgtgcagcagagagatacctttactccaagcggacaagaacccattctcaccgagaaagaaaccgaattgaaacttgaagaaaaaaccaccatcagcgataaggaggcagtacccaaagaaagcaagcctcctaagcctgcggatgaggagattggcattattcagacttcaactgagcacacgttctccgagcagaaagatcaagagccaactaccgacatgcttaaacaagatagctttcccgtctctttggaacaggcggtgacagattcagccatgacaagcaagacgctcgagaaggctatgaccgagccatcagctctcattgagaagagttcgatacaagagctgttcgagatgagggtggacgacaaggataagattgaaggggtgggggcagctaccagcgcggagctggatatgcccttctatgaggataaatccggaatgtcaaaatatttcgagacctccgctttgaaagaggaagcgaccaagtcaatcgaaccagggtccgattattacgagctttctgatactcgcgagagtgtccatgaatcaatagacacaatgtcacccatgcacaaaaatggggacaaggagtttcagaccggcaaggaatcgcagccatcaccccctgcacaggaggccgggtattctaccctcgcccagtcatatccttccgatctaccagaggagccgtcttccccccaggagcgcatgttcaccattgaccccaaagtgtacggcgaaaaacgtgatcttcattccaagaacaaagatgacctgactctctcacggtcccttgggctcggagggagatctgccattgagcagagatccatgagcatcaacctgcccatgtcatgtttggactccatcgcgctgggcttcaactttggacgtggacacgatttgtctccgttagcctcggacatcctcactaacaccagcggtagcatggacgagggcgatgactacctgcctgccacaaccccagccctcgagaaagcgccatgctttcctgtggagtccaaagaggaagagcagatcgagaaagtcaaagctacgggagaggagtccactcaagcagaaataagctgcgagtccccttttctggccaaggatttctacaagaacggcacagtcatggcccccgacctgccagagatgctagatttggctggcacacggagtaggcttgcttcagtttccgccgacgcagaggtggcaagacggaagtctgtcccatctgagacagttgtggaagattctagaacaggtctgcccccagtgaccgatgagaatcacgtcattgtgaaaaccgatagccagttagaggacttaggctattgtgtatttaacaaatatacggtccctctgcctagtcccgtccaggattccgaaaacctgagcggcgagtccggaacattctatgaaggcaccgacgataaggtgcggcgcgatctggccacagatctgagtcttattgaagtaaaactagccgctgccggccgggtaaaggatgaattcagcgtggataaagaggcatccgcacacatcagtggcgacaaaagcggactctctaaggagttcgatcaagaaaagaaggccaacgatcgactggataccgttttagaaaagagcgaggagcatgctgacagtaaggaacatgcaaagaaaacggaagaagccggtgatgaaattgaaacttttggcctgggtgtgacctatgaacaggccctcgctaaggatctgtccatccctactgacgccagcagcgagaaggcagagaaggggctgagcagcgtacccgaaattgccgaggttgagccttcaaagaaggtagagcagggtctggattttgccgtgcagggacagctggatgtcaaaatttcagacttcggccagatggccagcggcctgaatatcgacgaccggcgggcgactgagttgaagctggaggctacacaggatatgaccccatcgagtaaggcacctcaagaagctgacgctttcatgggcgtcgagtcaggacacatgaaagagggtacgaaggtgagcgagaccgaagtaaaagagaaagtcgcgaaacccgacttggtacaccaggaagctgtggataaagaagagagctatgagtcttctggtgaacatgagagtcttacaatggagtcactgaaggccgacgaaggtaagaaggagacatctcctgaatctagcttaattcaggatgaaatcgccgtgaagctatcagtcgaaatcccttgtccccctgccgtgagcgaagccgacctggctacggacgagcgagccgacgttcagatggagttcatacaggggccgaaagaggagtcaaaagaaaccccagacatcagtattactccaagcgacgtggccgagcccctgcacgaaacaatagtgagcgagcctgccgagatccagtccgaagaagaggaaatcgaggctcagggggagtacgataagttgctgttccggagcgacactctgcaaataacggatctaggggtatctggtgcaagggaagagtttgtcgaaacgtgcccaagcgagcataaaggcgtaatagaatccgtggtcacaatcgaggacgactttatcacagtggtccaaacgaccaccgacgaaggggagtctgggtcccacagtgtacggtttgccgccctggagcagccggaagtggaaaggcggccaagcccacacgatgaagaggagtttgaggtcgaagaggctgcagaagctcaggctgagccaaaggatggatccccagaggcaccagcatctccagagagggaggaagtcgcgctttccgagtacaaaaccgaaacgtacgacgattataaagacgaaacaacgatcgatgactccatcatggacgccgactcactttgggtcgacacccaggatgacgatcgctcaatcatgacggagcagctagagactatccccaaagaagaaaaagccgagaaagaggccagacgatcaagtctcgagaaacacaggaaggagaaaccattcaagactggtaggggcaggattagcacaccagagagaaaggtcgctaagaaggaaccaagtaccgtttctcgcgacgaagtcaggcggaaaaaagcggtgtacaagaaagcagagctagccaaaaagaccgaagtgcaagcccactcccctagtaggaagtttatattgaaaccagccatcaagtacacccgacctacccatctgtcatgcgtgaaacggaagacaacagccgctggaggagaatctgccttggctccttccgtgtttaagcaggcaaaggacaaggtaagcgatggagtgaccaagagccccgagaagagatccagtctcccccggccttcaagtatcctgcctccgcgccgtggtgtgtctggagatcgggacgaaaattcttttagtctgaactcttcaatcagctcctcagcccggcgtacaacaagatccgaacccattagacgtgcaggtaagtctggaaccagcacacccactacacctggctcaacggcgatcactcccggcacgccaccatcctatagctcgcgaacaccgggcaccccgggaacaccaagttatccacgcaccccacacacacccggcacacctaagtctgctatccttgttccgtctgaaaagaaagtcgccatcattagaactccacccaagtcacccgctacgccaaagcagctacggctcatcaatcaacctctgcctgatctgaagaacgtgaagagcaaaatcgggtctactgacaatatcaaatatcagcccaaaggcggacaagtgcaaattgtgacaaagaaaatcgacctgagccatgtgacttccaaatgcgggagcctcaagaatatacgccacagacctgggggcggtcgcgtgaagatcgagtccgtgaagttagactttaaagagaaagcccaggcgaaggtgggcagcctcgataacgcccaccatgttccgggaggtgggaacgtgaaaattgactcccagaaactgaactttagggagcacgcaaaggcacgcgtggatcacggcgccgagatcataacccaaagccctgggcgctccagcgtggcgagtccccgccggctttccaacgtttcatcctcggggagtatcaacctgctggagagcccacagctcgctacactggccgaggacgtgacagcagccctcgccaaacagggactgtag

SEQ ID NO: 127793 - DNA, 5483 bp, Artificial Sequence
  derived and/or modified sequence
atggcagatgagaggaaggatgaagccaaagctccccactggacatctgcaccccttactgaagccagcgcccactcccacccgcctgaaataaaagatcagggtggcgctggcgagggactggtcaggagtgccaacggtttcccgtaccgagaagatgaagagggcgcattcggagaacacgggagccagggcacttacagcaacactaaggaaaatgggataaacggcgagctgacatcagccgaccgggaaacagcagaagaggtgtcagccaggattgtgcaggttgtcaccgcagaggctgtcgctgttttgaaaggcgagcaggagaaggaggcccaacataaggatcagacagcggctctgccgctggccgctgaggaaaccgcaaacttaccaccttctccacctccctcacctgcctccgaacagactgtaacagtggaagaagacctcctaacggcctcgaagatggagtttcacgatcagcaggagctgaccccttctacagccgagcccagtgaccagaaggaaaaggaatcggagaaacagagtaagcctggagaggatctgaagcacgctgctctggtgagtcagccagagaccactaaaacctatcctgataaaaaagacatgcagggaacggaagaggagaaagccccactggcgctgttcgggcatactttagtcgcctcgctggaggatatgaagcagaaaacagaaccctcattagttgtcccagggattgacttaccaaaagagccccctactcccaaggaacaaaaagattggtttatcgaaatgcccactgaggctaagaaagatgagtggggactggttgccccaatttctccaggtccactgacacccatgagggagaaggatgtcttcgacgatatccctaaatgggagggtaagcagtttgactctcctatgcctagccctttccaaggaggatccttcactctgccgctagatgttatgaagaacgaaatagttacagagacctctccattcgcacccgcatttctgcaacccgacgacaagaagtcgcttcagcaaaccagtggaccggctaccgcaaaggattctttcaagatagaagaacctcatgaggctaaaccagataagatggctgaagctcccccttcagaggccatgactctgccgaaagacgcccatataccggtcgtcgaagaacacgtgatggggaaagtcctggaagaagagaaggaggcaatcaaccaggaaacagtccagcagcgagacacattcacaccaagcggccaggaacctatcctgacggagaaggagaccgagctgaagttggaggagaagacaactatcagtgataaggaagctgtgccaaaagaatcaaagccccctaagccggctgacgaggaaattgggatcatacagacatcaacagagcatacgtttagtgaacagaaagaccaagagcccactacagatatgctgaaacaggatagctttccggtgagtctcgaacaggctgttactgactctgccatgaccagtaaaactctagagaaggccatgacagaaccaagtgccctaatagagaagagttctatacaggaacttttcgagatgagagtagacgacaaagataaaatagagggtgtgggggctgccacaagcgccgagcttgacatgcccttctatgaggacaagagtggaatgtccaagtatttcgaaacctcagccctgaaggaggaggcgaccaagtccatcgagccaggaagcgactactatgagctctctgacactcgtgaatccgtgcacgagtctatagacactatgagccctatgcacaaaaacggtgacaaggaattccaaactggcaaagagagtcaaccctccccacccgctcaggaagctggttattctactcttgcgcaaagctatccaagtgatttaccggaggaaccttcctctccacaggaacggatgttcactatcgaccccaaagtgtacggagagaagcgagacctgcactccaagaacaaggacgatctgactctatctaggtccttgggtttgggcggtcgcagtgcgatagagcagcggtccatgagcatcaacctgccaatgagctgcctggatagcatcgcactcggatttaacttcggccgaggccacgacttgtcacctttggccagcgatatcctaaccaatacatcgggctctatggatgaaggtgatgattaccttccggctaccactcccgcactcgagaaggccccatgcttccccgttgagagcaaggaagaagagcagattgagaaagtgaaggccaccggtgaagaaagtacacaggccgagataagctgtgaatctccatttttggccaaggacttttacaagaatggaaccgtcatggcaccagacctgccggagatgctcgaccttgcagggacgaggagccggttggcctctgtgtccgcagatgccgaagttgcgaggaggaaaagtgtcccgtccgaaacagtggttgaagattctcggacagggctcccccctgtaaccgacgagaaccacgtgattgttaaaacagacagtcagctcgaagatttgggatattgtgtttttaacaagtacaccgtcccgttgccatcccccgtccaggactcagaaaacttatcaggcgaatcagggaccttttacgaagggaccgacgacaaagtaagacgcgatctggctacagatctcagtctgatcgaggtgaaattggccgctgccggaagagtgaaggacgagttttccgttgataaggaagcatcagcccacatctcaggggacaagtctggactatctaaggaatttgatcaagaaaagaaagctaatgatcggctggacacagtgctcgagaaatccgaggagcacgccgattctaaagagcacgctaaaaaaaccgaggaggcgggagatgaaatcgagaccttcggcctgggcgtgacgtatgaacaggccttggccaaggatctcagcatcccgaccgacgcttctagtgagaaggccgaaaaggggctgagttctgtacctgaaatcgctgaggtcgaaccatctaagaaagttgaacagggactggatttcgctgtccagggccaactggatgtaaaaatcagcgactttggccaaatggctagcgggctgaatatcgacgatagacgcgctaccgagttaaaactcgaggcaacacaagacatgacacccagctcaaaagctccgcaggaggccgatgcatttatgggcgttgagtccggccatatgaaagaggggaccaaagtctctgagactgaggtcaaagagaaagtggccaaacccgacctcgtccatcaggaggccgttgacaaagaagaaagctatgaaagctctggtgaacacgaatcccttacaatggaaagtttaaaggccgatgagggcaaaaaagagacttcccccgagagttctctgatacaggatgagatagctgtcaaattgtctgtggagattccatgtcctcccgcagtctcagaggccgacctggccaccgatgagagggcagatgtgcagatggaatttattcagggccctaaagaagaatcgaaggaaacacctgacatctccataacgccctccgatgtcgccgaaccattacatgagactatcgtgtctgaaccggcagagatccaaagtgaagaagaagaaattgaggctcagggagaatatgataagctcttatttagatctgacacgctccagataacggacctcggcgttagcggagctcgagaggagttcgtagagacctgtcctagtgagcataaaggggtcatcgagtctgtggtgaccatcgaagacgactttattaccgttgttcaaactaccactgacgagggtgaatcggggagccactccgtgcgctttgccgctctcgagcagccagaagtggaaagacgccctagcccacacgatgaagaggaattcgaagtcgaggaggcagccgaggcccaggccgagccaaaggatggctctccagaagcccctgcttcccccgagagggaagaggtggccttatcagagtataagaccgagacctacgacgactacaaagatgagaccaccattgacgactccataatggacgcagactcgctgtgggtggatacacaggacgacgaccgaagcattatgaccgagcagctcgagacaattccaaaagaggagaaagccgaaaaggaggcaaggagaagctcgctggaaaagcatcgcaaagaaaagccattcaaaactggtcgcggaagaataagtactcccgagcggaaagtggcgaagaaggagccttctactgtttctcgcgacgaggtgagaaggaagaaggccgtctataaaaaagcagaactagctaagaaaacggaagtgcaggctcattcaccgtcccgaaagtttatcctcaaacctgcaattaagtacactaggcccacccatctgagctgtgtgaaacggaagactacagcagctggtggcgagtccgcactagcaccctctgtgtttaagcaggctaaggataaggtctctgacggggtcacaaagtcaccagaaaaacgtagcagcctccctcgcccatcttcaatcctgccgcctcggcgtggagtcagcggtgaccgagacgagaatagtttctccttgaacagcagtatttcctcaagtgcaagacgcacaacccgaagcgaacccatacgacgggctggcaaaagtggtacttccacgcctaccactcctgggtccaccgccatcacccccggtactcccccatcttattcgtctcgaacccctggaacccccggaacgccatcatatcctagaactccacatacccccggaacccccaagtcagccatactggttccctcagagaagaaagtggctatcatccgtacccccccaaagagtcctgcaaccccgaagcagcttaggcttattaatcagccccttcccgaccttaaaaacgttaaaagtaagattggctccactgataatataaaataccagcctaaaggagggcaagtgcagatcgttacaaaaaagatagacctgagccatgtgacttcaaagtgtggaagtttaaaaaatattcgccaccgacccggtggagggagagttaaaatagagtccgttaaacttgacttcaaagagaaggcacaggcaaaggtcggctctttggacaatgcgcaccacgttcctggaggaggtaatgtcaagatagacagccagaaactgaattttcgagaacacgctaaagccagggtggatcacggagcagagataattactcaaagccccggacgatcatctgtcgcatctcccagaaggttatccaatgtgagcagtagcggcagtatcaatctcctggagagcccccagctcgccacgttggctgaggatgtgaccgcagcattggcaaagcaggggctgta

SEQ ID NO: 127794 - DNA, 5484 bp, Artificial Sequence
  derived and/or modified sequence
atggccgacgagagaaaggacgaggccaaggccccccactggaccagcgcccccctgaccgaggccagcgcccacagccacccccccgagatcaaggaccagggcggcgccggcgagggcctggtgagaagcgccaacggcttcccctacagagaggacgaggagggcgccttcggcgagcacggcagccagggcacctacagcaacaccaaggagaacggcatcaacggcgagctgaccagcgccgacagagagaccgccgaggaggtgagcgccagaatcgtgcaggtggtgaccgccgaggccgtggccgtgctgaagggcgagcaggagaaggaggcccagcacaaggaccagaccgccgccctgcccctggccgccgaggagaccgccaacctgccccccagccccccccccagccccgccagcgagcagaccgtgaccgtggaggaggacctgctgaccgccagcaagatggagttccacgaccagcaggagctgacccccagcaccgccgagcccagcgaccagaaggagaaggagagcgagaagcagagcaagcccggcgaggacctgaagcacgccgccctggtgagccagcccgagaccaccaagacctaccccgacaagaaggacatgcagggcaccgaggaggagaaggcccccctggccctgttcggccacaccctggtggccagcctggaggacatgaagcagaagaccgagcccagcctggtggtgcccggcatcgacctgcccaaggagccccccacccccaaggagcagaaggactggttcatcgagatgcccaccgaggccaagaaggacgagtggggcctggtggcccccatcagccccggccccctgacccccatgagagagaaggacgtgttcgacgacatccccaagtgggagggcaagcagttcgacagccccatgcccagccccttccagggcggcagcttcaccctgcccctggacgtgatgaagaacgagatcgtgaccgagaccagccccttcgcccccgccttcctgcagcccgacgacaagaagagcctgcagcagaccagcggccccgccaccgccaaggacagcttcaagatcgaggagccccacgaggccaagcccgacaagatggccgaggccccccccagcgaggccatgaccctgcccaaggacgcccacatccccgtggtggaggagcacgtgatgggcaaggtgctggaggaggagaaggaggccatcaaccaggagaccgtgcagcagagagacaccttcacccccagcggccaggagcccatcctgaccgagaaggagaccgagctgaagctggaggagaagaccaccatcagcgacaaggaggccgtgcccaaggagagcaagccccccaagcccgccgacgaggagatcggcatcatccagaccagcaccgagcacaccttcagcgagcagaaggaccaggagcccaccaccgacatgctgaagcaggacagcttccccgtgagcctggagcaggccgtgaccgacagcgccatgaccagcaagaccctggagaaggccatgaccgagcccagcgccctgatcgagaagagcagcatccaggagctgttcgagatgagagtggacgacaaggacaagatcgagggcgtgggcgccgccaccagcgccgagctggacatgcccttctacgaggacaagagcggcatgagcaagtacttcgagaccagcgccctgaaggaggaggccaccaagagcatcgagcccggcagcgactactacgagctgagcgacaccagagagagcgtgcacgagagcatcgacaccatgagccccatgcacaagaacggcgacaaggagttccagaccggcaaggagagccagcccagcccccccgcccaggaggccggctacagcaccctggcccagagctaccccagcgacctgcccgaggagcccagcagcccccaggagagaatgttcaccatcgaccccaaggtgtacggcgagaagagagacctgcacagcaagaacaaggacgacctgaccctgagcagaagcctgggcctgggcggcagaagcgccatcgagcagagaagcatgagcatcaacctgcccatgagctgcctggacagcatcgccctgggcttcaacttcggcagaggccacgacctgagccccctggccagcgacatcctgaccaacaccagcggcagcatggacgagggcgacgactacctgcccgccaccacccccgccctggagaaggccccctgcttccccgtggagagcaaggaggaggagcagatcgagaaggtgaaggccaccggcgaggagagcacccaggccgagatcagctgcgagagccccttcctggccaaggacttctacaagaacggcaccgtgatggcccccgacctgcccgagatgctggacctggccggcaccagaagcagactggccagcgtgagcgccgacgccgaggtggccagaagaaagagcgtgcccagcgagaccgtggtggaggacagcagaaccggcctgccccccgtgaccgacgagaaccacgtgatcgtgaagaccgacagccagctggaggacctgggctactgcgtgttcaacaagtacaccgtgcccctgcccagccccgtgcaggacagcgagaacctgagcggcgagagcggcaccttctacgagggcaccgacgacaaggtgagaagagacctggccaccgacctgagcctgatcgaggtgaagctggccgccgccggcagagtgaaggacgagttcagcgtggacaaggaggccagcgcccacatcagcggcgacaagagcggcctgagcaaggagttcgaccaggagaagaaggccaacgacagactggacaccgtgctggagaagagcgaggagcacgccgacagcaaggagcacgccaagaagaccgaggaggccggcgacgagatcgagaccttcggcctgggcgtgacctacgagcaggccctggccaaggacctgagcatccccaccgacgccagcagcgagaaggccgagaagggcctgagcagcgtgcccgagatcgccgaggtggagcccagcaagaaggtggagcagggcctggacttcgccgtgcagggccagctggacgtgaagatcagcgacttcggccagatggccagcggcctgaacatcgacgacagaagagccaccgagctgaagctggaggccacccaggacatgacccccagcagcaaggccccccaggaggccgacgccttcatgggcgtggagagcggccacatgaaggagggcaccaaggtgagcgagaccgaggtgaaggagaaggtggccaagcccgacctggtgcaccaggaggccgtggacaaggaggagagctacgagagcagcggcgagcacgagagcctgaccatggagagcctgaaggccgacgagggcaagaaggagaccagccccgagagcagcctgatccaggacgagatcgccgtgaagctgagcgtggagatcccctgcccccccgccgtgagcgaggccgacctggccaccgacgagagagccgacgtgcagatggagttcatccagggccccaaggaggagagcaaggagacccccgacatcagcatcacccccagcgacgtggccgagcccctgcacgagaccatcgtgagcgagcccgccgagatccagagcgaggaggaggagatcgaggcccagggcgagtacgacaagctgctgttcagaagcgacaccctgcagatcaccgacctgggcgtgagcggcgccagagaggagttcgtggagacctgccccagcgagcacaagggcgtgatcgagagcgtggtgaccatcgaggacgacttcatcaccgtggtgcagaccaccaccgacgagggcgagagcggcagccacagcgtgagattcgccgccctggagcagcccgaggtggagagaagacccagcccccacgacgaggaggagttcgaggtggaggaggccgccgaggcccaggccgagcccaaggacggcagccccgaggcccccgccagccccgagagagaggaggtggccctgagcgagtacaagaccgagacctacgacgactacaaggacgagaccaccatcgacgacagcatcatggacgccgacagcctgtgggtggacacccaggacgacgacagaagcatcatgaccgagcagctggagaccatccccaaggaggagaaggccgagaaggaggccagaagaagcagcctggagaagcacagaaaggagaagcccttcaagaccggcagaggcagaatcagcacccccgagagaaaggtggccaagaaggagcccagcaccgtgagcagagacgaggtgagaagaaagaaggccgtgtacaagaaggccgagctggccaagaagaccgaggtgcaggcccacagccccagcagaaagttcatcctgaagcccgccatcaagtacaccagacccacccacctgagctgcgtgaagagaaagaccaccgccgccggcggcgagagcgccctggcccccagcgtgttcaagcaggccaaggacaaggtgagcgacggcgtgaccaagagccccgagaagagaagcagcctgcccagacccagcagcatcctgccccccagaagaggcgtgagcggcgacagagacgagaacagcttcagcctgaacagcagcatcagcagcagcgccagaagaaccaccagaagcgagcccatcagaagagccggcaagagcggcaccagcacccccaccacccccggcagcaccgccatcacccccggcaccccccccagctacagcagcagaacccccggcacccccggcacccccagctaccccagaaccccccacacccccggcacccccaagagcgccatcctggtgcccagcgagaagaaggtggccatcatcagaaccccccccaagagccccgccacccccaagcagctgagactgatcaaccagcccctgcccgacctgaagaacgtgaagagcaagatcggcagcaccgacaacatcaagtaccagcccaagggcggccaggtgcagatcgtgaccaagaagatcgacctgagccacgtgaccagcaagtgcggcagcctgaagaacatcagacacagacccggcggcggcagagtgaagatcgagagcgtgaagctggacttcaaggagaaggcccaggccaaggtgggcagcctggacaacgcccaccacgtgcccggcggcggcaacgtgaagatcgacagccagaagctgaacttcagagagcacgccaaggccagagtggaccacggcgccgagatcatcacccagagccccggcagaagcagcgtggccagccccagaagactgagcaacgtgagcagcagcggcagcatcaacctgctggagagcccccagctggccaccctggccgaggacgtgaccgccgccctggccaagcagggcctgtag

SEQ ID NO: 127795 - protein, 1152 aa, Artificial Sequence
  derived and/or modified sequence
MADLSLADALTEPSPDIEGEIKRDFIATLEAEAFDDVVGETVGKTDYIPLLDVDEKTGNSESKKKPCSETSQIEDTPSSKPTLLANGGHGVEGSDTTGSPTEFLEEKMAYQEYPNSQNWPEDTNFCFQPEQVVDPIQTDPFKMYHDDDLADLVFPSSATADTSIFAGQNDPLKDSYGMSPCNTAVVPQGWSVEALNSPHSESFVSPEAVAEPPQPTAVPLELAKEIEMASEERPPAQALEIMMGLKTTDMAPSKETEMALAKDMALATKTEVALAKDMESPTKLDVTLAKDMQPSMESDMALVKDMELPTEKEVALVKDVRWPTETDVSSAKNVVLPTETEVAPAKDVTLLKETERASPIKMDLAPSKDMGPPKENKKETERASPIKMDLAPSKDMGPPKENKIVPAKDLVLLSEIEVAQANDIISSTEISSAEKVALSSETEVALARDMTLPPETNVILTKDKALPLEAEVAPVKDMAQLPETEIAPAKDVAPSTVKEVGLLKDMSPLSETEMALGKDVTPPPETEVVLIKNVCLPPEMEVALTEDQVPALKTEAPLAKDGVLTLANNVTPAKDVPPLSETEATPVPIKDMEIAQTQKGISEDSHLESLQDVGQSAAPTFMISPETVTGTGKKCSLPAEEDSVLEKLGERKPCNSQPSELSSETSGIARPEEGRPVVSGTGNDITTPPNKELPPSPEKKTKPLATTQPAKTSTSKAKTQPTSLPKQPAPTTIGGLNKKPMSLASGLVPAAPPKRPAVASARPSILPSKDVKPKPIADAKAPEKRASPSKPASAPASRSGSKSTQTVAKTTTAAAVASTGPSSRSPSTLLPKKPTAIKTEGKPAEVKKMTAKSVPADLSRPKSTSTSSMKKTTTLSGTAPAAGVVPSRVKATPMPSRPSTTPFIDKKPTSAKPSSTTPRLSRLATNTSAPDLKNVRSKVGSTENIKHQPGGGRAKVEKKTEAAATTRKPESNAVTKTAGPIASAQKQPAGKVQIVSKKVSYSHIQSKCGSKDNIKHVPGGGNVQIQNKKVDISKVSSKCGSKANIKHKPGGGDVKIESQKLNFKEKAQAKVGSLDNVGHLPAGGAVKTEGGGSEAPLCPGPPAGEEPAISEAAPEAGAPTSASGLNGHPTLSGGGDQREAQTLDSQIQETSI

SEQ ID NO: 127796 - protein, 99 aa, Artificial Sequence
  derived and/or modified sequence
MADLSLADALTEPSPDIEGEIKRDFIATLEAEAFDDVVGETVGKTDYIPLLDVDEKTGNSESKKKPCSETSQIEDTPSSKPTLLANGGHGVEGSDTTEA

SEQ ID NO: 127797 - DNA, 3459 bp, Artificial Sequence
  derived and/or modified sequence
atggcagacctgtctctcgctgatgcccttacagaaccttcgcccgatatcgaaggcgagatcaaacgggacttcattgcaacactggaagcagaagcttttgatgacgtggtaggagagaccgttggaaagacagattacattcctctgcttgacgtggacgaaaaaacagggaatagtgaaagcaaaaagaagccgtgctcagaaacctcccagattgaagacaccccgtcttcaaagcccacgctgctggccaacgggggccatggggtcgaaggatcagatacaacaggttcacccactgagttcctggaagaaaagatggcttatcaagagtatcccaactcccagaactggcctgaagacacaaatttctgctttcagccagaacaggtggttgatcccatccagaccgacccattcaagatgtatcacgacgatgatctggccgacctggtctttccaagctcggccactgccgatacgagcatattcgcggggcagaacgatccactgaaggattcttacggcatgtccccctgcaacaccgcggtggtgcctcaagggtggtctgtggaggcactgaactcccctcatagtgaatctttcgtctcaccagaggcagtcgccgaaccgcctcagccaacagctgtaccactggagttggcgaaggaaatcgagatggcatccgaggagcgaccgccggcacaagcgctggaaattatgatgggcttgaagacaactgacatggctccttcaaaggaaaccgaaatggctctagcgaaggacatggcattagctacaaagactgaagtggcattagccaaggatatggagtcccccacaaagctagatgtcacgctggccaaggacatgcagccgtcaatggagtctgacatggctctagtcaaagatatggagctccctaccgagaaggaggtggcccttgttaaggacgtgaggtggcctaccgaaaccgacgtcagctctgccaagaacgttgtcctaccgacggaaaccgaagtggctcctgcaaaggatgtgaccctcctgaaggagactgagcgcgctagtcctattaaaatggatctggcaccttctaaagacatgggaccgcccaaggagaacaagaaggagaccgagcgggcctctcccattaagatggatttggctccatccaaagatatgggacccccaaaggagaacaagatcgtgcccgccaaggacctcgtgttgctttccgaaatcgaagttgctcaggcaaacgacataatctctagcacagagatttctagcgcagaaaaagtggccctgtcgagtgagactgaagtggccctggcgagagatatgacactgcccccagaaactaatgtgatcttgaccaaggacaaggccctcccactggaggctgaagtcgccccagttaaagacatggcgcagctgccagagacggagatcgctcccgccaaagatgttgccccctctaccgtgaaggaggtaggccttctgaaagacatgtccccactgtccgaaaccgaaatggcgctcggcaaggacgtcactcctccgcccgaaacggaggtggtactgatcaagaacgtgtgtctgcccccagagatggaagtggctctgactgaagaccaggtccccgcactgaaaacagaagcaccacttgcaaaggacggtgtgttgactttggccaacaatgtgaccccagccaaggatgtgccccccctgtcagagaccgaagctacccctgtacccattaaggatatggagatcgcgcagacccagaaaggaattagtgaagattctcacctcgaatcgttacaagatgtagggcagagtgctgccccgaccttcatgatctctcctgagactgttacgggaactggaaagaagtgtagtctgccggctgaggaagacagcgttttagagaagttgggcgagcgtaagccctgcaactcccagccatcggagctgtcatccgaaacttcagggatcgcacggcctgaggaaggacgtcctgtggtgagtggaaccggcaatgatatcactactcctccaaacaaggaactccccccttcaccagagaagaagacaaagcccctcgctacaacgcagcccgcaaagacttccacaagcaaagctaaaacgcaaccgacaagccttccaaagcagcccgcccctacgactataggaggacttaacaaaaagcccatgtctctggccagcggcctggttcccgctgcaccacccaagagaccggcagtcgcttctgccagaccatctatccttccttcgaaggatgtcaaacctaaacccatagcagatgcaaaggctcccgagaagagagcttctccgtccaagcccgccagcgcaccagcctccaggtccgggtcgaagagcacacaaaccgtcgcaaagacgactacagctgcagctgtcgcctcaacgggcccaagcagcaggtctcctagtaccctgctgcccaagaagcccacagcaataaaaactgaggggaagccagcagaggttaagaaaatgaccgccaagtccgtgcccgccgacctttcgcgtcccaagtccacctctacctcgtccatgaaaaaaaccacgactctgtcaggcacagcgcctgctgccggggtagtgccttctagagtgaaagctacccctatgccctctcgaccatctactacaccatttatagataaaaagcctacatccgctaaaccttcgtcaacgacccctaggctcagccgcttggccacaaatacttctgcaccagatctgaagaacgtccgctctaaggtgggctccaccgaaaacataaagcaccagcctggaggcggacgtgctaaggttgaaaagaagaccgaggccgcagcaacaaccaggaagccggaatcgaatgctgtgaccaagacagccggaccgatcgcctcagcccagaagcagccagccggcaaagtgcagattgtttccaagaaagtgagttattcgcatatccagagtaaatgtgggtctaaagacaacatcaagcatgtgccagggggaggtaacgtgcagattcagaacaaaaaggtggacatctcaaaggtgagcagcaagtgtggttccaaagcgaatatcaagcataagcccgggggcggcgatgtgaagatcgaatctcagaaactgaattttaaggaaaaagcccaagcaaaggtcggaagcctggataatgtcgggcatctgcccgctggtggagccgttaagaccgaaggggggggaagtgaggcacctctgtgccccggccctccagctggcgaggaaccagccatctccgaggcggctcccgaagcgggggccccaacttctgccagcggactgaacggacatccaacactgagcggaggaggcgatcaaagggaggcgcagacactggacagccagattcaggaaacatctatttag

SEQ ID NO: 127798 - DNA, 3459 bp, Artificial Sequence
  derived and/or modified sequence
atggctgacctgagcctggctgatgccctgacagagcccagcccagacattgaaggagagatcaagagggacttcatcgccaccctggaggccgaggcctttgatgatgtggtgggggagaccgtgggcaagacagactacatccccctgctggatgtggatgagaagacaggcaacagcgagagcaagaagaagccctgcagcgagaccagccagatcgaggacacccccagcagcaagcccaccctgctggccaacggcggccatggagtggagggcagtgacaccaccggcagccccacagagttcctggaggagaagatggcctaccaggagtaccccaacagccagaactggccagaggacaccaacttctgcttccagcctgagcaggtggtggaccccatccagacagaccccttcaagatgtaccatgatgatgacctggccgacctggtgttccccagcagcgccacagctgacaccagcatctttgctggccagaatgaccccctgaaggacagctatggcatgagcccctgcaacacagctgtggtgccccagggctggagcgtggaggccctgaacagcccccacagcgagagctttgtgtccccagaggccgtggccgagcccccccagcccacagctgtgcccctggagctggccaaggagattgagatggccagcgaggagcggcccccagcccaggccctggagatcatgatgggcctgaagaccacagacatggcccccagcaaggagacagagatggccctggccaaggacatggccctggccaccaagacagaggtggccctggccaaggacatggagagccccaccaagctggatgtgaccctggccaaggacatgcagcccagcatggagagtgacatggccctggtgaaggacatggagctgcccacagagaaggaggtggccctggtgaaggatgtgcgctggcccacagaaacagatgtgagcagcgccaagaatgtggtgctgcccacagaaacagaggtggccccagccaaggatgtgaccctgctgaaggagacagagcgggccagccccatcaagatggacctggcccccagcaaggacatgggcccccccaaggagaacaagaaggagacagagcgggccagccccatcaagatggacctggcccccagcaaggacatgggcccccccaaggagaacaagatcgtgcctgccaaggacctggtgctgctgtctgaaattgaggtggcccaggccaatgacatcatcagcagcacagagatcagcagcgctgagaaggtggccctgagcagcgagacagaggtggccctggcccgggacatgaccctgcccccagagaccaacgtcatcctgaccaaggacaaggccctgcccctggaggccgaggtggcccctgtgaaggacatggcccagctgcctgagacagagatcgccccagccaaggatgtggcccccagcacagtgaaggaggtgggcctgctgaaggacatgagccccctgtctgaaacagagatggccctgggcaaggatgtgaccccacctcctgagacagaggtggtgctgatcaagaatgtgtgcctgcccccagagatggaggtggccctgacagaggaccaggtgcctgccctgaagacagaggcccccctggccaaggatggagtgctgaccctggccaacaacgtgaccccagccaaggatgtgccccccctgtctgaaacagaggccacccctgtgcccatcaaggacatggagatcgcccagacccagaagggcatcagcgaggacagccacctggagagcctgcaggatgtgggccagagcgctgcccccaccttcatgatcagccctgagaccgtgactggaacaggcaagaagtgcagcctgcctgcagaagaagattctgtgctggagaagctgggggagaggaagccctgcaacagccagcccagcgagctgagcagcgagaccagcggcatcgcccggcctgaggagggccggcctgtggtgtctggaactggaaatgacatcaccaccccacccaacaaggagctgccccccagccctgagaagaagaccaagcccctggccaccacccagcctgccaagaccagcaccagcaaggccaagacccagcccaccagcctgcccaagcagcctgcccccaccaccatcggcggcctgaacaagaagcccatgagcctggccagcggcctggtgcctgctgccccacccaagaggcctgctgtggccagcgcccggcccagcatcctgcccagcaaggatgtgaagcccaagcccatcgcagatgccaaggcccctgagaagagggccagccccagcaagccagccagcgccccagccagccgcagcggcagcaagagcacccagacagtggccaagaccaccacagctgctgctgtggccagcacaggccccagcagccgcagccccagcaccctgctgcccaagaagcccacagccatcaagacagagggcaagccagctgaggtgaagaagatgacagccaagtctgtgcctgctgacctgagccggcccaagagcaccagcaccagctccatgaagaagaccaccaccctgagcggcacagccccagctgctggggtggtgcccagccgggtgaaggccacccccatgcccagccggcccagcaccacccccttcatcgacaagaagcccaccagcgccaagcccagcagcaccaccccccggctgagccggctggccaccaacaccagcgccccagacctgaagaatgtgcgcagcaaggtgggcagcacagagaacatcaagcaccagcccggcggcggccgggccaaggtggagaagaagacagaggccgccgccaccaccaggaagccagagagcaatgctgtgaccaagacagctggccccatcgccagcgcccagaagcagcctgctgggaaggtgcagatcgtgtccaagaaggtgtcctacagccacatccagagcaaatgtggcagcaaggacaacatcaagcacgtgcctgggggcggcaatgtgcagatccagaacaagaaggtggacatcagcaaggtgagcagcaaatgtggcagcaaggccaacatcaagcacaagccaggcggcggagatgtgaagattgagagccagaagctgaacttcaaggagaaggcccaggccaaggtgggcagcctggacaacgtgggccacctgcctgctgggggcgctgtgaagacagagggcggcggcagcgaggcccccctgtgccccggccccccagctggggaggagcccgccatcagcgaggccgcccctgaggccggggcccccaccagcgccagcggcctgaatggccaccccaccctgagcggcggcggggaccagcgggaggcccagaccctggacagccagatccaggagaccagcatctag

SEQ ID NO: 127799 - DNA, 5142 bp, Artificial Sequence
  derived and/or modified sequence
acccgctggtggcccggtccgcgtgtgcgccgactctcgcactctcctcgctccgggcgcccagactctgagagagagcgacggccatcatagaacagcgaaggcagtcgatcggcctgcggtccgcttcggcattcgcaggccgcaggcgggaggctagagcccccaggcgcacctcgccccaaccgcccgcggctcgggcagctctgcagagacgtcgtggcggcagggccagcacccattggtccgccacagccctccgccctccccctcgccacgcttattggccggagcggcggcgctcgccgggtaggcggtggcggcgtccctcccttgcgccggccctcaagaggcgacgaggaagcggccgcctccctgcgccccgcccctccggctagctcgctggctcccggctcctcccgacgtctcctacctcctcacggctcttcccggcgctctcctggctcccttctgccccagctccgtctcggcggcggcgggcagttgcagtggtgcagaatggctgacctcagtcttgcagatgcattaacagaaccatctccagacattgagggagagataaagcgggacttcattgccacactagaggcagaggcctttgatgatgttgtgggagaaactgttggaaaaacagactatattcctctcctggatgttgatgagaaaaccgggaactcagagtcaaagaagaaaccgtgctcagaaactagccagattgaagatactccatcttctaaaccaacactcctagccaatggtggtcatggagtagaagggagcgatactacagggtctccaactgaattccttgaagagaaaatggcctaccaggaatacccaaatagccagaactggccagaagataccaacttttgtttccaacctgagcaagtggtcgatcctatccagactgatccctttaagatgtaccatgatgatgacctggcagatttggtctttccctccagtgcgacagctgatacttcaatatttgcaggacaaaatgatcccttgaaagacagttacggtatgtctccctgcaacacagctgttgtacctcaggggtggtctgtggaagccttaaactctccacactcagagtcctttgtttccccagaggctgttgcagaacctcctcagccaacggcagttcccttagagctagccaaggagatagaaatggcatcagaagagaggccaccagcacaagcattggaaataatgatgggactgaagactactgacatggcaccatctaaagaaacagagatggccctcgccaaggacatggcactagctacaaaaaccgaggtggcattggctaaagatatggaatcacccaccaaattagatgtgacactggccaaggacatgcagccatccatggaatcagatatggccctagtcaaggacatggaactacccacagaaaaagaagtggccctggttaaggatgtcagatggcccacagaaacagatgtatcttcagccaagaatgtggtactgcccacagaaacagaggtagccccagccaaggatgtgacactgttgaaagaaacagagagggcatctcctataaaaatggacttagccccttccaaggacatgggaccacccaaagaaaacaagaaagaaacagagagggcatctcctataaaaatggacttggctccttccaaggacatgggaccacccaaagaaaacaagatagtcccagccaaggatttggtattactctcagaaatagaggtggcacaggctaatgacattatatcatccacagaaatatcctctgctgagaaggtggctttgtcctcagaaacagaggtagccctggccagggacatgacactgcccccggaaaccaacgtgatcttgaccaaggataaagcactacctttagaagcagaggtggccccagtcaaggacatggctcaactcccagaaacagaaatagccccggccaaggatgtggctccgtccacagtaaaagaagtgggcttgttgaaggacatgtctccactatcagaaacagaaatggctctgggcaaggatgtgactccacctccagaaacagaagtagttctcatcaagaacgtatgtctgcctccagaaatggaggtggccctgactgaggatcaggtcccagccctcaaaacagaagcacccctggctaaggatggggttctgaccctggccaacaatgtgactccagccaaagatgttccaccactctcagaaacagaggcaacaccagttccaattaaagacatggaaattgcacaaacacaaaaaggaataagtgaggattcccatttagaatctctgcaggatgtggggcagtcagctgcacctactttcatgatttcaccagaaaccgtcacaggaacggggaaaaagtgcagcttgccggccgaggaggattctgtgttagaaaaactaggggaaaggaaaccatgcaacagtcaaccttctgagctttcttcagagacctcaggaatagccaggccagaagaaggaaggcctgtggtgagtgggacaggaaatgacatcaccaccccaccgaacaaggagctcccaccaagcccagagaagaaaacaaagcctttggccaccactcaacctgcaaagacttcaacatcgaaagccaaaacacagcccacttctctccctaagcagccagctcccaccaccattggtgggttgaataaaaaacccatgagccttgcttcaggcttagtgccagctgccccacccaaacgccctgccgtcgcctctgccaggccttccatcttaccttcaaaagacgtgaagccaaagcccattgcagatgcaaaggctcctgagaagcgggcctcaccatccaagccagcttctgccccagcctccagatctgggtccaagagcactcagactgttgcaaaaaccacaacagctgctgctgttgcctcaactggcccaagcagtaggagcccctccacgctcctgcccaagaagcccactgccattaagactgagggaaaacctgcagaagtcaagaagatgactgcaaagtctgtaccagctgacttgagtcgcccaaagagcacctccaccagttccatgaagaaaaccaccactctcagtgggacagcccccgctgcaggggtggttcccagccgagtcaaggccacacccatgccctcccggccctccacaactcctttcatagacaagaagcccacctcggccaaacccagctccaccaccccccggctcagccgcctggccaccaatacttctgctcctgatctgaagaatgtccgctccaaggttggctccacggaaaacatcaagcatcagcctggaggaggccgggccaaagtagagaaaaaaacagaggcagctgctacaacccgaaagcctgaatctaatgcagtcactaaaacagccggcccaattgcaagtgcacagaaacaacctgcggggaaagtccagatagtctccaaaaaagtgagctacagccatattcagtccaagtgtggttccaaggacaatattaagcatgtccctggaggtggtaatgttcagattcagaacaagaaagtggacatctctaaggtctcctccaagtgtgggtctaaggctaacatcaagcacaagcctggtggaggagatgtcaagattgaaagtcagaagttgaacttcaaggagaaggcccaggccaaggtgggatccctcgataatgtgggccacctacctgcaggaggtgctgtgaagactgagggcggtggcagcgaggctcctctgtgtccgggtccccctgctggggaggagccggccatctctgaggcagcgcctgaagctggcgcccccacttcagccagtggcctcaatggccaccccaccctgtcagggggtggtgaccaaagggaggcccagaccttggacagccagatccaggagacaagcatctaatgatgacattctggtctcgtcttccgtctcccccgtgttcccctcttgtctcccctgttcccctctcccttccctcctcccatgtcactgcagattgagacctacaggctgacgttccgggcaaatgccagggcccgcaccgaccacggggccgacattgtctcccgccccccacacttccctggcggccccaactcgggctcccgggtccttggccccctttcccgggctgtccactagaccagtgagcgcttgggcgccgtgctgggcagcccgctaggctcgccttccctcctgctttgcgtgcccggggcagcagcagccctgccccacacctcctctcactccccagcctgggcccatctccctgctttggtcttgccccatcactgcgccactgctccgtggaggaggttgggagggggttggggtggttgaggctaagttgggatctaggagaggagaaccagattctatcctcatctttttttggttctttggtccaaacccaaaagaaactgacatgccctcccttctccctggatctacctggagggaagagtggaggtggattccgagtggtgacaggacgctgaccgtggagcttaagccactgcctctccctctggtcccacaaatgggcgcccccccctccccatgcaggtggtgtcgggcccttcttgctgccctgccccaagttgggggtcagtgctgcctgtccccatgcttaacatacccgcctagctgctgtcacatttttcttgttttgtccttttatttttttctaataacctaaaaactggcaaaatagttctgcaggttgaagccatgtctacatgaaagtcctcagtaagtgttagagggaacagggcggagatatccttatgccacccccgctggaggatgtgggcagcttagggccctggaggcggtgcggcagggaagaggggtgcagaggctgtggctggtgagccggtcaggcacacaaggggcccttggagcgtggactggttggttttgccattttgttgtgtgtatgctgcttttcttttctaaccaagaggctggttttggcatctctgtcccattccctgggatctggtggtcagccctaggataaaaagccagggctggagaacaagaaagggccaggagatggaattc

SEQ ID NO: 127800 - DNA, 3459 bp, Artificial Sequence
  derived and/or modified sequence
atggccgacctgagcctggccgacgccctgaccgagcccagccccgacatagagggtgagatcaagagagacttcatcgccacccttgaagctgaagctttcgacgatgttgtgggcgaaaccgtgggcaagaccgactatatcccactcctggacgtggatgagaagaccgggaacagcgagtccaagaagaagccatgttctgaaacatcccaaatcgaagatacgccatcatcaaagcctaccttactcgcaaacgggggacatggcgtggagggatcggacacaaccgggtcacccacagaatttttagaggagaagatggcttatcaagaataccccaactcacagaactggcccgaggatacaaacttctgctttcagccggagcaggtcgtggacccaatacagacggatcccttcaaaatgtaccacgacgatgatcttgccgatctcgtgttccctagcagcgcaacagctgatacatccatttttgctggccagaacgatcccctgaaagattcatatggtatgagtccctgtaacaccgcagtggtcccacagggttggtcagtggaagccctcaattcaccccatagcgagtcatttgtgagccctgaggctgtggccgagcccccccagcccaccgctgtcccactagagctcgccaaggaaatagagatggcgtccgaggagaggcctcccgcccaggcgttagagatcatgatggggctgaagactaccgacatggccccttccaaagagacagagatggccctagccaaagatatggcactcgcaactaagaccgaggtggctctggccaaagatatggagtcgcccaccaaattggatgtgacactcgctaaagacatgcagccttctatggagagtgacatggctttggtcaaggatatggagcttcctaccgagaaggaggtggctctcgtgaaggacgttcgctggcccaccgagacagatgtctccagcgccaaaaacgtggtcctcccgactgagaccgaggttgcgccagccaaggatgttacgcttctaaaggaaaccgaaagggcctcccccataaagatggacctggccccgtctaaggacatggggccccccaaggaaaacaaaaaagagaccgagagagcatcacctataaagatggatttggcaccgtccaaggacatgggcccaccgaaggagaacaagattgtgcctgctaaggacctggtgcttcttagcgagattgaggtggcccaagccaacgatataatttcttcgacagaaatctctagcgctgaaaaggtggctttaagttccgaaaccgaggtggccttagcccgcgatatgacgctccccccagagacaaatgtcattcttaccaaggataaagcactgccattggaagctgaagtggctcccgtgaaggacatggcccagctgccggaaaccgaaatagcccctgcgaaggacgtggcccctagtacagtaaaagaagtcggcctgctgaaggatatgtcgcccctctctgaaaccgagatggcgttggggaaggatgtcactcctccccctgagacagaggtggtgctcattaaaaacgtgtgccttccacctgaaatggaagtcgcccttaccgaagaccaggtgcctgccctaaagactgaagcacccttggctaaggacggggtgctgaccttagccaataacgtgaccccggccaaggatgttcctcctctgagcgagacggaggctactcccgtgcctatcaaagacatggagattgctcagactcagaaggggattagcgaggatagccacctcgagtccctgcaggacgtcgggcagtccgccgctcccacgttcatgatctcacctgagactgtgacaggcacaggcaagaaatgtagtctgcccgccgaagaggattcagtgcttgaaaaactgggagagaggaaaccctgtaactcccagccaagcgagctgagttcagaaacatctggcatagcccgtccggaggaaggacgccctgtcgtgtctggcaccggcaatgacatcaccacccccccaaataaagaactaccacccagccctgaaaagaaaacgaagcctctggcaaccacacagccggctaaaacctctacatccaaagctaaaactcagcccacctcccttccaaagcaacctgctcctaccaccatcggaggcctgaataagaagccgatgtcattagcctcaggcctggtccctgccgcccctcccaagcgcccagcggtggcgtcggctcgaccttcaattctgcccagtaaagacgtgaaacccaaaccgatcgcagacgcgaaagcccccgagaagagggcatcccccagcaagccagcatctgctcctgcctcacgctccggtagcaagtccactcagaccgtcgcgaagacaaccaccgctgctgcagtagcttccacggggccaagctcccggagtccatccaccctcctgcccaagaagccgacagctataaagacagaagggaaacctgctgaggttaaaaaaatgacagcaaaaagcgttccggctgatctgagcagaccaaagtccactagcacgtcctccatgaagaaaacaacaaccttaagcggtactgccccagcggccggggttgttccgagcagagtgaaagctacccctatgccttctcggcccagcactaccccattcattgataaaaagccaacgtctgcaaaaccaagcagcacaacacctaggctgtctcgattggcgactaatacaagcgccccagatctcaaaaatgtgaggtctaaagtcggttccacagaaaacattaagcaccagcctggcgggggaagggcaaaggtggagaagaaaactgaggcagccgccaccaccagaaagcccgaatctaacgctgtgaccaagacggctggtcctatcgccagtgctcagaagcagcctgcgggcaaagtacagattgtgtcaaagaaggtgtcttattctcatattcagagtaaatgcggctccaaggataacatcaagcatgttcccgggggcgggaatgtgcagatacaaaacaagaaggtggatatcagcaaggtgagctccaaatgcggaagtaaagctaacattaagcataaacctggagggggagatgtgaaaattgagagtcagaagttaaatttcaaggagaaggctcaggcaaaagttgggtcactcgataacgtcggtcatctacctgccggaggtgcagtcaagaccgagggaggggggtccgaagccccgctgtgtccagggcctccggctggggaggagcccgctattagtgaggccgcccccgaagccggagcccccacctccgcaagtggactaaacggccatccaacattgagtggaggcggcgatcaaagagaggcacagacgctagatagtcagatccaggaaacatccatttag

SEQ ID NO: 127801 - DNA, 3459 bp, Artificial Sequence
  derived and/or modified sequence
atggcagacctctctctggccgatgcccttaccgaaccttcccctgacattgagggagagattaaaagagattttattgccacattagaggcagaagctttcgatgacgtcgtgggcgagaccgttggcaaaacagattacatcccgctcttggacgtggacgagaagactgggaactctgagagcaagaaaaagccgtgtagcgagactagccagatcgaagacaccccaagcagtaaaccgacgctcctggcaaatgggggtcatggggtagagggaagtgatacaaccgggagccccaccgaatttttagaggaaaaaatggcatatcaagagtacccaaactctcagaactggcccgaagataccaatttttgtttccaacccgaacaggtggtcgacccaatccaaacagacccatttaaaatgtaccatgatgatgacctggctgacctggtcttccctagttctgctactgctgatacctcgatttttgccggacagaacgaccccttgaaagactcatacgggatgagcccctgcaatacagccgtggtgcctcaaggctggtcagttgaggctctcaactccccacacagcgagagctttgtgtcgcctgaagctgttgccgaacctccccaaccaaccgccgtgccgttagaactggcgaaagagatcgagatggcaagcgaagaaaggccgcctgcccaggctctggaaatcatgatgggcttgaagactacagacatggccccaagtaaagagacagagatggccctagccaaggacatggctctcgccactaagacggaggtggccctcgccaaagatatggagtcccctacaaagttggacgtaactctggccaaggacatgcagcccagcatggagtcagatatggcgctcgtcaaagatatggagcttcctaccgaaaaggaggttgctctggtgaaagacgtccgttggccaactgagaccgatgtgagtagcgccaaaaatgtggtcttgccaaccgagactgaagttgcccctgcgaaagacgtcacactcctgaaagagaccgaaagggcttctccaatcaagatggatttggcgccatcaaaagatatgggtccacctaaggagaacaaaaaggaaacagagagggccagtcctattaagatggacctggcaccttctaaagatatgggaccacctaaagaaaacaagatcgtgccggctaaggacctcgtgcttctgagtgaaattgaggtcgcccaggcaaatgacatcattagttctacggagattagttccgcagaaaaagtggctctcagtagcgagactgaggtggctctggctcgcgacatgaccctgcctcccgaaacaaacgtgatccttacgaaagataaggccctaccccttgaggccgaggtcgctcctgttaaagacatggctcaattaccagagactgagatcgcgcctgctaaagacgtggccccatctaccgtcaaggaggtggggcttctgaaagatatgagtcccctttccgagacagagatggcactgggcaaggacgtcacacctccacccgagacagaggtggtgcttatcaagaatgtgtgcttgccacctgaaatggaggttgcccttactgaagaccaggtgcctgctctgaagaccgaggcgcctctggccaaggatggtgtgctcaccctcgctaacaatgttacgcccgctaaggacgtcccaccactcagcgaaactgaggcaactccagtgcccatcaaggacatggaaatagcgcaaacgcagaagggtatcagtgaggactcgcacctggagtcactacaggatgttggacaaagcgccgctcctacttttatgattagccccgaaaccgtgactggcaccgggaagaaatgcagcctcccagctgaggaggattccgtgcttgaaaagttgggggaacgcaagccctgcaattcccagcccagtgaactgtcgtccgagacatctggaattgccagacctgaggagggacggcctgttgtgtcgggaaccggaaacgatattaccacgcctcccaacaaagagctgcctccttcacctgaaaagaagacaaagccattagccaccactcagcccgctaagacctcaacaagcaaagccaagacgcaaccaacatctctgccaaagcagcctgcaccaacgactattggaggactgaacaaaaaacccatgtctctcgccagcggtctggtaccggctgcaccgcctaagcggccagctgtggcgtcagcgagaccttcaatcttgccctccaaggatgttaagcctaagcctatcgcagatgccaaagctcctgaaaagagggccagcccgtccaaaccggcaagtgctccagctagcaggagtggctccaaatcgacacaaaccgtggctaagaccacaaccgccgctgctgtggcttcaaccggtccgtccagtaggtccccaagcacattgctccctaagaaacctacagctattaagacggaagggaagccagccgaagtgaaaaaaatgactgcaaaaagcgtccctgcagacctctctcgcccaaagagtacctcaactagctccatgaaaaaaactaccaccctgtccggaaccgcgcctgctgccggagtggtcccatcccgcgtgaaagcaactcctatgccgagtagaccaagcaccacacccttcatcgataaaaagccaacttctgcaaagccctcgtctacaacccccaggttgtcacggctggcgaccaatacctccgccccagatttaaagaacgttaggagcaaagtgggtagtaccgagaatattaagcaccagcccggaggaggcagggctaaagtagagaaaaaaactgaggccgcagcaacgacgagaaagcccgaaagcaacgccgttactaagactgcaggacctattgcttcagctcagaaacagccagcagggaaagttcagattgtgtctaaaaaagtctcatattctcatatccagagcaagtgtggcagtaaggacaatatcaagcacgtacctgggggtggcaatgtgcagatacaaaataagaaggtcgacatctcgaaggtttccagcaaatgtggtagcaaagctaatatcaaacacaaacctggtgggggtgacgtgaaaatcgaaagccagaaattgaacttcaaagaaaaggcacaggccaaagtgggcagtctggataacgtcggccacctgccagcgggaggcgctgtgaaaactgaaggcggtggctcagaagcaccactgtgccctgggcctcctgcaggagaggagcccgcaatcagcgaagcggcacccgaagccggtgcccctacaagtgcctcgggcctgaacggtcaccctacattaagcggcggaggagaccagagggaggcgcagaccctcgacagccagatccaggagaccagcatttag

SEQ ID NO: 127802 - DNA, 3459 bp, Artificial Sequence
  derived and/or modified sequence
atggccgacctgagcctggccgacgccctgaccgagcccagccccgacatcgagggcgagatcaagagagacttcatcgccaccctggaggccgaggccttcgacgacgtggtgggcgagaccgtgggcaagaccgactacatccccctgctggacgtggacgagaagaccggcaacagcgagagcaagaagaagccctgcagcgagaccagccagatcgaggacacccccagcagcaagcccaccctgctggccaacggcggccacggcgtggagggcagcgacaccaccggcagccccaccgagttcctggaggagaagatggcctaccaggagtaccccaacagccagaactggcccgaggacaccaacttctgcttccagcccgagcaggtggtggaccccatccagaccgaccccttcaagatgtaccacgacgacgacctggccgacctggtgttccccagcagcgccaccgccgacaccagcatcttcgccggccagaacgaccccctgaaggacagctacggcatgagcccctgcaacaccgccgtggtgccccagggctggagcgtggaggccctgaacagcccccacagcgagagcttcgtgagccccgaggccgtggccgagcccccccagcccaccgccgtgcccctggagctggccaaggagatcgagatggccagcgaggagagaccccccgcccaggccctggagatcatgatgggcctgaagaccaccgacatggcccccagcaaggagaccgagatggccctggccaaggacatggccctggccaccaagaccgaggtggccctggccaaggacatggagagccccaccaagctggacgtgaccctggccaaggacatgcagcccagcatggagagcgacatggccctggtgaaggacatggagctgcccaccgagaaggaggtggccctggtgaaggacgtgagatggcccaccgagaccgacgtgagcagcgccaagaacgtggtgctgcccaccgagaccgaggtggcccccgccaaggacgtgaccctgctgaaggagaccgagagagccagccccatcaagatggacctggcccccagcaaggacatgggcccccccaaggagaacaagaaggagaccgagagagccagccccatcaagatggacctggcccccagcaaggacatgggcccccccaaggagaacaagatcgtgcccgccaaggacctggtgctgctgagcgagatcgaggtggcccaggccaacgacatcatcagcagcaccgagatcagcagcgccgagaaggtggccctgagcagcgagaccgaggtggccctggccagagacatgaccctgccccccgagaccaacgtgatcctgaccaaggacaaggccctgcccctggaggccgaggtggcccccgtgaaggacatggcccagctgcccgagaccgagatcgcccccgccaaggacgtggcccccagcaccgtgaaggaggtgggcctgctgaaggacatgagccccctgagcgagaccgagatggccctgggcaaggacgtgacccccccccccgagaccgaggtggtgctgatcaagaacgtgtgcctgccccccgagatggaggtggccctgaccgaggaccaggtgcccgccctgaagaccgaggcccccctggccaaggacggcgtgctgaccctggccaacaacgtgacccccgccaaggacgtgccccccctgagcgagaccgaggccacccccgtgcccatcaaggacatggagatcgcccagacccagaagggcatcagcgaggacagccacctggagagcctgcaggacgtgggccagagcgccgcccccaccttcatgatcagccccgagaccgtgaccggcaccggcaagaagtgcagcctgcccgccgaggaggacagcgtgctggagaagctgggcgagagaaagccctgcaacagccagcccagcgagctgagcagcgagaccagcggcatcgccagacccgaggagggcagacccgtggtgagcggcaccggcaacgacatcaccaccccccccaacaaggagctgccccccagccccgagaagaagaccaagcccctggccaccacccagcccgccaagaccagcaccagcaaggccaagacccagcccaccagcctgcccaagcagcccgcccccaccaccatcggcggcctgaacaagaagcccatgagcctggccagcggcctggtgcccgccgccccccccaagagacccgccgtggccagcgccagacccagcatcctgcccagcaaggacgtgaagcccaagcccatcgccgacgccaaggcccccgagaagagagccagccccagcaagcccgccagcgcccccgccagcagaagcggcagcaagagcacccagaccgtggccaagaccaccaccgccgccgccgtggccagcaccggccccagcagcagaagccccagcaccctgctgcccaagaagcccaccgccatcaagaccgagggcaagcccgccgaggtgaagaagatgaccgccaagagcgtgcccgccgacctgagcagacccaagagcaccagcaccagcagcatgaagaagaccaccaccctgagcggcaccgcccccgccgccggcgtggtgcccagcagagtgaaggccacccccatgcccagcagacccagcaccacccccttcatcgacaagaagcccaccagcgccaagcccagcagcaccacccccagactgagcagactggccaccaacaccagcgcccccgacctgaagaacgtgagaagcaaggtgggcagcaccgagaacatcaagcaccagcccggcggcggcagagccaaggtggagaagaagaccgaggccgccgccaccaccagaaagcccgagagcaacgccgtgaccaagaccgccggccccatcgccagcgcccagaagcagcccgccggcaaggtgcagatcgtgagcaagaaggtgagctacagccacatccagagcaagtgcggcagcaaggacaacatcaagcacgtgcccggcggcggcaacgtgcagatccagaacaagaaggtggacatcagcaaggtgagcagcaagtgcggcagcaaggccaacatcaagcacaagcccggcggcggcgacgtgaagatcgagagccagaagctgaacttcaaggagaaggcccaggccaaggtgggcagcctggacaacgtgggccacctgcccgccggcggcgccgtgaagaccgagggcggcggcagcgaggcccccctgtgccccggcccccccgccggcgaggagcccgccatcagcgaggccgcccccgaggccggcgcccccaccagcgccagcggcctgaacggccaccccaccctgagcggcggcggcgaccagagagaggcccagaccctggacagccagatccaggagaccagcatctag

SEQ ID NO: 127803 - protein, 729 aa, Artificial Sequence
  derived and/or modified sequence
MSTRTPLPTVNERDTENHTSHGDGRQEVTSRTSRSGARCRNSIASCADEQPHIGNYRLLKTIGKGNFAKVKLARHILTGREVAIKIIDKTQLNPTSLQKLFREVRIMKILNHPNIVKLFEVIETEKTLYLIMEYASGGEVFDYLVAHGRMKEKEARSKFRQIVSAVQYCHQKRIVHRDLKAENLLLDADMNIKIADFGFSNEFTVGGKLDTFCGSPPYAAPELFQGKKYDGPEVDVWSLGVILYTLVSGSLPFDGQNLKELRERVLRGKYRIPFYMSTDCENLLKRFLVLNPIKRGTLEQIMKDRWINAGHEEDELKPFVEPELDISDQKRIDIMVGMGYSQEEIQESLSKMKYDEITATYLLLGRKSSELDASDSSSSSNLSLAKVRPSSDLNNSTGQSPHHKVQRSVFSSQKQRRYSDHAGPAIPSVVAYPKRSQTSTADSDLKEDGISSRKSSGSAVGGKGIAPASPMLGNASNPNKADIPERKKSSTVPSSNTASGGMTRRNTYVCSERTTADRHSVIQNGKENSTIPDQRTPVASTHSISSAATPDRIRFPRGTASRSTFHGQPRERRTATYNGPPASPSLSHEATPLSQTRSRGSTNLFSKLTSKLTRSRNVSAEQKDENKEAKPRSLRFTWSMKTTSSMDPGDMMREIRKVLDANNCDYEQRERFLLFCVHGDGHAENLVQWEMEVCKLPRLSLNGVRFKRISGTSIAFKNIASKIANELKL

SEQ ID NO: 127804 - protein, 752 aa, Artificial Sequence
  derived and/or modified sequence
MSTRTPLPTVNERDTENHTSHGDGRQEVTSRTSRSGARCRNSIASCADEQPHIGNYRLLKTIGKGNFAKVKLARHILTGREVAIKIIDKTQLNPTSLQKLFREVRIMKILNHPNIVKLFEVIETEKTLYLIMEYASGGEVFDYLVAHGRMKEKEARSKFRQGCQAGQTIKVQVSFDLLSLMFTFIVSAVQYCHQKRIVHRDLKAENLLLDADMNIKIADFGFSNEFTVGGKLDTFCGSPPYAAPELFQGKKYDGPEVDVWSLGVILYTLVSGSLPFDGQNLKELRERVLRGKYRIPFYMSTDCENLLKRFLVLNPIKRGTLEQIMKDRWINAGHEEDELKPFVEPELDISDQKRIDIMVGMGYSQEEIQESLSKMKYDEITATYLLLGRKSSELDASDSSSSSNLSLAKVRPSSDLNNSTGQSPHHKVQRSVFSSQKQRRYSDHAGPAIPSVVAYPKRSQTSTADSDLKEDGISSRKSSGSAVGGKGIAPASPMLGNASNPNKADIPERKKSSTVPSSNTASGGMTRRNTYVCSERTTADRHSVIQNGKENSTIPDQRTPVASTHSISSAATPDRIRFPRGTASRSTFHGQPRERRTATYNGPPASPSLSHEATPLSQTRSRGSTNLFSKLTSKLTRSRNVSAEQKDENKEAKPRSLRFTWSMKTTSSMDPGDMMREIRKVLDANNCDYEQRERFLLFCVHGDGHAENLVQWEMEVCKLPRLSLNGVRFKRISGTSIAFKNIASKIANELKL

SEQ ID NO: 127805 - DNA, 2190 bp, Artificial Sequence
  derived and/or modified sequence
atgtcgacacgcacgccgcttcccaccgtgaatgaacgtgataccgagaaccacacctcccacggagatggcaggcaggaagtcacatctcggacatcgcgttctggggccagatgcagaaatagtattgcttcttgcgctgatgaacagcctcatattgggaactaccggcttctgaaaacaatcgggaaggggaattttgctaaggttaagctggctagacacattctgacagggcgagaagttgccatcaagattatcgacaaaactcaactcaaccccactagtctccaaaaacttttcagagaagttcgcattatgaagattcttaaccacccaaatatcgtgaagctcttcgaggtgattgagacggagaagactttgtacctgatcatggaatatgcctccgggggggaagtgtttgattacctggtagcgcatggccgcatgaaggagaaggaggctagatccaaattccggcagatcgtgtctgccgttcagtactgccaccagaagcgaatcgtgcacagagatctgaaggctgagaaccttttactggacgccgacatgaacattaagattgccgactttggcttttctaatgaatttactgtgggggggaagcttgataccttctgtggttcacccccctatgctgcgccagagctgtttcagggtaagaagtatgacgggcccgaagtcgacgtctggagcctaggagtgattctctacacattggtgagcggaagcctgccattcgacggacagaatctgaaggagcttcgcgagcgggtactgagaggtaagtaccggatccctttttatatgtccaccgactgcgagaatctcctgaaacgtttcttggttcttaatcccatcaagagaggcactctggagcagattatgaaggatcgatggattaacgctggacacgaggaggacgagctcaagccctttgtcgagcctgagttggatatctctgatcagaagcggatcgatataatggtcggcatgggctatagccaggaggagattcaggagtcactgtctaagatgaaatatgacgagattaccgccacctatctgctgttgggacgcaaaagctcagaactggacgcctcggatagttcttcttcatcaaacctcagtctggcgaaagtgagaccaagtagtgacttgaataactccacaggtcagtctccccatcacaaggtacagcgctccgtctttagttctcagaagcaaaggcggtactctgaccatgctgggcccgcaattcctagcgtggttgcttatccaaaaagaagccagacatccacggcagattctgacctaaaagaggacggtattagctcgagaaaaagttctggttcagcagtgggaggtaaggggattgcccctgcctctcccatgcttggcaacgcctctaatcccaataaagcggatattccagaacggaagaagtcatctactgtcccttcctctaacaccgcctctggcggtatgacccggagaaatacctacgtgtgtagcgaacggactacagcagacaggcattcagtgatccaaaacggtaaagagaacagcactatcccagaccagcggacaccggtggcttcgacccatagcattagttcagctgcaacaccggatcggatcagatttcctagaggcacggctagcagaagtacctttcacgggcagccccgtgagagaaggactgctacatacaacgggccgcccgcctccccttccttgagccacgaggccaccccactttctcagactaggtctagagggtcaactaacctgttctccaagctgacgagtaaactgactaggagcagaaacgttagtgccgagcagaaggacgagaataaggaggctaagcctcggtcactccgatttacgtggtcaatgaagacaacctcttccatggatcccggggatatgatgagggaaattagaaaagtcctcgacgccaataactgcgattatgaacagcgcgaaaggtttttgctgttttgcgttcacggcgatggccatgcggaaaacctggtgcagtgggaaatggaggtgtgtaagctgccgcgactgtcactgaacggtgttcggttcaaacggatatccggtactagtattgctttcaaaaatatcgcctcaaaaatcgccaatgagctgaaactgtag

SEQ ID NO: 127806 - DNA, 2259 bp, Artificial Sequence
  derived and/or modified sequence
atgtctacaaggacaccattgcctaccgtgaacgagcgagacaccgagaatcacactagccatggcgacggcagacaggaggtaacttcacgtacatctagatccggtgcccgatgccgaaactctatagcctcctgtgcggatgagcagccacatattggcaattatcgtttgctgaagactatcggaaaagggaattttgcaaaagtgaagttggcccgccatatattaacaggacgtgaagtggcaatcaagattatagacaagacacagcttaatcccacttctctgcagaagctgttccgagaggtgcgaatcatgaagatccttaatcaccctaacatcgtgaagctgtttgaagtcatagagacagaaaagacgctatacctgattatggagtacgcgagtgggggtgaggtcttcgattatctggttgcacatggtaggatgaaagagaaagaggccaggtctaaattccggcagggatgtcaggccggtcaaactattaaagtgcaagtgagctttgatctactgtccttaatgttcaccttcatcgtttctgctgttcagtactgccatcagaagagaattgtccatcgcgatttgaaggccgaaaatctactattggatgctgacatgaatattaagatcgccgatttcggcttctccaatgaattcaccgtgggtggtaagttagacacattttgtgggtctccaccttatgccgcacccgagctgttccagggcaagaagtatgatggtcccgaggtcgacgtttggtctctgggcgttatcctttacactttagttagcggctctctcccattcgatgggcagaaccttaaggaactccgggaacgtgtcctcagaggcaagtacagaatccccttctacatgtccaccgactgcgagaacctcctgaaacggtttcttgtccttaatcccataaagcggggcaccctggagcagattatgaaggaccgttggattaacgcggggcacgaagaggacgagctgaagcctttcgtagagcctgaactggacatctcggaccagaaaagaatcgacataatggtgggcatggggtacagccaggaggagatccaggagtctctcagcaagatgaagtatgacgaaataacagctacctacttgctgctggggcgcaaaagctccgagcttgacgcctccgactcttccagctcttcgaacctgagccttgctaaggtcaggccctcaagcgatctgaacaattcaacagggcaatccccccatcataaggtacaacggagtgtgttcagctcccagaagcagagaaggtattctgatcacgctggtccggccatcccctccgtcgtcgcctatccgaagcgatctcagacttctaccgcggattccgatcttaaggaagatggaatttcaagccgaaaatcaagcggttccgcagtgggaggaaaagggatcgcaccggcaagccccatgctcggcaatgcaagcaatcctaacaaggcagatattccggaacgcaagaagagctctactgttcctagctcaaataccgccagcgggggcatgacaagacggaatacttacgtatgctccgagcgcactacagctgatagacactccgtgattcagaacgggaaggagaactctaccatccctgatcagagaactcccgtggctagcactcactccatcagtagcgcagcgacccccgatcggattaggtttcctcggggcaccgcctcgcgttctacctttcatggccagcctagagagcgtaggaccgcaacctacaatggacctcccgcttcacccagtctctctcacgaggctacaccactgagtcagactcggtctcgcggcagcacgaatttattcagcaagctgacttctaaacttacacgctcaagaaacgtgtctgccgaacagaaggacgaaaataaagaggccaaacctcggtccttgaggttcacgtggtctatgaagacaacctcctcaatggatccaggcgacatgatgcgagaaattcgcaaggttctggatgccaataattgcgactacgaacagcgcgagcgatttctgctattctgtgtccacggcgatggccacgccgaaaacttggtccaatgggagatggaagtctgcaagcttccgagactatccctcaacggcgtccggtttaaacgaatctcggggacaagtattgcctttaaaaacattgcctccaagatagccaatgagctgaagctctag

SEQ ID NO: 127807 - DNA, 2190 bp, Artificial Sequence
  derived and/or modified sequence
atgagcaccaggacccccctgcccaccgtgaatgaaagagacacagagaaccacaccagccatggagatggccggcaggaggtgaccagcaggaccagccgcagcggggcccgctgcaggaacagcatcgccagctgtgctgatgagcagccccacatcggcaactaccgcctgctgaagaccatcggcaagggcaactttgccaaggtgaagctggcccggcacatcctgaccggccgggaggtggccatcaagatcatcgacaagacccagctgaaccccaccagcctgcagaagctgttccgggaggtgcgcatcatgaagatcctgaaccaccccaacatcgtgaagctgtttgaagtcatcgagacagagaagaccctgtacctgatcatggagtatgccagcggcggggaggtgtttgactacctggtggcccacggccgcatgaaggagaaggaggcccggagcaagttccggcagatcgtgtctgctgtgcagtactgccaccagaagagaattgtgcaccgggacctgaaggccgagaacctgctgctggatgctgacatgaacatcaagattgctgactttggcttcagcaatgagttcaccgtgggcggcaagctggacaccttctgtggcagccccccctatgctgcccctgagctgttccagggcaagaagtatgatggccctgaggtggatgtgtggagcctgggcgtcatcctgtacaccctggtgtctggcagcctgccctttgatggccagaacctgaaggagctgcgggagcgggtgctgcggggcaagtaccgcatccccttctacatgagcacagactgtgagaacctgctgaagcgcttcctggtgctgaaccccatcaagaggggcaccctggagcagatcatgaaggaccgctggatcaatgccggccatgaagaagatgagctgaagccctttgtggagcctgagctggacatcagtgaccagaagagaattgacatcatggtgggcatgggctacagccaggaggagatccaggagagcctgagcaagatgaagtatgatgagatcacagccacctacctgctgctgggcaggaagagcagcgagctggatgccagtgacagcagcagcagcagcaacctgagcctggccaaggtgcggcccagcagtgacctgaacaacagcacaggccagagcccccaccacaaggtgcagaggagcgtcttcagcagccagaagcagaggcgctacagcgaccacgccggccctgccatccccagcgtggtggcctaccccaagaggagccagaccagcacagctgacagcgacctgaaggaggatggcatcagcagcaggaagagcagcggcagcgctgtgggcggcaaaggaattgccccagccagccccatgctgggcaatgccagcaaccccaacaaggctgacatccctgagaggaagaagagcagcacagtgcccagcagcaacacagccagcggcggcatgaccaggaggaacacctacgtgtgcagcgagaggaccacagctgacagacacagcgtcatccagaatggcaaggagaacagcaccatcccagaccagaggacccctgtggccagcacccacagcatcagcagcgctgccaccccagaccgcatccgcttcccccggggcacagccagccgcagcaccttccacggccagccccgggagaggagaacagccacctacaacggccccccagccagccccagcctgagccatgaggccacccccctgagccagaccaggagccggggcagcaccaacctcttcagcaagctgaccagcaagctgaccaggagcagaaatgtgtctgctgagcagaaggatgagaacaaggaggccaagcccaggagcctgcgcttcacctggagcatgaagaccaccagctccatggaccccggggacatgatgagggagatcaggaaggtgctggatgccaacaactgtgactatgagcagcgggagcgcttcctgctcttctgtgtgcatggagatggccatgctgagaacctggtgcagtgggagatggaggtgtgcaagctgccccggctgagcctgaatggagtgcgcttcaagaggatcagcggcaccagcatcgccttcaagaacatcgccagcaagatcgccaatgagctgaagctgtag

SEQ ID NO: 127808 - DNA, 2259 bp, Artificial Sequence
  derived and/or modified sequence
atgagcaccaggacccccctgcccaccgtgaatgaaagagacacagagaaccacaccagccatggagatggccggcaggaggtgaccagcaggaccagccgcagcggggcccgctgcaggaacagcatcgccagctgtgctgatgagcagccccacatcggcaactaccgcctgctgaagaccatcggcaagggcaactttgccaaggtgaagctggcccggcacatcctgaccggccgggaggtggccatcaagatcatcgacaagacccagctgaaccccaccagcctgcagaagctgttccgggaggtgcgcatcatgaagatcctgaaccaccccaacatcgtgaagctgtttgaagtcatcgagacagagaagaccctgtacctgatcatggagtatgccagcggcggggaggtgtttgactacctggtggcccacggccgcatgaaggagaaggaggcccggagcaagttccggcagggctgccaggccggccagaccatcaaggtgcaggtgtcctttgacctgctgagcctgatgttcaccttcatcgtgtctgctgtgcagtactgccaccagaagagaattgtgcaccgggacctgaaggccgagaacctgctgctggatgctgacatgaacatcaagattgctgactttggcttcagcaatgagttcaccgtgggcggcaagctggacaccttctgtggcagccccccctatgctgcccctgagctgttccagggcaagaagtatgatggccctgaggtggatgtgtggagcctgggcgtcatcctgtacaccctggtgtctggcagcctgccctttgatggccagaacctgaaggagctgcgggagcgggtgctgcggggcaagtaccgcatccccttctacatgagcacagactgtgagaacctgctgaagcgcttcctggtgctgaaccccatcaagaggggcaccctggagcagatcatgaaggaccgctggatcaatgccggccacgaggaggatgagctgaagccctttgtggagcctgagctggacatcagtgaccagaagagaattgacatcatggtgggcatgggctacagccaggaggagatccaggagagcctgagcaagatgaagtatgatgagatcacagccacctacctgctgctgggcaggaagagcagcgagctggatgccagtgacagcagcagcagcagcaacctgagcctggccaaggtgcggcccagcagtgacctgaacaacagcacaggccagagcccccaccacaaggtgcagaggtctgtgttcagcagccagaagcagaggcgctacagcgaccatgctggccctgccatccccagcgtggtggcctaccccaagaggagccagaccagcacagctgacagcgacctgaaggaggatggcatcagcagcaggaagagcagcggcagcgctgtgggcggcaagggcatcgccccagccagccccatgctgggcaatgccagcaaccccaacaaggctgacatccctgagaggaagaagagcagcacagtgcccagcagcaacacagccagcggcggcatgaccaggaggaacacctacgtgtgcagcgagaggaccacagctgacagacattctgtcatccagaatggcaaggagaacagcaccatcccagaccagaggacccctgtggccagcacccacagcatcagcagcgctgccaccccagaccgcatccgcttcccccggggcacagccagccgcagcaccttccacggccagccccgggagaggagaacagccacctacaatggacctccagccagccccagcctgagccatgaggccacccccctgagccagaccaggagccggggcagcaccaacctcttcagcaagctgaccagcaagctgaccaggagcagaaatgtgtctgctgagcagaaggatgagaacaaggaggccaagcccaggagcctgcgcttcacctggagcatgaagaccaccagctccatggaccccggggacatgatgagggagatcaggaaggtgctggatgccaacaactgtgactatgagcagcgggagcgcttcctgctcttctgtgtgcatggagatggccacgccgagaacctggtgcagtgggagatggaggtgtgcaagctgccccggctgagcctgaatggagtgcgcttcaagaggatcagcggcaccagcatcgccttcaagaacatcgccagcaagatcgccaatgagctgaagctgtag

SEQ ID NO: 127809 - DNA, 3283 bp, Artificial Sequence
  derived and/or modified sequence
gctccatggtcggcgcccacagcccgcggcggcctgtcttgcgctccacttccttcacatcctcctccgcctcctcgttttcaggcgccgccggcggcgctgtgtggaggcccgcgagctgaaattcgcggtgcgacgggagggagtggagaaggaggtgagggggcccaggatcgcggggcgccctgaggcaaggggacgccggcgggccgaagcgcagcccgccgcccgcaggctcggctccgccactgccgccctcccggtctcctcgcctcggccgccgaggcagggagagaatgagccccgggacccgccgggggacggcccgggccaggcccgggatctagacggccgtagggggaagggagccgccctccccacggcgccttttcggaactgccgtggactcgaggacgctggtcgccggcctcctagggctgtgctgttttgttttgaccctcgcattgtgcagaattaaagtgcagtaaaatgtccactaggaccccattgccaacggtgaatgaacgagacactgaaaaccacacgtcacatggagatgggcgtcaagaagttacctctcgtaccagccgctcaggagctcggtgtagaaactctatagcctcctgtgcagatgaacaacctcacatcggaaactacagactgttgaaaacaatcggcaaggggaattttgcaaaagtaaaattggcaagacatatccttacaggcagagaggttgcaataaaaataattgacaaaactcagttgaatccaacaagtctacaaaagctcttcagagaagtaagaataatgaagattttaaatcatcccaatatagtgaagttattcgaagtcattgaaactgaaaaaacactctacctaatcatggaatatgcaagtggaggtgaagtatttgactatttggttgcacatggcaggatgaaggaaaaagaagcaagatctaaatttagacagattgtgtctgcagttcaatactgccatcagaaacggatcgtacatcgagacctcaaggctgaaaatctattgttagatgccgatatgaacattaaaatagcagatttcggttttagcaatgaatttactgttggcggtaaactcgacacgttttgtggcagtcctccatacgcagcacctgagctcttccagggcaagaaatatgacgggccagaagtggatgtgtggagtctgggggtcattttatacacactagtcagtggctcacttccctttgatgggcaaaacctaaaggaactgagagagagagtattaagagggaaatacagaattcccttctacatgtctacagactgtgaaaaccttctcaaacgtttcctggtgctaaatccaattaaacgcggcactctagagcaaatcatgaaggacaggtggatcaatgcagggcatgaagaagatgaactcaaaccatttgttgaaccagagctagacatctcagaccaaaaaagaatagatattatggtgggaatgggatattcacaagaagaaattcaagaatctcttagtaagatgaaatacgatgaaatcacagctacatatttgttattggggagaaaatcttcagagctggatgctagtgattccagttctagcagcaatctttcacttgctaaggttaggccgagcagtgatctcaacaacagtactggccagtctcctcaccacaaagtgcagagaagtgttttttcaagccaaaagcaaagacgctacagtgaccatgctggaccagctattccttctgttgtggcgtatccgaaaaggagtcagaccagcactgcagatagtgacctcaaagaagatggaatttcctcccggaaatcaagtggcagtgctgttggaggaaagggaattgctccagccagtcccatgcttgggaatgcaagtaatcctaataaggcggatattcctgaacgcaagaaaagctccactgtccctagtagtaacacagcatctggtggaatgacacgacgaaatacttatgtttgcagtgagagaactacagctgatagacactcagtgattcagaatggcaaagaaaacagcactattcctgatcagagaactccagttgcttcaacacacagtatcagtagtgcagccaccccagatcgaatccgcttcccaagaggcactgccagtcgtagcactttccacggccagccccgggaacggcgaaccgcaacatataatggccctcctgcctctcccagcctgtcccatgaagccacaccattgtcccagactcgaagccgaggctccactaatctctttagtaaattaacttcaaaactcacaaggagtcgcaatgtatctgctgagcaaaaagatgaaaacaaagaagcaaagcctcgatccctacgcttcacctggagcatgaaaaccactagttcaatggatcccggggacatgatgcgggaaatccgcaaagtgttggacgccaataactgcgactatgagcagagggagcgcttcttgctcttctgcgtccacggagatgggcacgcggagaacctcgtgcagtgggaaatggaagtgtgcaagctgccaagactgtctctgaacggggtccggtttaagcggatatcggggacatccatagccttcaaaaatattgcttccaaaattgccaatgagctaaagctgtaacccagtgattatgatgtaaattaagtagcaattaaagtgttttcctgaacactgatggaaatgtatagaataatatttaggcaataacgtctgcatcttctaaatcatgaaattaaagtctgaggacgagagcacgcctgggagcgaaagctggccttttttctacgaatgcactacattaaagatgtgcaacctatgcgccccctgccctacttccgttaccctgagagtcggtgtgtggccccatctccatgtgcctcccgtctgggtgggtgtgagagtggacggtatgtgtgtgaagtggtgtatatggaagcatctccctacactggcagccagtcattactagtacctctgcgggagatcatccggtgctaaaacattacagttgccaaggaggaaaatactgaatgactgctaagaattaaccttaagaccagttcatagttaatacaggtttacagttcatgcctgtggttttgtgtttgttgttttgtgtttttttagtgcaaaaggtttaaatttatagttgtgaacattgcttgtgtgtgtttttctaagtagattcacaagataattaaaaattcactttttctcagtaaaa

SEQ ID NO: 127810 - DNA, 2969 bp, Artificial Sequence
  derived and/or modified sequence
gcagcggcggccagcagggcggaggctgaggcagcaagctcgctagagagggagaagcagtcgggcgcaggcgcctcctccgcagcccgctccatggtcggcgcccacagcccgcggcggcctgtcttgcgctccacttccttcacatcctcctccgcctcctcgttttcaggcgccgccggcggcgctgtgtggaggcccgcgagctgaaattcgcggtgcgacgggagggagtggagaaggaggtgagggggcccaggatcgcggggcgccctgaggcaaggggacgccggcgggccgaagcgcagcccgccgcccgcaggctcggctccgccactgccgccctcccggtctcctcgcctcggccgccgaggcagggagagaatgagccccgggacccgccgggggacggcccgggccaggcccgggatctagacggccgtagggggaagggagccgccctccccacggcgccttttcggaactgccgtggactcgaggacgctggtcgccggcctcctagggctgtgctgttttgttttgaccctcgcattgtgcagaattaaagtgcagtaaaatgtccactaggaccccattgccaacggtgaatgaacgagacactgaaaaccacacgtcacatggagatgggcgtcaagaagttacctctcgtaccagccgctcaggagctcggtgtagaaactctatagcctcctgtgcagatgaacaacctcacatcggaaactacagactgttgaaaacaatcggcaaggggaattttgcaaaagtaaaattggcaagacatatccttacaggcagagaggttgcaataaaaataattgacaaaactcagttgaatccaacaagtctacaaaagctcttcagagaagtaagaataatgaagattttaaatcatcccaatatagtgaagttattcgaagtcattgaaactgaaaaaacactctacctaatcatggaatatgcaagtggaggtgaagtatttgactatttggttgcacatggcaggatgaaggaaaaagaagcaagatctaaatttagacagggttgtcaagctggacagactattaaagttcaagtctcctttgatttgcttagtctgatgtttacatttattgtgtctgcagttcaatactgccatcagaaacggatcgtacatcgagacctcaaggctgaaaatctattgttagatgccgatatgaacattaaaatagcagatttcggttttagcaatgaatttactgttggcggtaaactcgacacgttttgtggcagtcctccatacgcagcacctgagctcttccagggcaagaaatatgacgggccagaagtggatgtgtggagtctgggggtcattttatacacactagtcagtggctcacttccctttgatgggcaaaacctaaaggaactgagagagagagtattaagagggaaatacagaattcccttctacatgtctacagactgtgaaaaccttctcaaacgtttcctggtgctaaatccaattaaacgcggcactctagagcaaatcatgaaggacaggtggatcaatgcagggcatgaagaagatgaactcaaaccatttgttgaaccagagctagacatctcagaccaaaaaagaatagatattatggtgggaatgggatattcacaagaagaaattcaagaatctcttagtaagatgaaatacgatgaaatcacagctacatatttgttattggggagaaaatcttcagagctggatgctagtgattccagttctagcagcaatctttcacttgctaaggttaggccgagcagtgatctcaacaacagtactggccagtctcctcaccacaaagtgcagagaagtgttttttcaagccaaaagcaaagacgctacagtgaccatgctggaccagctattccttctgttgtggcgtatccgaaaaggagtcagaccagcactgcagatagtgacctcaaagaagatggaatttcctcccggaaatcaagtggcagtgctgttggaggaaagggaattgctccagccagtcccatgcttgggaatgcaagtaatcctaataaggcggatattcctgaacgcaagaaaagctccactgtccctagtagtaacacagcatctggtggaatgacacgacgaaatacttatgtttgcagtgagagaactacagctgatagacactcagtgattcagaatggcaaagaaaacagcactattcctgatcagagaactccagttgcttcaacacacagtatcagtagtgcagccaccccagatcgaatccgcttcccaagaggcactgccagtcgtagcactttccacggccagccccgggaacggcgaaccgcaacatataatggccctcctgcctctcccagcctgtcccatgaagccacaccattgtcccagactcgaagccgaggctccactaatctctttagtaaattaacttcaaaactcacaaggagtcgcaatgtatctgctgagcaaaaagatgaaaacaaagaagcaaagcctcgatccctacgcttcacctggagcatgaaaaccactagttcaatggatcccggggacatgatgcgggaaatccgcaaagtgttggacgccaataactgcgactatgagcagagggagcgcttcttgctcttctgcgtccacggagatgggcacgcggagaacctcgtgcagtgggaaatggaagtgtgcaagctgccaagactgtctctgaacggggtccggtttaagcggatatcggggacatccatagccttcaaaaatattgcttccaaaattgccaatgagctaaagctgtaacccagtgattatgatgtaaattaagtagcaattaaagtgttttcctgaacactgatggaaatgtatagaataatatttaggcaataacgtctgcatcttctaaatcatgaaattaaagtctgaggacgagagc

SEQ ID NO: 127811 - DNA, 2190 bp, Artificial Sequence
  derived and/or modified sequence
atgagcacccggacccccctgcccaccgtgaacgagcgggacaccgaaaatcacacaagccatggtgacggtaggcaagaagtcacttctagaactagcaggagcggtgctaggtgtagaaattctatagccagctgcgctgatgaacaacctcatattggaaactacagactgctaaagacgattggcaaggggaactttgcaaaagtgaagttagcccgccatatcctgacaggccgagaagtcgctataaagattattgacaaaacccagctcaatccaacgtctctgcagaagctgttccgagaggtgaggatcatgaaaatcctcaatcatcctaacattgtcaaactgtttgaagtaatagagaccgagaaaactctttacctgattatggagtatgcctctggaggcgaagtgtttgattatcttgtggctcatggccgcatgaaggagaaagaggctcgctccaagtttcgacagattgtaagcgccgtgcagtactgtcatcagaagagaattgtgcacagggatttgaaagcagaaaacctgctgctcgacgctgacatgaacatcaaaatcgctgactttggtttcagcaacgaatttaccgtgggaggaaagctggacactttttgtgggagtccaccttacgctgcccctgaacttttccagggaaagaagtacgacggccccgaagtggatgtctggagtctgggtgtgattctctacacattggtgagcgggagcctccctttcgacggccaaaatttgaaggaactgagagaacgcgttctgcgtggtaaatacagaattcccttctacatgtccacagactgcgaaaacctccttaaaagattcctagtgctgaaccctatcaagcgcggtactctggagcagatcatgaaggaccgatggatcaatgccggccacgaggaggatgagttgaagcccttcgttgagcccgagcttgacatttcggaccagaagcggatcgacattatggtgggaatgggttatagccaggaagagatccaggagtctttaagcaagatgaagtatgacgagatcacagccacctacctgctcctcggacggaaaagcagcgagctggatgcaagcgactcctcctcatcgtctaacctttctttagcgaaggtgaggccctctagtgatctaaacaacagcaccgggcagagcccccatcacaaggtgcaacggtctgttttttcttctcaaaaacagcgccgttattcggaccacgcaggcccagcaattccatctgtagtggcctatccaaagcgcagccagacaagcaccgcagacagcgaccttaaagaagatggaatttccagtcgaaaatcatctggctctgccgtcggcggcaaaggcattgctcccgcgtcgccaatgttaggcaacgcgtctaacccgaacaaagcggacatccctgagagaaaaaagtcatctaccgtcccatcatcgaacacggcctcagggggcatgaccaggagaaatacgtatgtttgcagtgagaggacaaccgcagataggcacagcgtgattcagaatggcaaagagaattctacgatccctgaccagcggactccagtagccagcactcacagcatttcatcagcggcgaccccagaccgcattaggtttccgagagggaccgccagccgctccacgtttcacgggcagccacgcgaaagacgcacagcaacctataacggcccgccggcttccccgtccctctcgcatgaagccacacccctgtcccagacaaggagtcgggggagtacaaacctgttttccaagctgacctcaaagctcaccagatctcgcaacgtgtctgccgagcagaaggatgaaaacaaagaggctaagccgaggagcttgcgctttacttggagcatgaagaccacatcgtctatggaccccggagatatgatgagagaaattagaaaggtgctggatgccaataattgcgattacgagcagagagaaagatttctgctgttttgtgtccacggggacgggcacgccgaaaacttggttcagtgggaaatggaagtgtgcaagctgccgaggctttcgctcaatggagtgagatttaagcgtatctctgggacctcaattgcgtttaaaaatatcgcctccaagatcgctaacgagttgaagctgtag

SEQ ID NO: 127812 - DNA, 2259 bp, Artificial Sequence
  derived and/or modified sequence
atgagcacccggacccccctgcccaccgtgaacgagcgggacaccgaaaaccatacatcccacggagacggacgtcaagaggtgactagcagaacctcaagatccggcgcccggtgtcgtaactcaatcgcttcttgtgctgacgagcagcctcacatcggaaactaccggctcctgaagaccattggcaagggaaattttgctaaggtgaaactggccaggcacattcttaccggcagggaggttgccattaagattattgataagacgcaactgaacccaacctccttgcaaaagcttttccgggaggtccgcatcatgaaaattctcaatcacccgaacatcgtgaagctctttgaagtgatcgagaccgagaagactttgtacctaattatggaatacgcttccggaggcgaagtgttcgattacctagttgcacatggcagaatgaaggagaaggaggcacgctcaaagttccgccagggctgccaggccggacagactatcaaggtgcaggtgtccttcgatctgctgagcctcatgttcacctttatcgtttccgctgttcaatattgccaccagaagagaattgtccatagagatttgaaggcagagaacctcctcctggacgccgacatgaatattaaaattgccgattttgggttcagtaacgaattcaccgtagggggaaagcttgataccttttgtgggagtcccccctacgctgcaccagaactgttccagggcaaaaaatatgacgggccagaagtggatgtatggtctttgggggtgatcctgtacaccctagtgagcggttcattgcccttcgacggacaaaacctgaaagagctgcgcgaacgagtcctgcggggcaagtataggattccattctacatgagcactgattgcgaaaatcttctgaaacgattcctcgtccttaacccgatcaagagaggaactctggagcaaatcatgaaagatcgctggattaatgctggacacgaagaggatgagctcaagccattcgtagagccagaattggacatcagcgaccaaaaaaggattgatattatggtgggcatgggatactcacaagaggagattcaagaaagcctatcaaagatgaagtacgacgagatcacggccacgtatctcctgttgggaaggaagtcaagcgaactcgacgcctctgacagcagtagttcgtcaaacttaagtttggccaaggtgaggccgagctctgatctgaataattccactggacagtctccgcaccacaaggtacagaggtcggtgtttagtagccagaaacagaggaggtattcagaccacgctggccccgccatcccttccgttgtagcttacccaaagcgctcacagacttcaacagccgattccgacctcaaagaagatggcattagcagcagaaaatcctcaggtagtgcagtcggtgggaaaggaattgcaccggcaagtcccatgttgggaaacgccagcaacccaaataaagcggatatcccagagaggaaaaaaagtagcacagttccatcttctaacactgctagcggaggcatgacccgtagaaatacttacgtctgctcagagcggaccacagcagatcgccactctgtcatccaaaacggcaaggagaactcgaccatccctgaccaacggacacccgtggcctccacacactcaatcagcagcgccgcaaccccggacaggattcgttttcccagaggaactgcttctcgcagcacctttcatggccaacccagggaacgaaggacagccacatacaatgggcctcctgcaagtccgtctctctctcacgaagccactcctctctctcagacaagatctcgcgggtcaacaaatttgttcagcaagctaactagtaaactgactagaagtcgaaatgtctctgctgaacagaaggacgagaacaaggaagcaaagccacgtagccttaggttcacatggagcatgaaaactacttccagcatggacccaggtgatatgatgcgggaaatacggaaggtccttgatgcaaacaactgtgactacgagcagagagagcgctttctgctgttctgcgtacacggggatggtcacgcagagaatcttgtgcagtgggaaatggaggtgtgcaagctgccgcgcctaagtctgaacggggtaagattcaagcgcatttccgggacttcaatcgcttttaagaacattgcaagcaagattgcaaacgagttgaagctgtag

SEQ ID NO: 127813 - DNA, 2190 bp, Artificial Sequence
  derived and/or modified sequence
atgtccacaaggacccccctccctactgtgaacgaaagggatactgaaaaccatacatctcatggagacggccgtcaagaagttacatctcggacctcacggagcggcgctagatgtagaaattccattgctagctgtgctgacgagcaaccccacattggtaattaccgcctattgaaaaccatcggaaaaggaaatttcgccaaggtgaagctggccagacacatcctgactggcagggaagttgctatcaagattattgataagactcaactcaacccaactagtcttcagaaactattccgagaggtgcggatcatgaaaattctgaatcaccccaacattgtgaagctatttgaggtgatcgaaacagagaaaacgctttatctgataatggagtatgcatcagggggtgaggtgttcgactatctggtggctcatgggaggatgaaagaaaaggaagctagaagcaagtttaggcagatagtttcagctgtgcagtattgtcaccaaaaaaggatagtccaccgagacctcaaagcagagaatttgctgttagacgccgatatgaacataaaaatagccgactttggtttttctaacgagtttacggtgggcggaaagcttgacaccttctgcggatcacctccatacgccgcacctgaactatttcagggcaaaaagtatgacggtccagaagtggatgtttggtcgctaggtgtcatactatacacattggtgagtggatccctgccttttgatgggcagaatctcaaggaactgcgcgaacgggtcttgcgcggaaagtatcggatccccttttacatgtccacggactgcgagaacctcctgaaaaggttcctggtgctgaacccaatcaaacgtgggacgctggaacagattatgaaggatcgttggatcaacgcaggccatgaagaggatgagttgaagccgttcgtggaaccagagttggatatcagtgaccaaaaaaggatcgatatcatggtgggcatgggatactcccaggaagagattcaggagtcattgtccaagatgaaatacgacgagattaccgccacctatctactgctcggcaggaagagcagcgaactggacgcaagtgatagttctagttcatcaaatctatctctcgccaaagtccgcccttccagcgatctgaataactcaaccggacaaagccctcaccataaagtgcagaggtcagtcttttcctctcaaaaacagagacgttatagcgaccacgctggccctgccatcccatccgtggtggcctatcctaaaagatcacagacaagcacagccgactcagatctcaaagaggatggcatctcgtcccgcaagagcagtgggtccgctgtggggggaaagggaatcgcccctgcctctcccatgctgggcaacgcctcaaacccaaacaaagctgatattcccgagagaaagaagtcgtccacagtaccctccagtaacaccgctagcggcggtatgaccaggagaaacacttacgtatgtagtgaaagaaccaccgctgatcgccatagtgtcattcagaacggtaaagagaacagtaccatccctgaccagcgtacaccagtcgcaagcacacactcaatcagctccgcagccaccccggatagaatccgctttcctcgcggaacagcctcgaggtcaacctttcacggacagcctcgagagcgcaggactgcgacctataacggtcccccagccagcccctcactgagtcatgaagctactccactgtcccagacccgaagccgaggctctacaaatttgttcagcaagttaacaagcaagttgacccgatcgaggaatgtgtcagctgagcagaaagatgagaacaaggaggccaagccccgatcactaagatttacttggagcatgaaaaccacttcttctatggaccctggagatatgatgcgagagatccgaaaagtcctcgatgctaacaactgtgattatgagcagagagaacgattcctgctgttctgcgtgcacggggacggccatgccgaaaaccttgtccagtgggagatggaagtgtgtaagctgccgagactcagcctcaatggcgtccggtttaaaagaatctctggcacatctatcgcattcaagaacattgctagtaagattgcgaacgaacttaaactgtag

SEQ ID NO: 127814 - DNA, 2259 bp, Artificial Sequence
  derived and/or modified sequence
atgagcacccgcacccccctcccaacggtgaatgaaagagacacagagaatcacacctctcatggcgacggaagacaggaggttacctcccgcacctcgcgatccggtgcgcgatgcaggaactcaatcgcctcctgcgctgatgagcaacctcatatagggaattataggcttctgaagacgatcggtaagggcaacttcgcaaaagtgaaactggcacgtcatatcctgaccgggagagaggttgccattaagattatagataagacgcagctcaatcccacctctctgcagaaactttttcgggaggtgagaattatgaagatcctcaatcatcctaacatcgtgaagctgtttgaagtcatcgaaacagaaaagactctctacctgattatggaatacgcctccggtggtgaagtctttgactatttagtcgcacacgggcgaatgaaggaaaaagaggcgagaagcaagttccggcagggctgccaagctggacagacgataaaagtgcaggtgagttttgatttgctatcactgatgtttacctttattgtgagcgctgttcagtactgccaccaaaagcgaattgtgcatcgcgatttaaaggccgagaacctccttttggatgccgatatgaacatcaagattgcagatttcggcttcagcaacgaattcactgtagggggaaaactggacaccttctgtggctcacctccatatgccgctcctgaattgttccagggcaagaagtacgacggacccgaggtggacgtttggtctctgggggtgatcctctacacccttgtgtcaggatcattgccattcgacgggcaaaacttaaaagagcttcgtgaacgcgtgttgcgcggaaagtatcgtattcctttttatatgtcaaccgactgtgaaaatctgctcaaacggttcctcgttcttaaccctatcaagcgtggcacgctagaacagattatgaaagatcgatggatcaatgctggccatgaagaagacgagcttaagccattcgtagagcccgagctggacatctcagaccagaaaagaatagacattatggtgggcatggggtactcacaggaggaaatccaggagtccctcagtaagatgaagtacgatgagatcacagccacatacctgttgctgggtcgaaagtcttccgagctagacgctagtgatagcagctcctcatcaaatctgtctctggctaaggtgagacctagttccgatctaaacaactccactggccagagtccccatcacaaggttcagagaagtgttttctcgtcccagaagcagaggaggtacagcgatcacgcaggtcctgccattcccagtgtcgtggcatatcctaagaggtcacagactagcaccgccgattccgatctgaaagaagatggtatttcttcaagaaagtccagcggctccgcagttggcggaaaaggaattgcgccagcctctccaatgctcggcaacgcatctaaccccaacaaagccgatattcccgagcgcaagaaatcatccacagtgccgtcttcaaacactgcctccggcggaatgaccaggcgcaacacatacgtatgttccgagcgaaccacagccgaccgccacagcgttattcagaacgggaaagaaaactccacgattcccgaccagcggactccagtcgcaagtacccattctattagttctgctgcaacccccgatcggatccggttcccccgaggcaccgctagccggtcgacttttcacggccagccgagagagcgcagaaccgcgacttacaatggtccccctgcttccccttccctttcccatgaagcaacgcccctgagccagactagatcccgaggcagcaccaacttgttctctaaattgacctccaagttgaccagaagtcggaatgtctccgcggaacagaaggacgagaacaaagaggcgaagccaagatctttgcggtttacatggagcatgaagaccaccagctccatggatccaggcgatatgatgagagagataaggaaggtgctggatgcgaataattgcgattatgagcagcgggagagatttcttctcttctgcgttcacggagacggccacgccgaaaacctggtccaatgggaaatggaagtttgtaagttgcctaggctgtccctgaacggcgtcaggttcaagcgcatctccggtacatcgatcgcgtttaagaacatcgcttcaaagattgccaacgagctgaaactgtag

SEQ ID NO: 127815 - DNA, 2190 bp, Artificial Sequence
  derived and/or modified sequence
atgagcaccagaacccccctgcccaccgtgaacgagagagacaccgagaaccacaccagccacggcgacggcagacaggaggtgaccagcagaaccagcagaagcggcgccagatgcagaaacagcatcgccagctgcgccgacgagcagccccacatcggcaactacagactgctgaagaccatcggcaagggcaacttcgccaaggtgaagctggccagacacatcctgaccggcagagaggtggccatcaagatcatcgacaagacccagctgaaccccaccagcctgcagaagctgttcagagaggtgagaatcatgaagatcctgaaccaccccaacatcgtgaagctgttcgaggtgatcgagaccgagaagaccctgtacctgatcatggagtacgccagcggcggcgaggtgttcgactacctggtggcccacggcagaatgaaggagaaggaggccagaagcaagttcagacagatcgtgagcgccgtgcagtactgccaccagaagagaatcgtgcacagagacctgaaggccgagaacctgctgctggacgccgacatgaacatcaagatcgccgacttcggcttcagcaacgagttcaccgtgggcggcaagctggacaccttctgcggcagccccccctacgccgcccccgagctgttccagggcaagaagtacgacggccccgaggtggacgtgtggagcctgggcgtgatcctgtacaccctggtgagcggcagcctgcccttcgacggccagaacctgaaggagctgagagagagagtgctgagaggcaagtacagaatccccttctacatgagcaccgactgcgagaacctgctgaagagattcctggtgctgaaccccatcaagagaggcaccctggagcagatcatgaaggacagatggatcaacgccggccacgaggaggacgagctgaagcccttcgtggagcccgagctggacatcagcgaccagaagagaatcgacatcatggtgggcatgggctacagccaggaggagatccaggagagcctgagcaagatgaagtacgacgagatcaccgccacctacctgctgctgggcagaaagagcagcgagctggacgccagcgacagcagcagcagcagcaacctgagcctggccaaggtgagacccagcagcgacctgaacaacagcaccggccagagcccccaccacaaggtgcagagaagcgtgttcagcagccagaagcagagaagatacagcgaccacgccggccccgccatccccagcgtggtggcctaccccaagagaagccagaccagcaccgccgacagcgacctgaaggaggacggcatcagcagcagaaagagcagcggcagcgccgtgggcggcaagggcatcgcccccgccagccccatgctgggcaacgccagcaaccccaacaaggccgacatccccgagagaaagaagagcagcaccgtgcccagcagcaacaccgccagcggcggcatgaccagaagaaacacctacgtgtgcagcgagagaaccaccgccgacagacacagcgtgatccagaacggcaaggagaacagcaccatccccgaccagagaacccccgtggccagcacccacagcatcagcagcgccgccacccccgacagaatcagattccccagaggcaccgccagcagaagcaccttccacggccagcccagagagagaagaaccgccacctacaacggcccccccgccagccccagcctgagccacgaggccacccccctgagccagaccagaagcagaggcagcaccaacctgttcagcaagctgaccagcaagctgaccagaagcagaaacgtgagcgccgagcagaaggacgagaacaaggaggccaagcccagaagcctgagattcacctggagcatgaagaccaccagcagcatggaccccggcgacatgatgagagagatcagaaaggtgctggacgccaacaactgcgactacgagcagagagagagattcctgctgttctgcgtgcacggcgacggccacgccgagaacctggtgcagtgggagatggaggtgtgcaagctgcccagactgagcctgaacggcgtgagattcaagagaatcagcggcaccagcatcgccttcaagaacatcgccagcaagatcgccaacgagctgaagctgtag

SEQ ID NO: 127816 - DNA, 2259 bp, Artificial Sequence
  derived and/or modified sequence
atgagcaccagaacccccctgcccaccgtgaacgagagagacaccgagaaccacaccagccacggcgacggcagacaggaggtgaccagcagaaccagcagaagcggcgccagatgcagaaacagcatcgccagctgcgccgacgagcagccccacatcggcaactacagactgctgaagaccatcggcaagggcaacttcgccaaggtgaagctggccagacacatcctgaccggcagagaggtggccatcaagatcatcgacaagacccagctgaaccccaccagcctgcagaagctgttcagagaggtgagaatcatgaagatcctgaaccaccccaacatcgtgaagctgttcgaggtgatcgagaccgagaagaccctgtacctgatcatggagtacgccagcggcggcgaggtgttcgactacctggtggcccacggcagaatgaaggagaaggaggccagaagcaagttcagacagggctgccaggccggccagaccatcaaggtgcaggtgagcttcgacctgctgagcctgatgttcaccttcatcgtgagcgccgtgcagtactgccaccagaagagaatcgtgcacagagacctgaaggccgagaacctgctgctggacgccgacatgaacatcaagatcgccgacttcggcttcagcaacgagttcaccgtgggcggcaagctggacaccttctgcggcagccccccctacgccgcccccgagctgttccagggcaagaagtacgacggccccgaggtggacgtgtggagcctgggcgtgatcctgtacaccctggtgagcggcagcctgcccttcgacggccagaacctgaaggagctgagagagagagtgctgagaggcaagtacagaatccccttctacatgagcaccgactgcgagaacctgctgaagagattcctggtgctgaaccccatcaagagaggcaccctggagcagatcatgaaggacagatggatcaacgccggccacgaggaggacgagctgaagcccttcgtggagcccgagctggacatcagcgaccagaagagaatcgacatcatggtgggcatgggctacagccaggaggagatccaggagagcctgagcaagatgaagtacgacgagatcaccgccacctacctgctgctgggcagaaagagcagcgagctggacgccagcgacagcagcagcagcagcaacctgagcctggccaaggtgagacccagcagcgacctgaacaacagcaccggccagagcccccaccacaaggtgcagagaagcgtgttcagcagccagaagcagagaagatacagcgaccacgccggccccgccatccccagcgtggtggcctaccccaagagaagccagaccagcaccgccgacagcgacctgaaggaggacggcatcagcagcagaaagagcagcggcagcgccgtgggcggcaagggcatcgcccccgccagccccatgctgggcaacgccagcaaccccaacaaggccgacatccccgagagaaagaagagcagcaccgtgcccagcagcaacaccgccagcggcggcatgaccagaagaaacacctacgtgtgcagcgagagaaccaccgccgacagacacagcgtgatccagaacggcaaggagaacagcaccatccccgaccagagaacccccgtggccagcacccacagcatcagcagcgccgccacccccgacagaatcagattccccagaggcaccgccagcagaagcaccttccacggccagcccagagagagaagaaccgccacctacaacggcccccccgccagccccagcctgagccacgaggccacccccctgagccagaccagaagcagaggcagcaccaacctgttcagcaagctgaccagcaagctgaccagaagcagaaacgtgagcgccgagcagaaggacgagaacaaggaggccaagcccagaagcctgagattcacctggagcatgaagaccaccagcagcatggaccccggcgacatgatgagagagatcagaaaggtgctggacgccaacaactgcgactacgagcagagagagagattcctgctgttctgcgtgcacggcgacggccacgccgagaacctggtgcagtgggagatggaggtgtgcaagctgcccagactgagcctgaacggcgtgagattcaagagaatcagcggcaccagcatcgccttcaagaacatcgccagcaagatcgccaacgagctgaagctgtag

SEQ ID NO: 127817 - protein, 325 aa, Artificial Sequence
  derived and/or modified sequence
MDGSNVTSFVVEEPTNISTGRNASVGNAHRQIPIVHWVIMSISPVGFVENGILLWFLCFRMRRNPFTVYITHLSIADISLLFCIFILSIDYALDYELSSGHYYTIVTLSVTFLFGYNTGLYLLTAISVERCLSVLYPIWYRCHRPKYQSALVCALLWALSCLVTTMEYVMCIDREEESHSRNDCRAVIIFIAILSFLVFTPLMLVSSTILVVKIRKNTWASHSSKLYIVIMVTIIIFLIFAMPMRLLYLLYYEYWSTFGNLHHISLLFSTINSSANPFIYFFVGSSKKKRFKESLKVVLTRAFKDEMQPRRQKDNCNTVTVETVV

SEQ ID NO: 127818 - DNA, 978 bp, Artificial Sequence
  derived and/or modified sequence
atggacggctccaacgtgacgtcatttgtggtggaagaaccaacaaatataagtactggtcggaatgcctccgttggaaacgcccacaggcagatacccatcgtgcattgggtcattatgtccatttcaccagtcggtttcgtcgagaatggcatcctactttggtttctctgctttaggatgagaagaaacccgttcaccgtgtacattactcacctttctattgctgacataagtttgctattttgcattttcatcctttctattgattacgctctagattatgaactcagtagtgggcactattacacaattgtcactctcagcgttacgtttctatttggatacaacacaggtttgtatcttctgacagctatatcggttgaacgatgcctgtctgttttgtatcctatctggtaccgttgccaccgcccgaagtaccagtctgcccttgtttgcgcactgctgtgggccctgtcatgtttggtgaccaccatggaatacgtgatgtgtatcgatcgggaagaagaaagtcatagccggaatgattgccgagccgtgatcatttttatcgccatcctgtccttcctcgtgttcacacctttaatgttagtgagctccacaatcctagtggttaaaattagaaaaaatacctgggcaagccactcgtctaaactgtacatagtgattatggttaccatcattatctttctgatcttcgctatgcccatgaggctgctctacttgctgtattatgagtactggtctactttcggcaacctgcatcatattagtctgctatttagcactatcaatagctccgcaaacccgtttatctatttctttgtggggtcatcaaagaagaagaggttcaaggagtctctgaaggtcgtcctgactcgggcattcaaagacgagatgcagcctcggcgtcagaaggataactgcaatactgttactgtggaaaccgtggtttag

SEQ ID NO: 127819 - DNA, 978 bp, Artificial Sequence
  derived and/or modified sequence
atggatggcagcaatgtgaccagctttgtggtggaggagcccaccaacatcagcactggaagaaatgcctctgtgggcaatgcccaccggcagatccccatcgtgcactgggtgatcatgagcatcagccctgtgggctttgtggagaatggcatcctgctgtggttcctgtgcttcaggatgagaagaaaccccttcaccgtgtacatcacccacctgagcattgctgacatcagcctgctcttctgcatcttcatcctgagcattgattatgccctggactatgagctgagcagcggccactactacaccatcgtgaccctgtctgtgaccttcctgtttggctacaacacaggcctgtacctgctgacagccatctctgtggagcgctgcctgtctgtgctgtaccccatctggtaccgctgccaccggcccaagtaccagagcgccctggtgtgtgccctgctgtgggccctgagctgcctggtgaccaccatggagtatgtgatgtgcatcgaccgggaggaggagagccacagcagaaatgactgccgggccgtcatcatcttcatcgccatcctgtccttcctggtgttcacccccctgatgctggtgagcagcaccatcctggtggtgaagatcaggaagaacacctgggccagccacagcagcaagctgtacatcgtcatcatggtgaccatcatcatcttcctgatctttgccatgcccatgaggctgctgtacctgctgtactatgagtactggagcaccttcggcaacctgcaccacatcagcctgctcttcagcaccatcaacagcagcgccaaccccttcatctacttctttgtgggcagcagcaagaagaagcgcttcaaggagagcctgaaggtggtgctgacccgggccttcaaggatgagatgcagccccggcggcagaaggacaactgcaacacagtgacagtggagaccgtggtgtag

SEQ ID NO: 127820 - DNA, 1135 bp, Artificial Sequence
  derived and/or modified sequence
cctgaggcctcctcatggatgggtcaaacgtgacatcatttgttgttgaggaacccacgaacatctcaactggcaggaacgcctcagtcgggaatgcacatcggcaaatccccatcgtgcactgggtcattatgagcatctccccagtggggtttgttgagaatgggattctcctctggttcctgtgcttccggatgagaagaaatcccttcactgtctacatcacccacctgtctatcgcagacatctcactgctcttctgtattttcatcttgtctatcgactatgctttagattatgagctttcttctggccattactacacaattgtcacattatcagtgacttttctgtttggctacaacacgggcctctatctgctgacggccattagtgtggagaggtgcctgtcagtcctttaccccatctggtaccgatgccatcgccccaagtaccagtcggcattggtctgtgcccttctgtgggctctttcttgcttggtgaccaccatggagtatgtcatgtgcatcgacagagaagaagagagtcactctcggaatgactgccgagcagtcatcatctttatagccatcctgagcttcctggtcttcacgcccctcatgctggtgtccagcaccatcttggtcgtgaagatccggaagaacacgtgggcttcccattcctccaagctttacatagtcatcatggtcaccatcattatattcctcatcttcgctatgcccatgagactcctttacctgctgtactatgagtattggtcgacctttgggaacctacaccacatttccctgctcttctccacaatcaacagtagcgccaaccctttcatttacttctttgtgggaagcagtaagaagaagagattcaaggagtccttaaaagttgttctgaccagggctttcaaagatgaaatgcaacctcggcgccagaaagacaattgtaatacggtcacagttgagactgtcgtctaagaactgtgagggaagttgtggataaaaatggtggaacacaggtcatttttagtttgtgcttggaatatgacttaagtatctcctaaatgtgatacagaagaacatctcatcccatatgcatgagatactaattaatgatgaaa

SEQ ID NO: 127821 - DNA, 978 bp, Artificial Sequence
  derived and/or modified sequence
atggacggcagcaacgtgaccagcttcgtggtggaggagcccaccaatatttccactggacggaatgcctctgtcggcaatgcgcacagacagatccctatcgtgcactgggtcattatgagtataagtcctgtgggttttgtggagaatggtattctgctctggtttttgtgctttagaatgaggcgcaatccctttactgtctacatcacgcatctctccattgctgacatctctctgctgttttgtatattcattctttccatcgactatgccctagattatgaactgagctccggtcattactacactattgtgacattgtctgtgacatttctatttggatacaataccggtctatacctgcttaccgccatttccgtcgagcgttgcttaagtgtgctttacccaatatggtacagatgccaccgccccaagtaccagagcgcactggtatgcgcccttctgtgggccctctcttgtctggttaccacaatggagtacgtgatgtgcatcgaccgagaggaagagagccacagccgtaacgattgtcgagccgtgatcatcttcattgcgattttgagctttctcgtgttcacccccctgatgctcgttagtagcaccatacttgtggtgaaaatccgtaagaatacctgggccagccatagttccaagctgtacattgttatcatggtgacgataatcatttttctgatctttgccatgcctatgagactgctctatctcctttattacgagtattggagcacatttggtaatcttcatcatatctctttgctgttctctactatcaattcctctgcaaaccccttcatttatttcttcgtcggctctagtaaaaagaagagattcaaagaatccctcaaggtcgttctcacacgggccttcaaggatgaaatgcagcctagaagacaaaaggacaactgtaacactgtgaccgttgagactgtggtctag

SEQ ID NO: 127822 - DNA, 978 bp, Artificial Sequence
  derived and/or modified sequence
atggatgggtccaacgtcaccagtttcgtggtggaggagcctacaaatatttctactgggaggaacgcatctgttggtaatgcccaccgccagattccaattgtgcactgggtgattatgtctatttcccccgtgggattcgtggaaaatgggatccttctatggttcctctgcttccgaatgaggcggaaccccttcaccgtgtatatcacccatctatcgatcgcagatatatccttgctcttctgcatatttatcctcagcatagattacgccttggattacgaactctcatccggccactattacacaatcgtaactctgtccgtgacgttcctctttggctacaacacgggtttatatctccttaccgccatatccgttgaaagatgtctgagcgtcctttacccgatctggtaccgttgccatagacctaaatatcagagtgccctggtttgtgctctgctgtgggccctcagctgtttggtcacgaccatggagtacgtgatgtgtatagaccgtgaggaggaaagccacagtcgcaatgactgcagagccgtgattatcttcattgctattctctcttttctcgttttcacccccctcatgctggtgtcttccacaatcctggtggtgaagatacgaaaaaatacatgggcctctcactccagcaaactgtacattgtcatcatggtgacaatcattattttccttatcttcgccatgcccatgagactcctctacctcctatattatgagtactggtcgacattcggtaatttgcatcacattagcttgcttttcagtaccattaattctagcgccaatcctttcatctatttttttgtgggcagctctaaaaaaaaaagatttaaggaaagcctcaaagtagtgttgacccgggcttttaaagacgaaatgcaacccagacgccagaaagacaattgcaatactgtcaccgtggagacagtcgtctag

SEQ ID NO: 127823 - DNA, 978 bp, Artificial Sequence
  derived and/or modified sequence
atggacggcagcaacgtgaccagcttcgtggtggaggagcccaccaacatcagcaccggcagaaacgccagcgtgggcaacgcccacagacagatccccatcgtgcactgggtgatcatgagcatcagccccgtgggcttcgtggagaacggcatcctgctgtggttcctgtgcttcagaatgagaagaaaccccttcaccgtgtacatcacccacctgagcatcgccgacatcagcctgctgttctgcatcttcatcctgagcatcgactacgccctggactacgagctgagcagcggccactactacaccatcgtgaccctgagcgtgaccttcctgttcggctacaacaccggcctgtacctgctgaccgccatcagcgtggagagatgcctgagcgtgctgtaccccatctggtacagatgccacagacccaagtaccagagcgccctggtgtgcgccctgctgtgggccctgagctgcctggtgaccaccatggagtacgtgatgtgcatcgacagagaggaggagagccacagcagaaacgactgcagagccgtgatcatcttcatcgccatcctgagcttcctggtgttcacccccctgatgctggtgagcagcaccatcctggtggtgaagatcagaaagaacacctgggccagccacagcagcaagctgtacatcgtgatcatggtgaccatcatcatcttcctgatcttcgccatgcccatgagactgctgtacctgctgtactacgagtactggagcaccttcggcaacctgcaccacatcagcctgctgttcagcaccatcaacagcagcgccaaccccttcatctacttcttcgtgggcagcagcaagaagaagagattcaaggagagcctgaaggtggtgctgaccagagccttcaaggacgagatgcagcccagaagacagaaggacaactgcaacaccgtgaccgtggagaccgtggtgtag

SEQ ID NO: 127824 - protein, 508 aa, Artificial Sequence
  derived and/or modified sequence
MQGHFPAERREGRPRRGTRGQQQLLVSPRFLRAWHPPPVSARMPTRRWAPGTQCITKCEHTRPKPGELAFRKGDVVTILEACENKSWYRVKHHTSGQEGLLAAGALREREALSADPKLSLMPWFHGKISGQEAVQQLQPPEDGLFLVRESARHPGDYVLCVSFGRDVIHYRVLHRDGHLTIDEAVFFCNLMDMVEHYSKDKGAICTKLVRPKRKHGTKSAEEELARAGWLLNLQHLTLGAQIGEGEFGAVLQGEYLGQKVAVKNIKCDVTAQAFLDETAVMTKMQHENLVRLLGVILHQGLYIVMEHVSKGNLVNFLRTRGRALVNTAQLLQFSLHVAEGMEYLESKKLVHRDLAARNILVSEDLVAKVSDFGLAKAERKGLDSSRLPVKWTAPEALKHGKFTSKSDVWSFGVLLWEVFSYGRAPYPKMSLKEVSEAVEKGYRMEPPEGCPGPVHVLMSSCWEAEPARRPPFRKLAEKLARELRSAGAPASVSGQDADGSTSPRSQEP

SEQ ID NO: 127825 - DNA, 1527 bp, Artificial Sequence
  derived and/or modified sequence
atgcaggggcatttccctgcggagcgacgagaaggtcggcctaggcgggggacccggggccagcagcaacttctggtttcccctcgtttcctgcgggcttggcatcccccccccgtctccgctagaatgcccacccgcagatgggcccctggaacccaatgtatcaccaaatgtgaacatacccgtcctaagccgggcgagttagccttcagaaaaggagatgtcgtgaccatactggaggcctgcgagaacaagtcctggtatcgggtaaagcatcacacttcaggccaggaggggcttctcgccgcaggggccctaagagagagggaggcactgtccgccgaccccaagctgagtttgatgccttggtttcacggtaaaatttccggacaggaggccgtgcagcagttgcagcccccggaggacggactgtttctggtccgcgagtctgctcgacaccccggggactacgttctgtgcgttagctttggacgcgacgttatccactaccgcgtgctgcatagggacggacatctgaccattgacgaggccgtattcttctgtaacttgatggacatggtcgaacactactcgaaggataagggggctatttgcactaaacttgtacggcccaaacgcaagcatggcaccaagagtgcggaggaagaactcgctagagcgggatggctcctcaacctgcaacacctgactctaggggcacaaattggagagggggaatttggagcggtgctgcagggcgaatatctgggacagaaggtcgccgtcaagaatatcaagtgcgatgtaaccgcccaggccttccttgatgaaactgccgtgatgacaaagatgcagcatgagaatctggtacgcttgctcggagtcatcctgcaccaaggactatatatcgttatggagcatgtttcgaaagggaatttggtgaactttttacggactagaggcagagccctcgtcaacacagcccaactgctccaattttctctgcacgtggctgagggtatggagtatcttgagtctaaaaagttggtccacagagatctcgctgcacgcaatattttggtgagcgaggatctcgtagccaaggtctctgactttggcttggctaaggccgagcgtaagggcttggactccagtcgactgcccgtcaaatggacagcacccgaggccctaaaacatggaaaattcacgtccaagtctgacgtctggtctttcggcgtgcttctgtgggaagtgtttagttatggtcgtgccccctatccaaagatgtcactgaaggaggtttcagaggcagtggagaagggctataggatggagccacctgaaggctgtcctggccctgtgcatgtattaatgtcttcatgttgggaagctgagcccgccagaagaccaccatttcggaaactggcagagaaactggcccgcgaacttaggtccgcaggtgcccccgcctccgtatcaggtcaggacgcggacggatccactagccctcgatcacaagagccttag

SEQ ID NO: 127826 - DNA, 1527 bp, Artificial Sequence
  derived and/or modified sequence
atgcagggccacttccctgctgagcggcgggagggccggccccggcggggcacccggggccagcagcagctgctggtgagcccccgcttcctgcgggcctggcaccccccacctgtgtctgccaggatgcccacccggcgctgggcccctggcacccagtgcatcaccaagtgtgagcacacccggcccaagccaggagagctggccttcagaaaaggagatgtggtgaccatcctggaggcctgtgagaacaagtcctggtacagagtgaagcaccacaccagcggccaggagggcctgctggccgccggggccctgcgggagcgggaggccctgtctgctgaccccaagctgagcctgatgccctggttccacggcaagatcagcggccaggaggccgtgcagcagctgcagcccccagaagatggcctcttcctggtgcgggagagcgcccggcaccctggggactatgtgctgtgtgtgtcctttggaagagatgtgatccactacagagtgctgcacagagatggccacctgaccattgatgaggccgtgttcttctgcaacctgatggacatggtggagcactacagcaaggacaagggggccatctgcaccaagctggtgcggcccaagaggaagcacggcaccaagtctgctgaggaggagctggcccgggccggctggctgctgaacctgcagcacctgaccctgggcgcccagatcggggagggggagtttggagctgtgctgcagggcgagtacctgggccagaaggtggccgtgaagaacatcaagtgtgatgtgacagcccaggccttcctggatgaaacagctgtgatgaccaagatgcagcacgagaacctggtgcggctgctgggcgtcatcctgcaccagggcctgtacatcgtgatggagcacgtgtccaagggcaacctggtgaacttcctgcggacccggggccgggccctggtgaacacagcccagctgctgcagttcagcctgcacgtggccgagggcatggagtacctggagagcaagaagctggtgcaccgggacctggccgccaggaacatcctggtgtctgaggacctggtggccaaggtgtctgactttggcctggccaaggccgagaggaagggcctggacagcagccggctgcctgtgaagtggacagcccctgaggccctgaagcacggcaagttcaccagcaagagtgatgtgtggagctttggagtgctgctgtgggaggtgttctcctatggccgggccccctaccccaagatgagcctgaaggaggtgtctgaggccgtggagaagggctacaggatggagcccccagagggctgccccggccctgtgcacgtgctgatgagcagctgctgggaggccgagcccgcccggcggccccccttcaggaagctggccgagaagctggcccgggagctgcggtctgctggggccccagcctctgtgtctggccaggatgctgatggcagcaccagccccaggagccaggagccctag

SEQ ID NO: 127827 - DNA, 2078 bp, Artificial Sequence
  derived and/or modified sequence
agcaaaatcaagcagttggttagcgaagggattcggtgcagatggatggaccgtctgggctgcggagtccacgggcctgaaacgcggtcgctcctgacccgtcctccgcaaccctcgtcccaccaggccgcggttcccggagcaggccggcgggtggcaggaagacaccaggctgcagggggctggagaagcaacacccctctccctccccgccagagaactggagcgcggggacctcggttgcggatgctagctgcgagccgggttgctaggcgacatcgagagaggaagaggagaaagtcttcatggggtgctagagcatcttaaatgtccctctcatgcagggacatttccctgctgaacgaagagaaggcagacctcggcgagggacccgtggtcagcagcagcttctggtgagcccccgcttcctccgagcctggcacccccctcccgtctcagccaggatgccaacgaggcgctgggccccgggcacccagtgtatcaccaaatgcgagcacacccgccccaagccaggggagctggccttccgcaagggcgacgtggtcaccatcctggaggcctgcgagaacaagagctggtaccgcgtcaagcaccacaccagtggacaggaggggctgctggcagctggggcgctgcgggagcgggaggccctctccgcagaccccaagctcagcctcatgccgtggttccacgggaagatctcgggccaggaggctgtccagcagctgcagcctcccgaggatgggctgttcctggtgcgggagtccgcgcgccaccccggcgactacgtcctgtgcgtgagctttggccgcgacgtcatccactaccgcgtgctgcaccgcgacggccacctcacaatcgatgaggccgtgttcttctgcaacctcatggacatggtggagcattacagcaaggacaagggcgctatctgcaccaagctggtgagaccaaagcggaaacacgggaccaagtcggccgaggaggagctggccagggcgggctggttactgaacctgcagcatttgacattgggagcacagatcggagagggagagtttggagctgtcctgcagggtgagtacctggggcaaaaggtggccgtgaagaatatcaagtgtgatgtgacagcccaggccttcctggacgagacggccgtcatgacgaagatgcaacacgagaacctggtgcgtctcctgggcgtgatcctgcaccaggggctgtacattgtcatggagcacgtgagcaagggcaacctggtgaactttctgcggacccggggtcgagccctcgtgaacaccgctcagctcctgcagttttctctgcacgtggccgagggcatggagtacctggagagcaagaagcttgtgcaccgcgacctggccgcccgcaacatcctggtctcagaggacctggtggccaaggtcagcgactttggcctggccaaagccgagcggaaggggctagactcaagccggctgcccgtcaagtggacggcgcccgaggctctcaaacacgggaagttcaccagcaagtcggatgtctggagttttggggtgctgctctgggaggtcttctcatatggacgggctccgtaccctaaaatgtcactgaaagaggtgtcggaggccgtggagaaggggtaccgcatggaaccccccgagggctgtccaggccccgtgcacgtcctcatgagcagctgctgggaggcagagcccgcccgccggccacccttccgcaaactggccgagaagctggcccgggagctacgcagtgcaggtgccccagcctccgtctcagggcaggacgccgacggctccacctcgccccgaagccaggagccctgaccccacccggtggggcccttggccccagaggaccgagagagtggagagtgcggcgtgggggcactgaccaggcccaaggagggtccaggcgggcaagtcatcctcctggtgcccacagcaggggctggcccacgtagggggctctgggcggcccgtggacaccccagacctgcgaaggatgatcgcccgataaagacggattctaaggactct

SEQ ID NO: 127828 - DNA, 1527 bp, Artificial Sequence
  derived and/or modified sequence
atgcagggccacttccccgccgagcggcgggagggccggccccggagaggtacccggggccaacagcagcttcttgtaagtccaaggtttctccgggcttggcatccccctcccgtcagcgcaaggatgccaactcgtcgctgggcccccggaacacagtgcattactaagtgcgaacacacccgacccaaacctggagaattggcatttcggaaaggcgacgtggtaacaattcttgaggcgtgcgaaaataagtcgtggtaccgcgtaaagcatcatacctctgggcaggagggcctgctggccgctggcgcccttagggagcgcgaagcactgagcgccgatcccaagttgtctctaatgccgtggttccacggaaagatttcagggcaggaggcagttcaacagctgcaaccgcccgaagatggcctgtttcttgtgcgagaatccgctagacatccaggcgactacgtgttgtgcgtgagctttgggagggacgtcatacattacagggtactccatcgggacggacacctgacgattgatgaggccgtgttcttttgcaacctgatggacatggtggaacactactctaaagacaagggcgccatttgcaccaagctggtgcgccctaagcgtaagcacgggacaaagagtgccgaggaggaactggcccgggctgggtggctactgaacctgcagcacctgaccttaggggcccaaatcggcgaaggcgagtttggcgctgtcctccagggtgaatacttggggcagaaagtcgccgtgaagaacataaaatgtgacgtgaccgctcaggcgttcctggatgagacagccgtgatgactaagatgcagcatgagaaccttgtgagactgctgggagtaatcctccaccaggggctatacatcgtgatggagcacgtctcgaagggcaatctggtaaattttctgagaactaggggcagagctctggttaatacagctcagcttctccaattctctctccacgtcgccgagggaatggagtatctggaatcaaaaaagctcgtccatagggatctggccgcccgcaatatcctcgtgagtgaagacctcgttgccaaggtgagcgattttggactggcgaaggccgaacgcaagggattggactcttctagactgcctgtcaaatggaccgctcccgaagcccttaaacacggcaaattcacgtccaagtcagacgtttggagcttcggagtcctgctctgggaagtatttagttacgggcgcgcgccctatcctaagatgagcctgaaagaagttagtgaagctgtcgagaaggggtatcgcatggagccccctgaaggctgccctggccctgtgcacgtgttaatgagctcatgttgggaagcagagcccgcaagaaggcctcctttcagaaagctagcagagaagcttgcccgcgagctgcgcagcgccggcgcccccgccagcgtgtccggtcaagacgccgacggaagtacaagtccaagaagtcaggaaccctag

SEQ ID NO: 127829 - DNA, 1527 bp, Artificial Sequence
  derived and/or modified sequence
atgcaaggacattttcccgctgaacggagggaggggaggcctcgaagggggactaggggacagcagcagctattggtgtcaccccgtttcctgcgggcatggcacccccctcctgtgtccgctagaatgcccaccagaagatgggcacccggaactcagtgcattaccaaatgtgagcacacacgcccaaaacctggcgaactcgcttttaggaagggggacgtagtgaccatccttgaggcatgcgaaaataaatcatggtaccgagtcaaacaccatacttcaggacaagaaggccttctagctgccggtgccctccgcgagcgggaagctttgtccgcagatcccaaattaagcctgatgccttggtttcacggcaagataagtgggcaagaggcagtccagcaattgcaaccccctgaagatggactctttctggtgcgcgaatctgctcgtcatcccggtgactacgtactatgtgtcagcttcgggagggatgtgatccactatagggtactacatcgggacggccaccttacgattgacgaggccgtctttttctgcaatctcatggatatggtcgaacattattctaaggacaagggagcaatttgtacaaagctcgtgcgtccgaagcgcaagcacggaacaaaatctgccgaggaggagttggctagggctggttggctgctgaatctgcagcatctcactttaggcgcacagatcggggaaggcgagttcggcgcagtgctgcagggggagtatctgggacagaaggtggctgtgaagaatattaagtgtgacgtgacggcacaggcatttttggatgagacagcagtgatgaccaagatgcaacacgaaaacctggttcgccttttgggggtaattctgcaccaggggttatacatagtgatggagcatgtcagtaagggtaatttagtgaacttcctacgtacccgcggtcgggcattagtgaatacggctcagcttctccagttttccctccatgtggccgaaggcatggaataccttgaatcgaagaagctagtgcacagagacctggctgctcgaaatatcctagtgtctgaggatttggtcgcaaaggtctctgatttcggcctggcgaaagccgaacggaagggcctcgacagctcgaggttgccagtgaagtggactgctcccgaggctctgaagcacggtaagtttaccagtaagagtgacgtgtggtcctttggagtcctgctttgggaagtattcagttatggaagggccccttatccaaagatgtcactgaaagaagtgtcagaagcagtggagaagggctatcggatggagcccccagaggggtgccccggtcccgtacatgtgttgatgtcttcctgttgggaagccgaaccagccagacgtcccccttttagaaaactcgcagagaaactggctagagagttgcggtctgcaggcgctcctgctagcgtcagtgggcaagacgccgatggcagcacctctccgcgatctcaggaaccatag

SEQ ID NO: 127830 - DNA, 1527 bp, Artificial Sequence
  derived and/or modified sequence
atgcagggccacttccccgccgagagaagagagggcagacccagaagaggcaccagaggccagcagcagctgctggtgagccccagattcctgagagcctggcaccccccccccgtgagcgccagaatgcccaccagaagatgggcccccggcacccagtgcatcaccaagtgcgagcacaccagacccaagcccggcgagctggccttcagaaagggcgacgtggtgaccatcctggaggcctgcgagaacaagagctggtacagagtgaagcaccacaccagcggccaggagggcctgctggccgccggcgccctgagagagagagaggccctgagcgccgaccccaagctgagcctgatgccctggttccacggcaagatcagcggccaggaggccgtgcagcagctgcagccccccgaggacggcctgttcctggtgagagagagcgccagacaccccggcgactacgtgctgtgcgtgagcttcggcagagacgtgatccactacagagtgctgcacagagacggccacctgaccatcgacgaggccgtgttcttctgcaacctgatggacatggtggagcactacagcaaggacaagggcgccatctgcaccaagctggtgagacccaagagaaagcacggcaccaagagcgccgaggaggagctggccagagccggctggctgctgaacctgcagcacctgaccctgggcgcccagatcggcgagggcgagttcggcgccgtgctgcagggcgagtacctgggccagaaggtggccgtgaagaacatcaagtgcgacgtgaccgcccaggccttcctggacgagaccgccgtgatgaccaagatgcagcacgagaacctggtgagactgctgggcgtgatcctgcaccagggcctgtacatcgtgatggagcacgtgagcaagggcaacctggtgaacttcctgagaaccagaggcagagccctggtgaacaccgcccagctgctgcagttcagcctgcacgtggccgagggcatggagtacctggagagcaagaagctggtgcacagagacctggccgccagaaacatcctggtgagcgaggacctggtggccaaggtgagcgacttcggcctggccaaggccgagagaaagggcctggacagcagcagactgcccgtgaagtggaccgcccccgaggccctgaagcacggcaagttcaccagcaagagcgacgtgtggagcttcggcgtgctgctgtgggaggtgttcagctacggcagagccccctaccccaagatgagcctgaaggaggtgagcgaggccgtggagaagggctacagaatggagccccccgagggctgccccggccccgtgcacgtgctgatgagcagctgctgggaggccgagcccgccagaagaccccccttcagaaagctggccgagaagctggccagagagctgagaagcgccggcgcccccgccagcgtgagcggccaggacgccgacggcagcaccagccccagaagccaggagccctag

SEQ ID NO: 127831 - protein, 957 aa, Artificial Sequence
  derived and/or modified sequence
MEKMLAGCFLLILGQIVLLPAEARERSRGRSISRGRHARTHPQTALLESSCENKRADLVFIIDSSRSVNTHDYAKVKEFIVDILQFLDIGPDVTRVGLLQYGSTVKNEFSLKTFKRKSEVERAVKRMRHLSTGTMTGLAIQYALNIAFSEAEGARPLRENVPRVIMIVTDGRPQDSVAEVAAKARDTGILIFAIGVGQVDFNTLKSIGSEPHEDHVFLVANFSQIETLTSVFQKKLCTAHMCSTLEHNCAHFCINIPGSYVCRCKQGYILNSDQTTCRIQDLCAMEDHNCEQLCVNVPGSFVCQCYSGYALAEDGKRCVAVDYCASENHGCEHECVNADGSYLCQCHEGFALNPDKKTCTKIDYCASSNHGCQHECVNTDDSYSCHCLKGFTLNPDKKTCRRINYCALNKPGCEHECVNMEESYYCRCHRGYTLDPNGKTCSRVDHCAQQDHGCEQLCLNTEDSFVCQCSEGFLINEDLKTCSRVDYCLLSDHGCEYSCVNMDRSFACQCPEGHVLRSDGKTCAKLDSCALGDHGCEHSCVSSEDSFVCQCFEGYILREDGKTCRRKDVCQAIDHGCEHICVNSDDSYTCECLEGFRLAEDGKRCRRKDVCKSTHHGCEHICVNNGNSYICKCSEGFVLAEDGRRCKKCTEGPIDLVFVIDGSKSLGEENFEVVKQFVTGIIDSLTISPKAARVGLLQYSTQVHTEFTLRNFNSAKDMKKAVAHMKYMGKGSMTGLALKHMFERSFTQGEGARPLSTRVPRAAIVFTDGRAQDDVSEWASKAKANGITMYAVGVGKAIEEELQEIASEPTNKHLFYAEDFSTMDEISEKLKKGICEALEDSDGRQDSPAGELPKTVQQPTESEPVTINIQDLLSCSNFAVQHRYLFEEDNLLRSTQKLSHSTKPSGSPLEEKHDQCKCENLIMFQNLANEEVRKLTQRLLEEMTQRMEALENRLRYR

SEQ ID NO: 127832 - protein, 115 aa, Artificial Sequence
  derived and/or modified sequence
MEDHNCEQLCVNVPGSFVCQCYSGYALAEDGKRCVAVDYCASENHGCEHECVNADGSYLCQCHEGFALNPDKKTCTKIDYCASSNHGCQHECVNTDDSYSCHCLKGFTLNPDKKT

SEQ ID NO: 127833 - protein, 956 aa, Artificial Sequence
  derived and/or modified sequence
MEKMLAGCFLLILGQIVLLPAEARERSRGRSISRGRHARTHPQTALLESSCENKRADLVFIIDSSRSVNTHDYAKVKEFIVDILQFLDIGPDVTRVGLLQYGSTVKNEFSLKTFKRKSEVERAVKRMRHLSTGTMTGLAIQYALNIAFSEAEGARPLRENVPRVIMIVTDGRPQDSVAEVAAKARDTGILIFAIGVGQVDFNTLKSIGSEPHEDHVFLVANFSQIETLTSVFQKKLCTAHMCSTLEHNCAHFCINIPGSYVCRCKQGYILNSDQTTCRIQDLCAMEDHNCEQLCVNVPGSFVCQCYSGYALAEDGKRCVAVDYCASENHGCEHECVNADGSYLCQCHEGFALNPDKKTCTKIDYCASSNHGCQHECVNTDDSYSCHCLKGFTLNPDKKTCRRINYCALNKPGCEHECVNMEESYYCRCHRGYTLDPNGKTCSRVDHCAQQDHGCEQLCLNTEDSFVCQCSEGFLINEDLKTCSRVDYCLLSDHGCEYSCVNMDRSFACQCPEGHVLRSDGKTCAKLDSCALGDHGCEHSCVSSEDSFVCQCFEGYILREDGKTCRRKDVCQAIDHGCEHICVNSDDSYTCECLEGFRLAEDGKRCRRKDVCKSTHHGCEHICVNNGNSYICKCSEGFVLAEDGRRCKKCTEGPIDLVFVIDGSKSLGEENFEVVKQFVTGIIDSLTISPKAARVGLLQYSTQVHTEFTLRNFNSAKDMKKAVAHMKYMGKGSMTGLALKHMFERSFTQGEGARPLSTRVPRAAIVFTDGRAQDDVSEWASKAKANGITMYAVGVGKAIEEELQEIASEPTNKHLFYAEDFSTMDEISEKLKKGICEALEDSDGRQDSPAGELPKTVQQPTESEPVTINIQDLLSCSNFAVQHRYLFEEDNLLRSTQKLSHSTKPSGSPLEEKHDQCKCENLIMFQNLANEEVRKLTQRLEEMTQRMEALENRLRYR

SEQ ID NO: 127834 - protein, 672 aa, Artificial Sequence
  derived and/or modified sequence
MEDHNCEQLCVNVPGSFVCQCYSGYALAEDGKRCVAVDYCASENHGCEHECVNADGSYLCQCHEGFALNPDKKTCTKIDYCASSNHGCQHECVNTDDSYSCHCLKGFTLNPDKKTCRRINYCALNKPGCEHECVNMEESYYCRCHRGYTLDPNGKTCSRVDHCAQQDHGCEQLCLNTEDSFVCQCSEGFLINEDLKTCSRVDYCLLSDHGCEYSCVNMDRSFACQCPEGHVLRSDGKTCAKLDSCALGDHGCEHSCVSSEDSFVCQCFEGYILREDGKTCRRKDVCQAIDHGCEHICVNSDDSYTCECLEGFRLAEDGKRCRRKDVCKSTHHGCEHICVNNGNSYICKCSEGFVLAEDGRRCKKCTEGPIDLVFVIDGSKSLGEENFEVVKQFVTGIIDSLTISPKAARVGLLQYSTQVHTEFTLRNFNSAKDMKKAVAHMKYMGKGSMTGLALKHMFERSFTQGEGARPLSTRVPRAAIVFTDGRAQDDVSEWASKAKANGITMYAVGVGKAIEEELQEIASEPTNKHLFYAEDFSTMDEISEKLKKGICEALEDSDGRQDSPAGELPKTVQQPTESEPVTINIQDLLSCSNFAVQHRYLFEEDNLLRSTQKLSHSTKPSGSPLEEKHDQCKCENLIMFQNLANEEVRKLTQRLEEMTQRMEALENRLRYR

SEQ ID NO: 127835 - DNA, 2874 bp, Artificial Sequence
  derived and/or modified sequence
atggaaaagatgctggctgggtgttttttgctgatactgggacagatcgtccttttacccgcagaagcccgcgagagatcccgtggccgaagtatttcacgggggagacacgcacggactcacccccagacagctttgctcgaatccagctgcgaaaataagagggctgatcttgttttcatcattgacagcagtagaagtgtgaacacccacgactacgctaaagtgaaagagtttatcgtggacatcctccaattcctcgacatcggacctgacgttacgcgcgtgggattgctgcagtacgggtctaccgtcaagaacgagttttccctgaaaacatttaaacgaaagtccgaagtggagagagccgtcaagaggatgcggcatctgtctaccggaactatgaccggactagctatccagtacgcactgaacatcgcattttccgaggcagagggagccagacctctgcgggagaatgtgccccgcgttatcatgatcgttactgatggccgtccccaggattcagtggcagaggtggcagcaaaagccagggacacgggaatattgatctttgcgatcggcgttgggcaggtggatttcaacactctgaagtcaatcgggtccgaaccacacgaggaccatgtgtttttggtcgctaatttttcacagatcgagactctcaccagtgtcttccaaaagaagctgtgcacagctcacatgtgtagcaccctcgagcacaattgtgcacatttttgtattaacattcctggatcatacgtttgtcgttgcaagcagggatacatccttaactccgatcagaccacatgtcgaatccaggatttatgtgcgatggaggatcataactgtgagcagctctgtgtgaacgttcctggctcatttgtatgccagtgctactctggctatgcacttgctgaagatggcaaaagatgcgtagctgttgattactgcgcatctgaaaaccacggatgcgaacacgagtgtgtcaatgccgacggatcctacctttgccaatgccacgaaggtttcgcactgaacccagataagaaaacctgcaccaaaatcgactactgtgctagctccaaccacggctgtcagcacgaatgcgttaataccgacgacagctacagctgtcattgtctgaagggatttaccctgaaccctgacaaaaagacttgccgccggataaattactgtgctctcaacaaacctggctgcgagcatgagtgtgtaaacatggaggaatcctattactgtagatgtcatcgggggtatactctcgaccccaacggcaaaacctgctcccgcgtggatcattgcgcccagcaggaccatggctgtgaacagctgtgcctcaacaccgaggactcctttgtttgtcagtgtagcgaggggtttctcattaacgaggacctgaaaacatgctctagagtggactattgcttgctgagcgaccacgggtgtgaatactcgtgtgtcaacatggacaggtcttttgcctgccagtgtcccgaaggccatgtgctgcgatcagatggaaaaacttgtgcaaagctcgactcgtgcgccctcggggatcacggatgcgagcatagttgcgtgagcagcgaggacagttttgtttgtcagtgttttgagggctacatcttgcgggaagatggcaagacgtgtcgtagaaaggatgtatgccaggctatagaccacggatgtgaacacatctgcgtgaactccgacgacagttatacatgcgaatgcctggaggggttccgcctggccgaggatgggaagcgttgccgcaggaaagatgtgtgcaaaagtacccaccacggctgcgaacatatctgtgtgaacaatgggaattcctacatctgcaagtgtagtgaagggttcgtgctggctgaagacggtcggcggtgcaagaagtgcacagaggggcctattgaccttgtctttgtcattgatgggagcaaaagcctgggcgaggagaactttgaggtggtaaagcagttcgtgaccggcataatcgacagcttaactatctctccaaaagctgcccgcgtgggactgctccagtactccactcaggtgcacactgagttcaccttacggaactttaacagcgcaaaggacatgaagaaagctgtcgcccacatgaaatacatggggaaagggtctatgaccggcctagccctgaagcacatgttcgaaagaagcttcacacaaggggagggcgctcgcccactgagcacacgtgtgcctagggccgcgattgtgttcacagatggcagggctcaggacgatgtgtccgaatgggcgagtaaggccaaggcgaacggaataaccatgtatgctgtgggcgtcggcaaggccatagaggaggaactgcaggaaattgctagcgagcccactaacaagcatctgttttacgcggaggacttctccacgatggacgaaatttcggagaagttgaagaagggaatttgtgaggccctcgaggacagtgacggccggcaggactcacctgccggagaactgcccaagactgtccagcagcccaccgaatccgagcccgtgacgataaacattcaggacctcctttcttgttctaacttcgccgtgcagcaccggtatctcttcgaggaggacaacctcctgcgttccacacagaagctgtcccattctaccaaaccctctggaagtccactcgaggagaaacatgaccagtgcaagtgtgaaaatttaatcatgttccaaaatcttgctaatgaagaagtccgcaagttaacccaaagactgttggaagaaatgactcagcggatggaagctctagagaataggctgcgataccgttag

SEQ ID NO: 127836 - DNA, 2871 bp, Artificial Sequence
  derived and/or modified sequence
atggagaaaatgctagccggctgcttcctacttattctcgggcaaatagttcttctcccagccgaggcgcgggaaagatcccgcggccgatccatatccagagggcgtcacgctcgaactcaccctcaaaccgcgttactggagagtagctgcgaaaataagagggcagacctggtattcatcatcgactcttcaagaagcgtgaatactcacgactacgcgaaagtaaaggagttcatcgtggacatcttacaatttttagacatagggcctgacgtgacgagagtgggactcttacagtacggctctaccgttaaaaacgaatttagtttgaaaaccttcaagcgcaaaagcgaggtagagagggcggtgaaacgcatgagacacctgagcacgggcaccatgaccggattggcaatacagtatgcgcttaatatcgctttcagtgaagccgagggcgcccggcccttgcgtgaaaatgtgcctcgagttataatgatcgtgacggatggtagaccgcaggatagtgtggcggaggtcgccgccaaggccagggatacaggcattctcatcttcgcaatcggagtgggccaggtcgacttcaacactctcaaatcaattgggagcgagccccatgaggaccacgtgtttctcgtggcaaatttctcgcaaatcgagactctgacttctgtgtttcagaaaaaactctgtaccgctcacatgtgtagcaccttggagcataattgcgcacacttttgcattaatatacccggctcttatgtttgtaggtgtaaacagggctatatcctcaactccgaccaaacaacatgccgtatccaggacctttgtgcgatggaagaccacaattgcgaacagctgtgcgttaacgttccgggaagcttcgtgtgtcaatgctactccggttatgccctggcggaggacggcaagaggtgcgtcgccgtggactactgtgcatctgaaaaccacggctgtgaacacgaatgtgtaaatgctgacggatcctatctatgccagtgtcacgaggggttcgctctgaatccagacaagaagacctgcacgaagatcgactactgcgcaagctcaaaccatggctgtcagcacgaatgcgtgaataccgacgacagctactcctgtcattgcttaaaaggtttcaccctcaacccagacaagaaaacgtgtaggcgtatcaactactgtgctctgaacaagcccgggtgcgagcacgagtgcgttaacatggaggagagttactactgccgctgccatagaggctacactctggatcccaatggaaagacctgttcccgggtcgaccattgtgctcagcaggaccatggctgcgagcagctatgcctcaacacggaggacagttttgtgtgccagtgttccgaaggcttcctcatcaacgaggacctgaagacctgtagtagggtagactactgcctgctcagcgatcatggttgtgagtattcttgtgtgaatatggacagatcctttgcatgtcagtgccctgaaggacacgttctgcggtccgatggaaagacctgcgcaaagctagattcctgcgccctgggcgaccacggttgcgagcattcatgcgtgagttctgaagactcatttgtatgccagtgtttcgaaggttatatcctccgcgaagatggaaagacctgtaggcgaaaggacgtgtgccaagccatcgatcatggctgtgagcacatatgcgtaaacagtgacgacagctacacttgtgagtgtctcgagggctttcgtcttgcagaggacggtaaacggtgcagaagaaaagatgtatgcaagtccacacaccacggttgcgagcatatctgtgttaataacggtaactcctacatctgcaaatgctctgaagggttcgtgctcgcggaggacggacgtcgatgcaaaaagtgcacggaaggtcctattgatctcgtgttcgtgattgacgggtctaaatcactgggcgaagagaattttgaggtcgttaagcagtttgtcacaggaattattgacagcctgacaatctcccctaaagccgcacgagtgggcttgttacagtattccacccaggtccacacagagttcacactgcgaaattttaactcggccaaagatatgaaaaaggccgtcgcacacatgaagtatatggggaaaggtagcatgaccggacttgctttaaaacatatgttcgagcgctcctttacacagggggagggagcccgacccctttcaacccgggtgcctagggcggccattgtgtttaccgacggacgcgcacaggatgacgtgtcagaatgggcatccaaggcgaaggcgaacggtattaccatgtacgccgtcggcgtgggaaaagcaatcgaggaggaattacaggagatcgccagcgaacctaccaataagcacttgttctacgcagaagacttttctacaatggacgagatcagcgaaaagctcaaaaaggggatctgcgaggcgctggaagattcagacgggaggcaggacagtccagcaggagagttgccaaaaaccgtgcagcagccaacggaaagtgaacccgtgaccataaacatccaagacctcctgtcttgctcaaatttcgccgttcaacaccgatatctgttcgaggaagataacttgctgcggagtacccaaaagttaagccactccaccaaacccagtggttctcccctagaggagaaacatgaccagtgtaaatgcgagaatctgatcatgttccaaaatctagccaacgaggaggtgcgcaaactcacacaaaggctagaagaaatgacccagagaatggaggctctggagaaccgcttgcgctatcgctag

SEQ ID NO: 127837 - DNA, 2019 bp, Artificial Sequence
  derived and/or modified sequence
atggaggatcacaactgtgagcagctgtgtgtgaacgtacctgggtcatttgtctgccaatgctacagcggctacgccctggccgaggatggtaagagatgcgtagcagtagattactgtgcgagtgagaaccatgggtgcgaacacgagtgcgtgaatgctgacggaagttatttgtgccagtgtcacgagggatttgcgctcaatcccgataagaaaacctgtacgaaaattgattattgtgccagctcaaatcacggctgccagcatgaatgtgtgaataccgatgactcttactcgtgccactgtctaaaaggctttactcttaatccagacaagaagacttgcaggaggatcaattactgcgccctgaataaaccaggttgcgagcacgagtgcgtcaatatggaagagagctactactgtcgatgccataggggttatactctggaccctaatggcaaaacatgctctcgggtagatcactgtgctcaacaggatcatgggtgtgaacaactgtgccttaataccgaggactcctttgtgtgtcagtgttcagagggctttctgatcaatgaggacctgaaaacatgctcccgcgtggactactgcctgctcagcgatcacggctgcgagtacagttgtgttaacatggatcggtcttttgcttgtcagtgtcccgaggggcatgtgttgagatctgacggcaaaacgtgcgccaaactagactcttgtgccctgggagaccacggctgtgagcactcctgcgtgagcagtgaggactccttcgtgtgccagtgctttgagggctatattctccgcgaagacggcaagacatgtcgtcggaaggacgtgtgccaggctatcgaccacggctgcgagcacatctgtgtaaactcagacgatagctacacttgtgaatgcctggaaggctttcgcctagcagaggacggcaagcggtgtaggcgcaaagacgtctgcaagagcacccaccacggctgcgagcacatttgcgtaaataacgggaactcatacatttgtaagtgctcagaggggtttgtgcttgccgaggatggtcgcagatgcaaaaagtgtaccgaggggccaatcgatcttgtgttcgtcatcgatggtagtaaaagtctgggggaggaaaactttgaagtggtgaagcaattcgtgaccgggatcattgactctcttactatttcccccaaagccgcacgcgttgggctgctccagtattctacgcaagtgcatacagaattcacactgaggaattttaacagcgccaaggatatgaagaaagccgtagcccacatgaaatacatgggtaaggggagtatgaccgggctggccctgaagcacatgttcgagaggtcatttacgcagggagagggcgcgcgccctctgagtacccgagtcccgcgcgcagctatcgtcttcactgacgggcgtgcacaggatgatgtgagcgaatgggcctctaaagctaaagctaatggcattacaatgtatgccgtgggcgtgggtaaggcgattgaagaagaactccaggagatagccagtgagccaactaacaagcatctgttttacgctgaggatttttcaactatggacgagatttccgagaagctgaaaaagggcatttgcgaagccttggaagacagcgatggcaggcaggacagtcccgctggcgagctgcctaaaacagtgcagcagccaactgagtcagaacctgtgacgattaatatacaggacctcctgtcttgctctaacttcgcggttcagcataggtatctgttcgaggaggataatctcctcaggtctactcagaagctctctcactccaccaagccctccggttcccccttggaggagaaacatgatcagtgcaaatgcgaaaacttaattatgtttcaaaatcttgccaatgaagaggtgcggaaactgacacaaaggctggaagaaatgacccagcgaatggaagccttagagaacaggctgcgttataggtag

SEQ ID NO: 127838 - DNA, 2874 bp, Artificial Sequence
  derived and/or modified sequence
atggagaagatgctggccggctgcttcctgctgatcctgggccagatcgtgctgctgcctgctgaggcccgggagaggagccggggccgcagcatcagccggggcagacatgcccggacccacccccagacagccctgctggagagcagctgtgagaacaagagagctgacctggtgttcatcatcgacagcagccgctctgtgaacacccatgactatgccaaggtgaaggagttcatcgtggacatcctgcagttcctggacattggaccagatgtgaccagggtgggcctgctgcagtatggcagcacagtgaagaatgagttcagcctgaagaccttcaagaggaagtctgaggtggagagagctgtgaagaggatgaggcacctgagcacaggcaccatgacaggcctggccatccagtatgccctgaacatcgccttcagcgaggccgagggcgcccggcccctgagagaaaatgtgcccagggtcatcatgattgtgacagatggccggccccaggacagcgtggccgaggtggccgccaaggcccgggacaccggcatcctgatctttgccatcggcgtgggccaggtggacttcaacaccctgaagagcatcggcagcgagccccatgaagatcatgtgttcctggtggccaacttcagccagatcgagaccctgaccagcgtcttccagaagaagctgtgcacagcccacatgtgcagcaccctggagcacaactgtgcccacttctgcatcaacatccctggcagctatgtgtgccgctgcaagcagggctacatcctgaacagcgaccagaccacctgccgcatccaggacctgtgtgccatggaggaccacaactgtgagcagctgtgtgtgaatgtgcccggcagctttgtgtgccagtgctacagcggctacgccctggctgaagatggcaagagatgtgtggccgtggactactgtgcctctgaaaatcatggctgtgaacatgaatgtgtgaatgctgatggcagctacctgtgccagtgccacgagggctttgccctgaacccagacaagaagacctgcaccaagattgactactgtgccagcagcaaccacggctgccagcatgaatgtgtgaacacagatgacagctacagctgccactgcctgaagggcttcaccctgaacccagacaagaagacctgccgccgcatcaactactgtgccctgaacaagccaggctgtgaacatgaatgtgtgaacatggaggagagctactactgccgctgccaccggggctacaccctggaccccaacgggaagacctgcagccgggtggaccactgtgcccagcaggaccacggctgtgagcagctgtgcctgaacacagaggacagctttgtgtgccagtgcagcgagggcttcctgatcaatgaagacctgaagacctgcagccgggtggactactgcctgctgagtgaccacggctgtgagtacagctgtgtgaacatggacaggagctttgcctgccagtgcccagagggccacgtgctgcggagtgatggcaagacctgtgccaagctggacagctgtgccctgggggaccacggctgtgagcacagctgtgtgtcctctgaggacagctttgtgtgccagtgctttgagggctacatcctgagagaagatggcaagacctgcaggaggaaggatgtgtgccaggccatcgaccacggctgtgagcacatctgtgtgaacagtgatgacagctacacctgtgaatgtctggagggcttccggctggccgaggatggcaagcgctgcaggaggaaggatgtgtgcaagagcacccaccacggctgtgagcacatctgtgtgaacaatggaaacagctacatctgcaagtgcagcgagggctttgtgctggctgaagatggccgccgctgcaagaagtgcacagagggccccatcgacctggtgtttgtgattgatggcagcaagagcctgggggaggagaactttgaggtggtgaagcagtttgtgacaggcatcatcgacagcctgaccatcagccccaaggccgcccgggtgggcctgctgcagtacagcacccaggtgcacacagagttcaccctgaggaacttcaacagcgccaaggacatgaagaaggctgtggcccacatgaagtacatgggcaagggctccatgacaggcctggccctgaagcacatgtttgagaggagcttcacccagggcgagggcgcccggcccctgagcaccagggtgccccgggccgccatcgtgttcacagatggccgggcccaggatgatgtgtctgagtgggccagcaaggccaaggccaacggcatcaccatgtatgctgtgggcgtgggcaaggccatcgaggaggagctgcaggagatcgccagcgagcccaccaacaagcacctgttctatgcagaggacttcagcaccatggatgagatcagcgagaagctgaagaagggcatctgtgaggccctggaggacagtgatggccggcaggacagccctgctggggagctgcccaagacagtgcagcagcccacagagagcgagcctgtgaccatcaacatccaggacctgctgagctgcagcaactttgctgtgcagcaccgctacctgtttgaggaggacaacctgctgcggagcacccagaagctgagccacagcaccaagcccagcggcagccccctggaggagaagcatgaccagtgcaagtgtgaaaatctcatcatgttccagaacctggccaatgaggaggtgaggaagctgacccagaggctgctggaggagatgacccagaggatggaggccctggagaaccggctgcgctacagatag

SEQ ID NO: 127839 - DNA, 2871 bp, Artificial Sequence
  derived and/or modified sequence
atggagaagatgctggccggctgcttcctgctgatcctgggccagatcgtgctgctgcctgctgaggcccgggagaggagccggggccgcagcatcagccggggcagacatgcccggacccacccccagacagccctgctggagagcagctgtgagaacaagagagctgacctggtgttcatcatcgacagcagccgctctgtgaacacccatgactatgccaaggtgaaggagttcatcgtggacatcctgcagttcctggacattggaccagatgtgaccagggtgggcctgctgcagtatggcagcacagtgaagaatgagttcagcctgaagaccttcaagaggaagtctgaggtggagagagctgtgaagaggatgaggcacctgagcacaggcaccatgacaggcctggccatccagtatgccctgaacatcgccttcagcgaggccgagggcgcccggcccctgagagaaaatgtgcccagggtcatcatgattgtgacagatggccggccccaggacagcgtggccgaggtggccgccaaggcccgggacaccggcatcctgatctttgccatcggcgtgggccaggtggacttcaacaccctgaagagcatcggcagcgagccccatgaagatcatgtgttcctggtggccaacttcagccagatcgagaccctgaccagcgtcttccagaagaagctgtgcacagcccacatgtgcagcaccctggagcacaactgtgcccacttctgcatcaacatccctggcagctatgtgtgccgctgcaagcagggctacatcctgaacagcgaccagaccacctgccgcatccaggacctgtgtgccatggaggaccacaactgtgagcagctgtgtgtgaatgtgcccggcagctttgtgtgccagtgctacagcggctacgccctggctgaagatggcaagagatgtgtggccgtggactactgtgcctctgaaaatcatggctgtgaacatgaatgtgtgaatgctgatggcagctacctgtgccagtgccacgagggctttgccctgaacccagacaagaagacctgcaccaagattgactactgtgccagcagcaaccacggctgccagcatgaatgtgtgaacacagatgacagctacagctgccactgcctgaagggcttcaccctgaacccagacaagaagacctgccgccgcatcaactactgtgccctgaacaagccaggctgtgaacatgaatgtgtgaacatggaggagagctactactgccgctgccaccggggctacaccctggaccccaacgggaagacctgcagccgggtggaccactgtgcccagcaggaccacggctgtgagcagctgtgcctgaacacagaggacagctttgtgtgccagtgcagcgagggcttcctgatcaatgaagacctgaagacctgcagccgggtggactactgcctgctgagtgaccacggctgtgagtacagctgtgtgaacatggacaggagctttgcctgccagtgcccagagggccacgtgctgcggagtgatggcaagacctgtgccaagctggacagctgtgccctgggggaccacggctgtgagcacagctgtgtgtcctctgaggacagctttgtgtgccagtgctttgagggctacatcctgagagaagatggcaagacctgcaggaggaaggatgtgtgccaggccatcgaccacggctgtgagcacatctgtgtgaacagtgatgacagctacacctgtgaatgtctggagggcttccggctggccgaggatggcaagcgctgcaggaggaaggatgtgtgcaagagcacccaccacggctgtgagcacatctgtgtgaacaatggaaacagctacatctgcaagtgcagcgagggctttgtgctggctgaagatggccgccgctgcaagaagtgcacagagggccccatcgacctggtgtttgtgattgatggcagcaagagcctgggggaggagaactttgaggtggtgaagcagtttgtgacaggcatcatcgacagcctgaccatcagccccaaggccgcccgggtgggcctgctgcagtacagcacccaggtgcacacagagttcaccctgaggaacttcaacagcgccaaggacatgaagaaggctgtggcccacatgaagtacatgggcaagggctccatgacaggcctggccctgaagcacatgtttgagaggagcttcacccagggcgagggcgcccggcccctgagcaccagggtgccccgggccgccatcgtgttcacagatggccgggcccaggatgatgtgtctgagtgggccagcaaggccaaggccaacggcatcaccatgtatgctgtgggcgtgggcaaggccatcgaggaggagctgcaggagatcgccagcgagcccaccaacaagcacctgttctatgcagaggacttcagcaccatggatgagatcagcgagaagctgaagaagggcatctgtgaggccctggaggacagtgatggccggcaggacagccctgctggggagctgcccaagacagtgcagcagcccacagagagcgagcctgtgaccatcaacatccaggacctgctgagctgcagcaactttgctgtgcagcaccgctacctgtttgaggaggacaacctgctgcggagcacccagaagctgagccacagcaccaagcccagcggcagccccctggaggagaagcatgaccagtgcaagtgtgaaaatctcatcatgttccagaacctggccaatgaggaggtgaggaagctgacccagaggctggaggagatgacccagaggatggaggccctggagaaccggctgcgctacagatag

SEQ ID NO: 127840 - DNA, 2019 bp, Artificial Sequence
  derived and/or modified sequence
atggaggaccacaactgtgagcagctgtgtgtgaatgtgcccggcagctttgtgtgccagtgctacagcggctacgccctggctgaagatggcaagagatgtgtggccgtggactactgtgcctctgaaaatcatggctgtgaacatgaatgtgtgaatgctgatggcagctacctgtgccagtgccacgagggctttgccctgaacccagacaagaagacctgcaccaagattgactactgtgccagcagcaaccacggctgccagcatgaatgtgtgaacacagatgacagctacagctgccactgcctgaagggcttcaccctgaacccagacaagaagacctgccgccgcatcaactactgtgccctgaacaagccaggctgtgaacatgaatgtgtgaacatggaggagagctactactgccgctgccaccggggctacaccctggaccccaacgggaagacctgcagccgggtggaccactgtgcccagcaggaccacggctgtgagcagctgtgcctgaacacagaggacagctttgtgtgccagtgcagcgagggcttcctgatcaatgaagacctgaagacctgcagccgggtggactactgcctgctgagtgaccacggctgtgagtacagctgtgtgaacatggacaggagctttgcctgccagtgcccagagggccacgtgctgcggagtgatggcaagacctgtgccaagctggacagctgtgccctgggggaccacggctgtgagcacagctgtgtgtcctctgaggacagctttgtgtgccagtgctttgagggctacatcctgagagaagatggcaagacctgcaggaggaaggatgtgtgccaggccatcgaccacggctgtgagcacatctgtgtgaacagtgatgacagctacacctgtgaatgtctggagggcttccggctggccgaggatggcaagcgctgcaggaggaaggatgtgtgcaagagcacccaccacggctgtgagcacatctgtgtgaacaatggaaacagctacatctgcaagtgcagcgagggctttgtgctggctgaagatggccgccgctgcaagaagtgcacagagggccccatcgacctggtgtttgtgattgatggcagcaagagcctgggggaggagaactttgaggtggtgaagcagtttgtgacaggcatcatcgacagcctgaccatcagccccaaggccgcccgggtgggcctgctgcagtacagcacccaggtgcacacagagttcaccctgaggaacttcaacagcgccaaggacatgaagaaggctgtggcccacatgaagtacatgggcaagggctccatgacaggcctggccctgaagcacatgtttgagaggagcttcacccagggcgagggcgcccggcccctgagcaccagggtgccccgggccgccatcgtgttcacagatggccgggcccaggatgatgtgtctgagtgggccagcaaggccaaggccaacggcatcaccatgtatgctgtgggcgtgggcaaggccatcgaggaggagctgcaggagatcgccagcgagcccaccaacaagcacctgttctatgcagaggacttcagcaccatggatgagatcagcgagaagctgaagaagggcatctgtgaggccctggaggacagtgatggccggcaggacagccctgctggggagctgcccaagacagtgcagcagcccacagagagcgagcctgtgaccatcaacatccaggacctgctgagctgcagcaactttgctgtgcagcaccgctacctgtttgaggaggacaacctgctgcggagcacccagaagctgagccacagcaccaagcccagcggcagccccctggaggagaagcatgaccagtgcaagtgtgaaaatctcatcatgttccagaacctggccaatgaggaggtgaggaagctgacccagaggctggaggagatgacccagaggatggaggccctggagaaccggctgcgctacagatag

SEQ ID NO: 127841 - DNA, 4109 bp, Artificial Sequence
  derived and/or modified sequence
gcgagcgaagggagcgctctgggatgggacttggagcaagcggcggcggcggagacagaggcagaggcagaagctggggctccgtcctcgcctcccacgagcgatccccgaggagagccgcggccctcggcgaggcgaagaggccgacgaggaagacccgggtggctgcgcccctgcctcgcttcccaggcgccggcggctgcagccttgcccctcttgctcgccttgaaaatggaaaagatgctcgcaggctgctttctgctgatcctcggacagatcgtcctcctccctgccgaggccagggagcggtcacgtgggaggtccatctctaggggcagacacgctcggacccacccgcagacggcccttctggagagttcctgtgagaacaagcgggcagacctggttttcatcattgacagctctcgcagtgtcaacacccatgactatgcaaaggtcaaggagttcatcgtggacatcttgcaattcttggacattggtcctgatgtcacccgagtgggcctgctccaatatggcagcactgtcaagaatgagttctccctcaagaccttcaagaggaagtccgaggtggagcgtgctgtcaagaggatgcggcatctgtccacgggcaccatgactgggctggccatccagtatgccctgaacatcgcattctcagaagcagagggggcccggcccctgagggagaatgtgccacgggtcataatgatcgtgacagatgggagacctcaggactccgtggccgaggtggctgctaaggcacgggacacgggcatcctaatctttgccattggtgtgggccaggtagacttcaacaccttgaagtccattgggagtgagccccatgaggaccatgtcttccttgtggccaatttcagccagattgagacgctgacctccgtgttccagaagaagttgtgcacggcccatatgtgcagcaccctggagcataactgtgcccacttctgcatcaacatccctggctcatacgtctgcaggtgcaaacaaggctacattctcaactcggatcagacgacttgcagaatccaggatctgtgtgccatggaggaccacaactgtgagcagctctgtgtgaatgtgccgggctccttcgtctgccagtgctacagtggctacgccctggctgaggatgggaagaggtgtgtggctgtggactactgtgcctcagaaaaccacggatgtgaacatgagtgtgtaaatgctgatggctcctacctttgccagtgccatgaaggatttgctcttaacccagataaaaaaacgtgcacaaagatagactactgtgcctcatctaatcacggatgtcagcacgagtgtgttaacacagatgattcctattcctgccactgcctgaaaggctttaccctgaatccagataagaaaacctgcagaaggatcaactactgtgcactgaacaaaccgggctgtgagcatgagtgcgtcaacatggaggagagctactactgccgctgccaccgtggctacactctggaccccaatggcaaaacctgcagccgagtggaccactgtgcacagcaggaccatggctgtgagcagctgtgtctgaacacggaggattccttcgtctgccagtgctcagaaggcttcctcatcaacgaggacctcaagacctgctcccgggtggattactgcctgctgagtgaccatggttgtgaatactcctgtgtcaacatggacagatcctttgcctgtcagtgtcctgagggacacgtgctccgcagcgatgggaagacgtgtgcaaaattggactcttgtgctctgggggaccacggttgtgaacattcgtgtgtaagcagtgaagattcgtttgtgtgccagtgctttgaaggttatatactccgtgaagatggaaaaacctgcagaaggaaagatgtctgccaagctatagaccatggctgtgaacacatttgtgtgaacagtgatgactcatacacgtgcgagtgcttggagggattccggctcgctgaggatgggaaacgctgccgaaggaaggatgtctgcaaatcaacccaccatggctgcgaacacatttgtgttaataatgggaattcctacatctgcaaatgctcagagggatttgttctagctgaggacggaagacggtgcaagaaatgcactgaaggcccaattgacctggtctttgtgatcgatggatccaagagtcttggagaagagaattttgaggtcgtgaagcagtttgtcactggaattatagattccttgacaatttcccccaaagccgctcgagtggggctgctccagtattccacacaggtccacacagagttcactctgagaaacttcaactcagccaaagacatgaaaaaagccgtggcccacatgaaatacatgggaaagggctctatgactgggctggccctgaaacacatgtttgagagaagttttacccaaggagaaggggccaggcccctttccacaagggtgcccagagcagccattgtgttcaccgacggacgggctcaggatgacgtctccgagtgggccagtaaagccaaggccaatggtatcactatgtatgctgttggggtaggaaaagccattgaggaggaactacaagagattgcctctgagcccacaaacaagcatctcttctatgccgaagacttcagcacaatggatgagataagtgaaaaactcaagaaaggcatctgtgaagctctagaagactccgatggaagacaggactctccagcaggggaactgccaaaaacggtccaacagccaacagaatctgagccagtcaccataaatatccaagacctactttcctgttctaattttgcagtgcaacacagatatctgtttgaagaagacaatcttttacggtctacacaaaagctttcccattcaacaaaaccttcaggaagccctttggaagaaaaacacgatcaatgcaaatgtgaaaaccttataatgttccagaaccttgcaaacgaagaagtaagaaaattaacacagcgtttactagaagaaatgacacagagaatggaagccctggaaaatcgcctgagatacagatgaagattagaaatcgcgacacatttgtagtcattgtatcacggattacaatgaacgcagtgcagagccccaaagctcaggctattgttaaatcaataatgttgtgaagtaaaacaatcagtactgagaaacctggtttgccacagaacaaagacaagaagtatacactaacttgtataaatttatctaggaaaaaaatccttcagaattctaagatgaatttaccaggtgagaatgaataagctatgcaaggtattttgtaatatactgtggacacaacttgcttctgcctcatcctgccttagtgtgcaatctcatttgactatacgataaagtttgcacagtcttacttctgtagaacactggccataggaaatgctgtttttttgtactggactttaccttgatatatgtatatggatgtatgcataaaatcataggacatatgtacttgtggaacaagttggattttttatacaatattaaaattcaccacttcagagaatggtattcagtgcaaaaattcttagtttaactttaaatggaagatatgtatgtatgagaaatggccaacatgcctatgaaaaaaatgctgaatctcatcagtaatcaggaaaatgcaggttaaaacaataccatttttcacccatcagcttagcaaaaatgagtatattttttaacaagtgttggtaaggatgtggaaatgtgaggttcttgtagtaagaatgcaaatggcactctttgtagagtaagtctgttgacatctcataaaactgaaaatgcacacaaccctgtaaatctagcaactgcactcagttgatttcagcccatacatacaaagagacctgcataagaatgttactaggctttgtaaaagcaaaaaataaggaacaacttaaacatcatcagaaggggaactgataaactctggtgtaatccataccacagaaatacaacaccgcatgtacaggaatgtgctacatctatacaaataaatggtcaaactc

SEQ ID NO: 127842 - DNA, 3495 bp, Artificial Sequence
  derived and/or modified sequence
gaactctgaaaaggcggggcagcgggcctgcagctcctggagttcagggagacccggaaatctcaccctgccctcttcttgtgttgtgtttgtcacagccttgcccctcttgctcgccttgaaaatggaaaagatgctcgcaggctgctttctgctgatcctcggacagatcgtcctcctccctgccgaggccagggagcggtcacgtgggaggtccatctctaggggcagacacgctcggacccacccgcagacggcccttctggagagttcctgtgagaacaagcgggcagacctggttttcatcattgacagctctcgcagtgtcaacacccatgactatgcaaaggtcaaggagttcatcgtggacatcttgcaattcttggacattggtcctgatgtcacccgagtgggcctgctccaatatggcagcactgtcaagaatgagttctccctcaagaccttcaagaggaagtccgaggtggagcgtgctgtcaagaggatgcggcatctgtccacgggcaccatgactgggctggccatccagtatgccctgaacatcgcattctcagaagcagagggggcccggcccctgagggagaatgtgccacgggtcataatgatcgtgacagatgggagacctcaggactccgtggccgaggtggctgctaaggcacgggacacgggcatcctaatctttgccattggtgtgggccaggtagacttcaacaccttgaagtccattgggagtgagccccatgaggaccatgtcttccttgtggccaatttcagccagattgagacgctgacctccgtgttccagaagaagttgtgcacggcccatatgtgcagcaccctggagcataactgtgcccacttctgcatcaacatccctggctcatacgtctgcaggtgcaaacaaggctacattctcaactcggatcagacgacttgcagaatccaggatctgtgtgccatggaggaccacaactgtgagcagctctgtgtgaatgtgccgggctccttcgtctgccagtgctacagtggctacgccctggctgaggatgggaagaggtgtgtggctgtggactactgtgcctcagaaaaccacggatgtgaacatgagtgtgtaaatgctgatggctcctacctttgccagtgccatgaaggatttgctcttaacccagataaaaaaacgtgcacaaagatagactactgtgcctcatctaatcacggatgtcagcacgagtgtgttaacacagatgattcctattcctgccactgcctgaaaggctttaccctgaatccagataagaaaacctgcagaaggatcaactactgtgcactgaacaaaccgggctgtgagcatgagtgcgtcaacatggaggagagctactactgccgctgccaccgtggctacactctggaccccaatggcaaaacctgcagccgagtggaccactgtgcacagcaggaccatggctgtgagcagctgtgtctgaacacggaggattccttcgtctgccagtgctcagaaggcttcctcatcaacgaggacctcaagacctgctcccgggtggattactgcctgctgagtgaccatggttgtgaatactcctgtgtcaacatggacagatcctttgcctgtcagtgtcctgagggacacgtgctccgcagcgatgggaagacgtgtgcaaaattggactcttgtgctctgggggaccacggttgtgaacattcgtgtgtaagcagtgaagattcgtttgtgtgccagtgctttgaaggttatatactccgtgaagatggaaaaacctgcagaaggaaagatgtctgccaagctatagaccatggctgtgaacacatttgtgtgaacagtgatgactcatacacgtgcgagtgcttggagggattccggctcgctgaggatgggaaacgctgccgaaggaaggatgtctgcaaatcaacccaccatggctgcgaacacatttgtgttaataatgggaattcctacatctgcaaatgctcagagggatttgttctagctgaggacggaagacggtgcaagaaatgcactgaaggcccaattgacctggtctttgtgatcgatggatccaagagtcttggagaagagaattttgaggtcgtgaagcagtttgtcactggaattatagattccttgacaatttcccccaaagccgctcgagtggggctgctccagtattccacacaggtccacacagagttcactctgagaaacttcaactcagccaaagacatgaaaaaagccgtggcccacatgaaatacatgggaaagggctctatgactgggctggccctgaaacacatgtttgagagaagttttacccaaggagaaggggccaggcccctttccacaagggtgcccagagcagccattgtgttcaccgacggacgggctcaggatgacgtctccgagtgggccagtaaagccaaggccaatggtatcactatgtatgctgttggggtaggaaaagccattgaggaggaactacaagagattgcctctgagcccacaaacaagcatctcttctatgccgaagacttcagcacaatggatgagataagtgaaaaactcaagaaaggcatctgtgaagctctagaagactccgatggaagacaggactctccagcaggggaactgccaaaaacggtccaacagccaacagaatctgagccagtcaccataaatatccaagacctactttcctgttctaattttgcagtgcaacacagatatctgtttgaagaagacaatcttttacggtctacacaaaagctttcccattcaacaaaaccttcaggaagccctttggaagaaaaacacgatcaatgcaaatgtgaaaaccttataatgttccagaaccttgcaaacgaagaagtaagaaaattaacacagcgcttagaagaaatgacacagagaatggaagccctggaaaatcgcctgagatacagatgaagattagaaatcgcgacacatttgtagtcattgtatcacggattacaatgaacgcagtgcagagccccaaagctcaggctattgttaaatcaataatgttgtgaagtaaaacaatcagtactgagaaacctggtttgccacagaacaaagacaagaagtatacactaacttgtataaatttatctaggaaaaaaatccttcagaattctaagatgaatttaccaggtgagaatgaataagctatgcaaggtattttgtaatatactgtggacacaacttgcttctgcctcatcctgccttagtgtgcaatctcatttgactatacgataaagtttgcacagtcttacttctgtagaacactggccataggaaatgctgtttttttgtactggactttaccttgatatatgtatatggatgtatgcataaaatcataggacatatgtacttgtggaacaagttggattttttatacaatattaaaattcaccacttcagag

SEQ ID NO: 127843 - DNA, 2728 bp, Artificial Sequence
  derived and/or modified sequence
agctggggctccgtcctcgcctcccacgagcgatccccgaggagagccgcggccctcggcgaggcgaagaggccgacgaggaagacccgggtgcataactgtgcccacttctgcatcaacatccctggctcatacgtctgcaggtgcaaacaaggctacattctcaactcggatcagacgacttgcagaatccaggatctgtgtgccatggaggaccacaactgtgagcagctctgtgtgaatgtgccgggctccttcgtctgccagtgctacagtggctacgccctggctgaggatgggaagaggtgtgtggctgtggactactgtgcctcagaaaaccacggatgtgaacatgagtgtgtaaatgctgatggctcctacctttgccagtgccatgaaggatttgctcttaacccagataaaaaaacgtgcacaaagatagactactgtgcctcatctaatcacggatgtcagcacgagtgtgttaacacagatgattcctattcctgccactgcctgaaaggctttaccctgaatccagataagaaaacctgcagaaggatcaactactgtgcactgaacaaaccgggctgtgagcatgagtgcgtcaacatggaggagagctactactgccgctgccaccgtggctacactctggaccccaatggcaaaacctgcagccgagtggaccactgtgcacagcaggaccatggctgtgagcagctgtgtctgaacacggaggattccttcgtctgccagtgctcagaaggcttcctcatcaacgaggacctcaagacctgctcccgggtggattactgcctgctgagtgaccatggttgtgaatactcctgtgtcaacatggacagatcctttgcctgtcagtgtcctgagggacacgtgctccgcagcgatgggaagacgtgtgcaaaattggactcttgtgctctgggggaccacggttgtgaacattcgtgtgtaagcagtgaagattcgtttgtgtgccagtgctttgaaggttatatactccgtgaagatggaaaaacctgcagaaggaaagatgtctgccaagctatagaccatggctgtgaacacatttgtgtgaacagtgatgactcatacacgtgcgagtgcttggagggattccggctcgctgaggatgggaaacgctgccgaaggaaggatgtctgcaaatcaacccaccatggctgcgaacacatttgtgttaataatgggaattcctacatctgcaaatgctcagagggatttgttctagctgaggacggaagacggtgcaagaaatgcactgaaggcccaattgacctggtctttgtgatcgatggatccaagagtcttggagaagagaattttgaggtcgtgaagcagtttgtcactggaattatagattccttgacaatttcccccaaagccgctcgagtggggctgctccagtattccacacaggtccacacagagttcactctgagaaacttcaactcagccaaagacatgaaaaaagccgtggcccacatgaaatacatgggaaagggctctatgactgggctggccctgaaacacatgtttgagagaagttttacccaaggagaaggggccaggcccctttccacaagggtgcccagagcagccattgtgttcaccgacggacgggctcaggatgacgtctccgagtgggccagtaaagccaaggccaatggtatcactatgtatgctgttggggtaggaaaagccattgaggaggaactacaagagattgcctctgagcccacaaacaagcatctcttctatgccgaagacttcagcacaatggatgagataagtgaaaaactcaagaaaggcatctgtgaagctctagaagactccgatggaagacaggactctccagcaggggaactgccaaaaacggtccaacagccaacagaatctgagccagtcaccataaatatccaagacctactttcctgttctaattttgcagtgcaacacagatatctgtttgaagaagacaatcttttacggtctacacaaaagctttcccattcaacaaaaccttcaggaagccctttggaagaaaaacacgatcaatgcaaatgtgaaaaccttataatgttccagaaccttgcaaacgaagaagtaagaaaattaacacagcgcttagaagaaatgacacagagaatggaagccctggaaaatcgcctgagatacagatgaagattagaaatcgcgacacatttgtagtcattgtatcacggattacaatgaacgcagtgcagagccccaaagctcaggctattgttaaatcaataatgttgtgaagtaaaacaatcagtactgagaaacctggtttgccacagaacaaagacaagaagtatacactaacttgtataaatttatctaggaaaaaaatccttcagaattctaagatgaatttaccaggtgagaatgaataagctatgcaaggtattttgtaatatactgtggacacaacttgcttctgcctcatcctgccttagtgtgcaatctcatttgactatacgataaagtttgcacagtcttacttctgtagaacactggccataggaaatgctgtttttttgtactggactttaccttgatatatgtatatggatgtatgcataaaatcataggacatatgtacttgtggaacaagttggattttttatacaatattaaaattcaccacttcagagaa

SEQ ID NO: 127844 - DNA, 2874 bp, Artificial Sequence
  derived and/or modified sequence
atggagaagatgctggccggctgcttcctgctgatcctgggccagatagtgctgttgcctgcagaggcccgcgagaggtcgagaggacggagcatatcccgagggcgacacgctcgaacccatccccagaccgcccttttggaaagctcatgcgaaaataagagagcagatcttgtgttcattatcgacagttccagatcagtgaacacacatgactatgctaaagtcaaggaattcatcgtggacattctgcagtttctcgatatcggtcctgacgttacaagagtcgggctgctgcaatatggcagtacagtaaagaatgaattttcactgaagactttcaaaagaaaaagcgaagtcgagagagcagtcaaacggatgagacacctctcaacggggacaatgaccgggcttgctatccagtatgccttgaacattgcctttagcgaagcagaaggagccagaccccttagagagaatgtaccccgagtgattatgatcgtgactgacggccggccccaggactctgtggctgaagtcgctgcaaaggcccgtgacactggcatacttatattcgcaataggggtggggcaggtcgacttcaatacattgaaatctattggaagcgaacctcacgaagaccatgtctttttggtcgccaacttcagccaaatagagacactgacatctgtctttcagaaaaagctgtgtacagcccacatgtgtagtaccttagagcacaactgcgcccatttctgcataaacataccaggcagctatgtgtgccggtgtaaacagggctatatactaaactcagatcagaccacttgtcggattcaagacttatgtgccatggaggaccataactgtgaacagctttgcgttaacgttccagggtcatttgtgtgtcagtgttactccggatatgcactggcagaggatggcaagcgctgcgttgcagtggactactgcgcgtctgaaaaccatggatgcgagcatgaatgtgtgaatgcagatggctcgtacctgtgtcagtgtcacgaggggtttgcccttaaccctgacaagaaaacttgtaccaagatcgactactgcgcaagcagtaatcacggctgccaacatgagtgtgtgaacaccgacgacagctacagttgccactgtctgaaagggttcacactcaatccagataaaaaaacctgtcgccggataaattactgcgcacttaacaagccgggctgcgaacacgaatgcgtcaacatggaggagtcctattattgtcgctgccataggggctataccctcgaccctaacggaaaaacttgctctagggtggatcactgcgcccagcaggaccatgggtgcgagcaactgtgtctcaacaccgaagattcctttgtgtgtcagtgttccgagggttttctcataaacgaagaccttaagacatgctctagagtggattattgcctcctgtctgaccatggctgtgagtactcgtgcgtgaacatggatcgctccttcgcttgtcagtgtccagagggccatgttttgcgctccgacggaaaaacctgtgcaaaactggattcttgcgctctgggggatcacggttgcgaacacagttgcgtgtccagcgaggatagcttcgtttgccagtgtttcgaagggtatattctgcgtgaagatggcaagacttgtcgccgcaaggacgtttgtcaggcaattgaccacgggtgtgagcacatctgcgtcaactctgacgactcatatacctgcgagtgtctagaaggcttcagactggccgaagatggcaaaaggtgccgaaggaaggacgtctgtaaatcaactcatcatggatgcgaacatatctgtgtcaataacggcaattcatacatatgcaagtgcagtgaggggttcgttctcgcagaagatgggcgaagatgcaagaagtgcaccgaaggtccaattgatctggtgttcgtgatcgatggaagtaagagtctgggggaggaaaatttcgaggtggtgaaacaattcgttaccgggatcatcgactccctgactatttccccaaaggctgctagagttggtctcctgcagtacagcacccaggtccatactgagttcactttacggaacttcaattctgcaaaggatatgaagaaagcagtggctcatatgaagtatatggggaaggggagtatgaccggactggcacttaagcacatgttcgagcgaagcttcacacagggggagggagctcggcccctctccacacgcgtgccgagagctgcaattgttttcactgatggacgcgcccaggacgatgtgtctgaatgggcctcaaaggcaaaagctaatggcattaccatgtatgccgtgggcgtcgggaaagcaatcgaggaggaactgcaggagatagcgtcagaaccgacaaataaacacctgttctacgccgaggacttttctacaatggacgaaatctccgaaaagttaaagaagggcatatgtgaggccctggaggacagcgatggaagacaggattcgcctgccggcgagctacccaagaccgttcagcagcccacagaaagtgaacccgtgactattaacatacaggacctgctcagttgttcaaactttgccgttcaacatcggtacctgtttgaggaagataatttgctgcgctctactcagaaactcagccattccacaaagcctagcggctctcctctggaggagaaacacgaccagtgtaagtgtgagaacctgatcatgttccagaacttagctaatgaggaggtccgtaagctgacgcagcgactgctggaagagatgacacagagaatggaggcgttggagaatcggctgagataccgttag

SEQ ID NO: 127845 - DNA, 2871 bp, Artificial Sequence
  derived and/or modified sequence
atggagaagatgctggccggctgcttcctgctgatcctgggccagatcgtgctactgcctgccgaggctagggaaagaagcagagggcgctctattagtcgggggagacatgctcggacccacccacaaacggcgctgctcgaaagctcatgcgagaataagcgggctgacttggtgttcattattgatagttctcgctcagtgaatactcatgactacgctaaggtgaaggaattcattgtggacattctgcaattcttagatattggccctgatgtcactagggtggggctcctccagtatggatccactgtgaaaaatgaatttagcctcaaaacctttaaaaggaaatctgaagtcgagagggccgtcaaacgcatgcgccacctctcaacgggaaccatgaccggactagctattcaatatgccctgaacattgccttctctgaggccgagggagcacgacctttacgggaaaatgttccccgcgtaatcatgatcgttaccgatggccgaccacaggatagcgtcgctgaggtcgccgccaaggcgcgagacacaggtatcctgatatttgccataggcgtggggcaggtggatttcaacacgctcaagagtataggaagtgaaccacacgaagaccacgtttttctagtagccaatttcagccaaatcgagacgttaacctcggtcttccagaaaaagctttgcacagctcacatgtgttcaaccctcgaacataattgcgcgcacttttgcatcaatatacccgggagctacgtgtgtcgttgcaaacaaggttatatattgaactctgatcagactacttgccggatccaggatctctgtgcaatggaggaccataactgtgagcaattgtgcgtcaatgtccctgggagtttcgtgtgccagtgttactctggctatgcgctggcagaagacggcaaacggtgcgtggccgtggattactgcgcttccgaaaatcatgggtgcgagcacgagtgcgtcaacgccgatggttcttacctgtgccaatgccatgaaggctttgccctgaaccccgataagaagacatgtactaaaattgattattgtgcttcctccaaccacgggtgccaacacgagtgtgtcaacaccgatgattcttactcttgccattgcctcaagggctttactttaaatcccgacaagaaaacttgtcgccgcattaattactgcgctctgaacaaacctggctgcgaacacgagtgtgtgaatatggaggagtcctactactgccgatgccaccgaggttacactcttgatcctaatgggaaaacatgcagccgggtggatcactgcgcccagcaggatcatggctgtgagcaattatgcctgaacactgaagatagtttcgtgtgtcagtgcagcgaaggcttcctgatcaacgaagacctaaagacctgtagtagagttgattactgtctgctgtcagaccatgggtgtgagtacagctgcgtcaatatggatagatcattcgcatgtcaatgcccagaagggcatgtgctaaggtccgacgggaagacctgcgccaagctcgattcctgcgccctgggcgaccatggttgcgagcacagctgcgtaagcagtgaggacagtttcgtttgtcagtgctttgaaggctacatactcagagaggacggcaaaacgtgtagaaggaaagacgtgtgtcaagcaattgaccacggttgcgagcacatatgcgtgaacagtgatgacagttacacatgcgaatgcctggagggatttcgcctggcagaagatgggaaaaggtgtagacggaaggacgtgtgcaagtctactcaccacggttgtgaacacatctgtgtcaacaatggcaatagttacatctgtaagtgctccgagggcttcgtgcttgctgaagatggtagaaggtgtaagaagtgtactgagggaccaattgaccttgtgttcgtaatcgatggatcgaagtccttaggagaggagaatttcgaagtcgtgaagcaattcgttaccgggataattgactctcttactatctcccccaaggccgcaagagtgggcctgctccaatactccactcaggtgcacaccgaattcacattgcgtaatttcaatagtgctaaggacatgaagaaggctgtggcccacatgaagtacatgggcaaagggagtatgacaggtctggcccttaagcatatgtttgaaagatcttttacgcaaggcgaaggagcacgtcccctttccaccagggttccgcgggccgctatcgtgtttaccgacgggcgggcacaggacgatgtctctgaatgggcttcaaaagcaaaggctaatgggattactatgtacgcggtcggcgtcggtaaagcgattgaagaggagctacaggagatcgcgtcggagcctaccaacaagcacttgttttacgccgaagacttcagcactatggatgagatatctgaaaaactgaaaaagggaatttgcgaagcgctggaggactccgatggcaggcaggatagcccagcaggcgagctcccaaaaactgtccagcagcccacagagtctgagccggtcaccatcaatatacaggacctccttagctgtagcaactttgccgtacaacacagatatctgttcgaagaagacaatctattacggagtacgcagaagttgtctcactcaactaagccttctgggtcacctctggaggagaagcatgaccaatgcaagtgtgagaatttgatcatgtttcaaaacctggccaatgaggaggtcaggaaactcacacagcgcctggaagagatgacacagagaatggaggccctcgaaaaccgtcttcgctacaggtag

SEQ ID NO: 127846 - DNA, 2019 bp, Artificial Sequence
  derived and/or modified sequence
atggaggaccacaactgcgagcagctgtgcgtgaacgtgcccggctcctttgtctgccagtgttactccgggtacgcactggctgaagacgggaagcggtgcgtggcagtggattactgtgctagcgagaaccacggctgtgaacacgagtgtgtcaacgccgatgggtcctatctgtgccagtgtcatgagggttttgccctaaatccggacaagaaaacttgcactaagatcgactattgtgcctcatccaaccatggctgtcaacatgaatgcgtcaacacagacgattcatattcttgccactgccttaaaggcttcacgctcaaccctgacaagaagacctgccgccgcatcaactactgcgcactgaacaagcccgggtgtgagcacgagtgtgtgaatatggaggagtcatactattgtcgctgccaccggggctataccctagaccccaacggcaagacatgcagcagggttgatcattgtgcccagcaggatcatggctgcgaacagttgtgcctgaacactgaggactcgtttgtgtgtcagtgttcggaaggctttcttataaacgaggacctcaaaacctgttctagggtcgactattgcttgctcagcgaccacgggtgcgagtattcttgtgtcaatatggaccggtccttcgcttgccagtgtcccgaaggtcacgtcctgaggagtgacggcaagacctgcgccaaactcgatagttgtgctttgggcgatcatggatgcgagcactcctgtgtctcaagtgaggattccttcgtgtgtcagtgctttgaaggatacatcctcagagaagacgggaaaacctgcaggagaaaagacgtatgccaggcaattgaccatggatgcgaacacatatgcgtcaatagcgacgatagctatacatgcgagtgtctggaaggtttccgactggccgaggacgggaagaggtgccgccgcaaagacgtgtgcaagtccactcaccacggatgcgagcacatttgcgtgaataacggcaacagttatatttgtaaatgctccgagggctttgttctggccgaggacggtcgccggtgtaaaaaatgtacggagggccccattgatttggtgttcgtcattgatggctctaagtccttgggggaagagaacttcgaggtggttaagcaattcgtgacaggtataatcgactctctgaccatttcgccgaaagctgcccgagtagggctcctgcaatattctacacaagtacacactgagtttacattacggaattttaattcagcaaaggacatgaaaaaggccgtggcccatatgaaatatatgggtaagggctccatgactgggttggccctgaaacatatgtttgaacgctcatttacccaaggcgagggggcacggcctctgtccacccgggtcccaagggccgccatcgtgttcacagacggaagagctcaggatgatgtgagtgagtgggcctccaaagctaaggctaatggcatcacaatgtacgctgtcggtgtgggaaaggctatcgaggaggagctacaggaaatcgcttcagagccaacgaataaacatctcttttatgcagaggacttctctaccatggacgagatctctgaaaaactgaaaaaaggaatttgcgaggcgctggaggatagcgatggacggcaagattcccccgcaggggagctgcctaagactgtacagcagccgacagagtctgaacctgtgaccataaatatccaggacctactgtcttgcagcaattttgctgttcagcatcgttatctatttgaagaagacaacttgctgagatcaacacagaaactgtcccacagcactaaaccttctggctctcctcttgaggagaagcacgaccaatgcaagtgtgagaacctaattatgtttcagaatctggcaaacgaggaggtgcgaaagttaacgcagaggttagaagaaatgacccagaggatggaggctctggagaatcggctgcgatataggtag

SEQ ID NO: 127847 - DNA, 2874 bp, Artificial Sequence
  derived and/or modified sequence
atggagaagatgctggccggatgtttcctgttgatactgggacagattgtgctgttgccagccgaggccagagagcgttctcggggaaggtctatttcccggggacggcatgcacgcacccacccccaaacagctctgctggaatcgagctgtgagaataaaagagctgatctggtgttcatcattgattctagtcgcagcgtgaacacccacgactatgcaaaggtcaaagagttcattgtggatatactgcagtttctagacattggcccagacgttacacgcgtaggcctgttacaatatggaagtactgtgaaaaacgagttttctctgaagacgttcaaaaggaagagtgaagtcgagagggccgtgaaacgcatgaggcatctttccacaggaactatgaccggattggctattcagtatgctttgaatatcgctttttctgaagccgaaggagccagacctttgcgcgagaacgtccctcgggttataatgattgttacggatggcaggccgcaggattctgtggccgaggtggccgcaaaagcgcgtgacaccggcattttgatctttgccatcggcgtgggacaggttgactttaatacgctgaaaagtattggatcagagcctcacgaggatcatgtcttcctagttgcgaacttctcccaaattgagactctgacttcggtgtttcaaaagaagctgtgcactgcccatatgtgttcaactcttgaacataattgcgcacacttctgtattaatatcccgggaagctacgtttgtcgttgcaagcagggttatatcttgaattcagatcaaacaacatgccgaatccaggacctgtgcgcgatggaggaccacaattgcgagcagttgtgcgtgaatgtaccaggctccttcgtctgccaatgctattccggttacgccttggcagaagacgggaagcgatgcgtggccgtggactactgcgcctccgaaaatcacggatgtgaacacgagtgcgtaaacgctgatggctcgtacctgtgtcaatgtcatgagggtttcgcgctcaatccagacaagaagacatgtactaagatcgactactgcgcctcttcaaaccatggatgccagcacgagtgcgtcaacaccgatgattcttactcatgccattgcctgaagggctttaccctgaacccggacaagaagacttgtcgccgaataaattactgtgcattaaacaagccaggctgtgagcacgaatgcgtaaatatggaggaatcttattactgtcggtgtcatcggggatatacgttggatcctaacggaaaaacttgcagcagggttgatcactgtgcccagcaggatcacggatgtgagcagttgtgcctgaacaccgaagacagtttcgtatgccagtgttccgagggattcctgattaatgaggatctgaagacgtgcagtagggttgattattgtctactcagcgatcacggttgcgagtacagttgcgttaacatggaccggagtttcgcatgccagtgtccggaaggacatgtccttcggagcgacggtaaaacttgcgctaaactggattcctgtgcgctgggggatcacggatgcgaacactcatgcgtgtcaagcgaggactccttcgtgtgtcaatgtttcgaagggtatattctccgcgaggacggcaagacctgcagaagaaaggatgtgtgccaagctatcgaccacggctgtgagcacatctgtgtgaacagcgatgacagctatacctgtgaatgcctggagggattccggctagctgaggatggtaagagatgccgacggaaagatgtctgtaagagtactcaccacggctgcgaacatatctgtgtgaacaatgggaactcctacatttgcaaatgttccgagggcttcgtgctggccgaagacggccgacgttgcaaaaagtgtactgagggtcctattgacctggttttcgtgatcgatggctccaagtccttaggcgaagagaattttgaggtggtgaaacagttcgtgactggaatcatcgattcgctgacaattagccccaaggctgccagagtggggctgttacagtatagcactcaggtacacacagaattcacactgcggaatttcaatagcgcaaaagacatgaagaaggccgtcgcccatatgaaatatatgggaaagggcagcatgaccgggttagccctgaagcacatgttcgagagaagcttcacccaaggtgagggtgctagacccctatccacacgtgtcccgagggccgctatcgtgttcactgacggcagggcccaggacgatgtttctgagtgggcctccaaagcaaaggcaaacggaataacaatgtacgccgtcggggtgggaaaggcaattgaggaagaattgcaggagatcgcctccgaaccaaccaataaacatctgttttacgcggaagatttcagtacaatggacgagatctctgaaaagttgaaaaagggcatctgcgaggccttagaggacagtgatgggcgacaggattcacccgctggggaactgcccaaaacagtccaacagccgactgaatctgaacctgttacgattaatatacaggacctcctatcctgctccaattttgccgtccagcacagatatctgttcgaggaagataatctgcttagaagcactcagaagctaagtcacagcacaaaaccgagcggctctcctctcgaggagaaacacgaccagtgcaagtgcgaaaacttgattatgtttcagaaccttgcaaatgaggaagtgcgtaaacttacccagcgcctgctggaggagatgacccagaggatggaagccttggagaatagacttcgttacagatag

SEQ ID NO: 127848 - DNA, 2871 bp, Artificial Sequence
  derived and/or modified sequence
atggagaagatgcttgccggatgttttctgctcattctagggcagattgtgctcctgcccgcagaagccagggaaaggagcaggggccgatctataagtaggggcaggcatgccaggacccatccacagactgcactgctggagtcttcctgcgaaaacaagcgagccgacctggtcttcatcattgatagttctagaagcgtcaatactcacgattatgcaaaagtcaaagagttcatcgtggacatccttcagttcttggatattggccctgacgtgacaagagtgggactgctgcagtacggatccacggtcaagaatgagttctccctgaaaacttttaagaggaagtcagaggtggaaagggccgtgaagagaatgaggcatctcagtaccgggacgatgaccgggctggccatccagtacgccttaaacatcgcctttagcgaggcagagggtgctaggcccctaagagaaaacgtccctcgggtcattatgatagtcacagacggcagaccacaggattcagttgccgaagtcgccgctaaggcccgtgacacaggcatcctgatttttgccatcggagtcgggcaggtcgacttcaacactctgaaaagcatcggcagcgaaccgcacgaagaccatgttttcctggtggctaatttttcccagatcgagacgctcacgtcagtcttccagaagaagctctgcacagcacacatgtgcagtactctggagcataattgtgctcatttttgcatcaatataccaggctcttacgtctgtagatgcaagcaggggtatatcctgaactccgatcagaccacatgtcgaatacaagatttatgcgccatggaggaccacaactgcgagcagctttgcgttaatgtgcccggaagctttgtgtgtcagtgctactccggatatgcactcgcggaggatggaaaaagatgtgtggccgtggattactgcgctagtgaaaaccacgggtgcgaacacgagtgtgtaaatgcagacggttcctatctgtgtcagtgccatgagggttttgctctaaaccccgataaaaagacttgcacaaagatcgattattgcgcgtcttctaaccacggttgccaacacgagtgtgtgaacacagacgacagttactcctgtcattgcctcaaaggatttactctgaaccctgataagaagacttgcagaagaatcaactattgtgccctgaataagccaggttgcgaacacgagtgcgtgaacatggaagaatcctattactgtcggtgtcaccgtgggtataccttggaccctaacgggaagacctgctcgagagtggaccattgcgctcagcaagatcacgggtgtgagcagctctgtcttaacaccgaggatagcttcgtgtgtcagtgctctgaaggattcctgatcaacgaggaccttaagacctgcagcagggttgattactgcctgctgagcgatcatggatgtgaatattcctgtgtgaatatggatcgcagcttcgcatgccagtgtcccgaaggccacgtcctccgaagcgacggtaagacatgtgcaaaattggattcttgtgcactcggggaccacggctgcgagcattcttgtgtgagctctgaggactctttcgtttgccagtgttttgagggctacattctccgagaagacgggaagacctgccgacggaaggacgtatgccaggccatcgatcacggatgtgagcacatatgcgtgaacagcgacgatagttacacctgtgagtgcctggagggcttcaggttggcagaggatggaaagcgctgccggagaaaagacgtctgtaagtcaactcatcacggctgtgagcacatatgcgtaaacaacggaaatagttacatctgcaagtgcagcgaggggttcgtactcgccgaggatggtagaaggtgcaagaaatgtactgaaggaccaattgatctggtgtttgtgattgatggatcaaagagtctgggcgaggaaaacttcgaagtggtcaagcagtttgtgacgggcatcattgacagcctgactatctcgcccaaggctgcaagggtgggccttctgcagtactctactcaagtgcacaccgaatttacactgagaaatttcaacagcgctaaggacatgaagaaggccgtggcgcatatgaagtatatgggtaagggttcaatgacaggcttggctctcaaacacatgtttgaaaggagtttcacccagggtgagggggcacgccctcttagcacccgtgttccacgggctgccatcgtgttcacggacggaagagcccaagatgatgtgagcgagtgggcgtcgaaggccaaggccaacggcataaccatgtatgctgtgggcgtcggaaaagctatcgaggaagagctgcaggagatagcaagcgagcctactaacaagcatctcttctatgccgaagacttctccaccatggatgagataagtgaaaagttaaaaaagggcatatgcgaggcactggaagacagcgatggtcgccaggacagtccggctggggagctgcccaaaactgtgcagcagccaacggaatcagagccagttacaattaacattcaggacctgctgtcttgcagcaacttcgccgtccagcataggtatctcttcgaagaagataacctgttaaggtccacacaaaagttgtcccattctacaaagccatccggcagtccactcgaggagaagcatgatcagtgtaagtgtgagaaccttatcatgtttcagaatctcgctaatgaagaggttcgcaaacttacccagcgcctcgaagaaatgactcagcgcatggaggccctggaaaaccgccttcgataccgctag

SEQ ID NO: 127849 - DNA, 2019 bp, Artificial Sequence
  derived and/or modified sequence
atggaagaccataactgtgaacagctgtgtgttaatgtccctgggagcttcgtttgccagtgttacagcgggtacgcactggccgaagacggcaagagatgtgtagccgtcgactactgcgccagcgaaaatcatggctgcgaacatgaatgcgtcaatgcagacgggtcttacctatgtcagtgccacgagggctttgctctgaatcctgacaaaaaaacttgcaccaagatcgactactgcgccagttctaaccatggttgtcaacatgaatgcgtgaatacagatgatagctattcctgtcactgtctcaagggatttacattaaatccagacaagaaaacatgccggagaataaattattgtgctctcaacaaacctgggtgcgaacacgaatgtgttaacatggaggaatcctactactgccggtgccataggggctatacactcgaccctaatggaaagacatgcagccgggtggaccattgtgcacaacaggatcatggctgcgaacagctgtgcctgaatactgaagattcttttgtttgccagtgctctgagggcttcctcatcaacgaagatcttaagacttgctcacgcgttgactactgcctgttgtcggatcacggatgtgagtatagctgcgtaaatatggacagaagttttgcctgccagtgccctgagggacatgtgctgagatccgacggcaagacgtgcgcaaaactggatagctgtgcccttggcgatcacggttgcgaacacagctgcgtgagttctgaggacagctttgtgtgtcagtgttttgaggggtatatcctgagagaggatggtaagacttgcagacgcaaggatgtttgtcaggctatcgaccacgggtgcgagcatatctgcgtgaatagcgatgactcctacacctgcgagtgtctggagggattcaggcttgcggaggacgggaagcggtgtagacgcaaagacgtgtgtaaatcaacacatcacggttgtgaacatatctgtgttaataacggcaactcttatatttgtaagtgctcagaaggttttgtcctcgcagaggatggaagacgatgcaagaaatgcacagaagggcctattgacctggtttttgtcattgatgggagtaagagtctgggtgaggagaattttgaggttgtaaaacagtttgtcacgggaatcatcgattcactgacaataagccctaaggctgctcgggttggtcttttacagtattctacacaggttcataccgagttcaccctgaggaacttcaacagtgctaaagacatgaagaaggcggtggcacacatgaagtatatggggaaggggtccatgacaggtctcgcactcaaacacatgtttgaaagatcctttactcaaggcgagggggctaggcctttgagtacccgcgtccctcgggctgctatcgtttttacagatggacgagcgcaggacgatgtgagtgaatgggcttctaaggcgaaggcaaatggaatcaccatgtacgctgtcggcgtcggtaaggctattgaagaagaactgcaagagattgcctccgagcctacgaataagcacctcttttacgccgaagacttttccacgatggacgagatctctgagaaattgaagaagggtatatgcgaggcattggaagacagtgatggcaggcaggatagccccgctggggagttgccaaagactgtacaacagccaaccgagagtgaaccagtcactataaacattcaggacctgttgtcctgttccaatttcgcagtccagcaccggtacttgttcgaagaggataacctcctgcggagtacccagaagctgtcccacagtacaaagccctccggtagtcctctggaggagaaacatgaccagtgcaagtgtgaaaacctgattatgttccagaatctcgccaacgaagaggttcggaaattaacacagagactggaggagatgacccagcgaatggaagccctcgaaaaccgtttgcgataccgctag

SEQ ID NO: 127850 - DNA, 2874 bp, Artificial Sequence
  derived and/or modified sequence
atggagaagatgctggccggctgcttcctgctgatcctgggccagatcgtgctgctgcccgccgaggccagagagagaagcagaggcagaagcatcagcagaggcagacacgccagaacccacccccagaccgccctgctggagagcagctgcgagaacaagagagccgacctggtgttcatcatcgacagcagcagaagcgtgaacacccacgactacgccaaggtgaaggagttcatcgtggacatcctgcagttcctggacatcggccccgacgtgaccagagtgggcctgctgcagtacggcagcaccgtgaagaacgagttcagcctgaagaccttcaagagaaagagcgaggtggagagagccgtgaagagaatgagacacctgagcaccggcaccatgaccggcctggccatccagtacgccctgaacatcgccttcagcgaggccgagggcgccagacccctgagagagaacgtgcccagagtgatcatgatcgtgaccgacggcagaccccaggacagcgtggccgaggtggccgccaaggccagagacaccggcatcctgatcttcgccatcggcgtgggccaggtggacttcaacaccctgaagagcatcggcagcgagccccacgaggaccacgtgttcctggtggccaacttcagccagatcgagaccctgaccagcgtgttccagaagaagctgtgcaccgcccacatgtgcagcaccctggagcacaactgcgcccacttctgcatcaacatccccggcagctacgtgtgcagatgcaagcagggctacatcctgaacagcgaccagaccacctgcagaatccaggacctgtgcgccatggaggaccacaactgcgagcagctgtgcgtgaacgtgcccggcagcttcgtgtgccagtgctacagcggctacgccctggccgaggacggcaagagatgcgtggccgtggactactgcgccagcgagaaccacggctgcgagcacgagtgcgtgaacgccgacggcagctacctgtgccagtgccacgagggcttcgccctgaaccccgacaagaagacctgcaccaagatcgactactgcgccagcagcaaccacggctgccagcacgagtgcgtgaacaccgacgacagctacagctgccactgcctgaagggcttcaccctgaaccccgacaagaagacctgcagaagaatcaactactgcgccctgaacaagcccggctgcgagcacgagtgcgtgaacatggaggagagctactactgcagatgccacagaggctacaccctggaccccaacggcaagacctgcagcagagtggaccactgcgcccagcaggaccacggctgcgagcagctgtgcctgaacaccgaggacagcttcgtgtgccagtgcagcgagggcttcctgatcaacgaggacctgaagacctgcagcagagtggactactgcctgctgagcgaccacggctgcgagtacagctgcgtgaacatggacagaagcttcgcctgccagtgccccgagggccacgtgctgagaagcgacggcaagacctgcgccaagctggacagctgcgccctgggcgaccacggctgcgagcacagctgcgtgagcagcgaggacagcttcgtgtgccagtgcttcgagggctacatcctgagagaggacggcaagacctgcagaagaaaggacgtgtgccaggccatcgaccacggctgcgagcacatctgcgtgaacagcgacgacagctacacctgcgagtgcctggagggcttcagactggccgaggacggcaagagatgcagaagaaaggacgtgtgcaagagcacccaccacggctgcgagcacatctgcgtgaacaacggcaacagctacatctgcaagtgcagcgagggcttcgtgctggccgaggacggcagaagatgcaagaagtgcaccgagggccccatcgacctggtgttcgtgatcgacggcagcaagagcctgggcgaggagaacttcgaggtggtgaagcagttcgtgaccggcatcatcgacagcctgaccatcagccccaaggccgccagagtgggcctgctgcagtacagcacccaggtgcacaccgagttcaccctgagaaacttcaacagcgccaaggacatgaagaaggccgtggcccacatgaagtacatgggcaagggcagcatgaccggcctggccctgaagcacatgttcgagagaagcttcacccagggcgagggcgccagacccctgagcaccagagtgcccagagccgccatcgtgttcaccgacggcagagcccaggacgacgtgagcgagtgggccagcaaggccaaggccaacggcatcaccatgtacgccgtgggcgtgggcaaggccatcgaggaggagctgcaggagatcgccagcgagcccaccaacaagcacctgttctacgccgaggacttcagcaccatggacgagatcagcgagaagctgaagaagggcatctgcgaggccctggaggacagcgacggcagacaggacagccccgccggcgagctgcccaagaccgtgcagcagcccaccgagagcgagcccgtgaccatcaacatccaggacctgctgagctgcagcaacttcgccgtgcagcacagatacctgttcgaggaggacaacctgctgagaagcacccagaagctgagccacagcaccaagcccagcggcagccccctggaggagaagcacgaccagtgcaagtgcgagaacctgatcatgttccagaacctggccaacgaggaggtgagaaagctgacccagagactgctggaggagatgacccagagaatggaggccctggagaacagactgagatacagatag

SEQ ID NO: 127851 - DNA, 2871 bp, Artificial Sequence
  derived and/or modified sequence
atggagaagatgctggccggctgcttcctgctgatcctgggccagatcgtgctgctgcccgccgaggccagagagagaagcagaggcagaagcatcagcagaggcagacacgccagaacccacccccagaccgccctgctggagagcagctgcgagaacaagagagccgacctggtgttcatcatcgacagcagcagaagcgtgaacacccacgactacgccaaggtgaaggagttcatcgtggacatcctgcagttcctggacatcggccccgacgtgaccagagtgggcctgctgcagtacggcagcaccgtgaagaacgagttcagcctgaagaccttcaagagaaagagcgaggtggagagagccgtgaagagaatgagacacctgagcaccggcaccatgaccggcctggccatccagtacgccctgaacatcgccttcagcgaggccgagggcgccagacccctgagagagaacgtgcccagagtgatcatgatcgtgaccgacggcagaccccaggacagcgtggccgaggtggccgccaaggccagagacaccggcatcctgatcttcgccatcggcgtgggccaggtggacttcaacaccctgaagagcatcggcagcgagccccacgaggaccacgtgttcctggtggccaacttcagccagatcgagaccctgaccagcgtgttccagaagaagctgtgcaccgcccacatgtgcagcaccctggagcacaactgcgcccacttctgcatcaacatccccggcagctacgtgtgcagatgcaagcagggctacatcctgaacagcgaccagaccacctgcagaatccaggacctgtgcgccatggaggaccacaactgcgagcagctgtgcgtgaacgtgcccggcagcttcgtgtgccagtgctacagcggctacgccctggccgaggacggcaagagatgcgtggccgtggactactgcgccagcgagaaccacggctgcgagcacgagtgcgtgaacgccgacggcagctacctgtgccagtgccacgagggcttcgccctgaaccccgacaagaagacctgcaccaagatcgactactgcgccagcagcaaccacggctgccagcacgagtgcgtgaacaccgacgacagctacagctgccactgcctgaagggcttcaccctgaaccccgacaagaagacctgcagaagaatcaactactgcgccctgaacaagcccggctgcgagcacgagtgcgtgaacatggaggagagctactactgcagatgccacagaggctacaccctggaccccaacggcaagacctgcagcagagtggaccactgcgcccagcaggaccacggctgcgagcagctgtgcctgaacaccgaggacagcttcgtgtgccagtgcagcgagggcttcctgatcaacgaggacctgaagacctgcagcagagtggactactgcctgctgagcgaccacggctgcgagtacagctgcgtgaacatggacagaagcttcgcctgccagtgccccgagggccacgtgctgagaagcgacggcaagacctgcgccaagctggacagctgcgccctgggcgaccacggctgcgagcacagctgcgtgagcagcgaggacagcttcgtgtgccagtgcttcgagggctacatcctgagagaggacggcaagacctgcagaagaaaggacgtgtgccaggccatcgaccacggctgcgagcacatctgcgtgaacagcgacgacagctacacctgcgagtgcctggagggcttcagactggccgaggacggcaagagatgcagaagaaaggacgtgtgcaagagcacccaccacggctgcgagcacatctgcgtgaacaacggcaacagctacatctgcaagtgcagcgagggcttcgtgctggccgaggacggcagaagatgcaagaagtgcaccgagggccccatcgacctggtgttcgtgatcgacggcagcaagagcctgggcgaggagaacttcgaggtggtgaagcagttcgtgaccggcatcatcgacagcctgaccatcagccccaaggccgccagagtgggcctgctgcagtacagcacccaggtgcacaccgagttcaccctgagaaacttcaacagcgccaaggacatgaagaaggccgtggcccacatgaagtacatgggcaagggcagcatgaccggcctggccctgaagcacatgttcgagagaagcttcacccagggcgagggcgccagacccctgagcaccagagtgcccagagccgccatcgtgttcaccgacggcagagcccaggacgacgtgagcgagtgggccagcaaggccaaggccaacggcatcaccatgtacgccgtgggcgtgggcaaggccatcgaggaggagctgcaggagatcgccagcgagcccaccaacaagcacctgttctacgccgaggacttcagcaccatggacgagatcagcgagaagctgaagaagggcatctgcgaggccctggaggacagcgacggcagacaggacagccccgccggcgagctgcccaagaccgtgcagcagcccaccgagagcgagcccgtgaccatcaacatccaggacctgctgagctgcagcaacttcgccgtgcagcacagatacctgttcgaggaggacaacctgctgagaagcacccagaagctgagccacagcaccaagcccagcggcagccccctggaggagaagcacgaccagtgcaagtgcgagaacctgatcatgttccagaacctggccaacgaggaggtgagaaagctgacccagagactggaggagatgacccagagaatggaggccctggagaacagactgagatacagatag

SEQ ID NO: 127852 - DNA, 2019 bp, Artificial Sequence
  derived and/or modified sequence
atggaggaccacaactgcgagcagctgtgcgtgaacgtgcccggcagcttcgtgtgccagtgctacagcggctacgccctggccgaggacggcaagagatgcgtggccgtggactactgcgccagcgagaaccacggctgcgagcacgagtgcgtgaacgccgacggcagctacctgtgccagtgccacgagggcttcgccctgaaccccgacaagaagacctgcaccaagatcgactactgcgccagcagcaaccacggctgccagcacgagtgcgtgaacaccgacgacagctacagctgccactgcctgaagggcttcaccctgaaccccgacaagaagacctgcagaagaatcaactactgcgccctgaacaagcccggctgcgagcacgagtgcgtgaacatggaggagagctactactgcagatgccacagaggctacaccctggaccccaacggcaagacctgcagcagagtggaccactgcgcccagcaggaccacggctgcgagcagctgtgcctgaacaccgaggacagcttcgtgtgccagtgcagcgagggcttcctgatcaacgaggacctgaagacctgcagcagagtggactactgcctgctgagcgaccacggctgcgagtacagctgcgtgaacatggacagaagcttcgcctgccagtgccccgagggccacgtgctgagaagcgacggcaagacctgcgccaagctggacagctgcgccctgggcgaccacggctgcgagcacagctgcgtgagcagcgaggacagcttcgtgtgccagtgcttcgagggctacatcctgagagaggacggcaagacctgcagaagaaaggacgtgtgccaggccatcgaccacggctgcgagcacatctgcgtgaacagcgacgacagctacacctgcgagtgcctggagggcttcagactggccgaggacggcaagagatgcagaagaaaggacgtgtgcaagagcacccaccacggctgcgagcacatctgcgtgaacaacggcaacagctacatctgcaagtgcagcgagggcttcgtgctggccgaggacggcagaagatgcaagaagtgcaccgagggccccatcgacctggtgttcgtgatcgacggcagcaagagcctgggcgaggagaacttcgaggtggtgaagcagttcgtgaccggcatcatcgacagcctgaccatcagccccaaggccgccagagtgggcctgctgcagtacagcacccaggtgcacaccgagttcaccctgagaaacttcaacagcgccaaggacatgaagaaggccgtggcccacatgaagtacatgggcaagggcagcatgaccggcctggccctgaagcacatgttcgagagaagcttcacccagggcgagggcgccagacccctgagcaccagagtgcccagagccgccatcgtgttcaccgacggcagagcccaggacgacgtgagcgagtgggccagcaaggccaaggccaacggcatcaccatgtacgccgtgggcgtgggcaaggccatcgaggaggagctgcaggagatcgccagcgagcccaccaacaagcacctgttctacgccgaggacttcagcaccatggacgagatcagcgagaagctgaagaagggcatctgcgaggccctggaggacagcgacggcagacaggacagccccgccggcgagctgcccaagaccgtgcagcagcccaccgagagcgagcccgtgaccatcaacatccaggacctgctgagctgcagcaacttcgccgtgcagcacagatacctgttcgaggaggacaacctgctgagaagcacccagaagctgagccacagcaccaagcccagcggcagccccctggaggagaagcacgaccagtgcaagtgcgagaacctgatcatgttccagaacctggccaacgaggaggtgagaaagctgacccagagactggaggagatgacccagagaatggaggccctggagaacagactgagatacagatag

SEQ ID NO: 127853 - protein, 486 aa, Artificial Sequence
  derived and/or modified sequence
MPRPAPARRLPGLLLLLWPLLLLPSAAPDPVARPGFRRLETRGPGGSPGRRPSPAAPDGAPASGTSEPGRARGAGVCKSRPLDLVFIIDSSRSVRPLEFTKVKTFVSRIIDTLDIGPADTRVAVVNYASTVKIEFQLQAYTDKQSLKQAVGRITPLSTGTMSGLAIQTAMDEAFTVEAGAREPSSNIPKVAIIVTDGRPQDQVNEVAARAQASGIELYAVGVDRADMASLKMMASEPLEEHVFYVETYGVIEKLSSRFQETFCALDPCVLGTHQCQHVCISDGEGKHHCECSQGYTLNADKKTCSALDRCALNTHGCEHICVNDRSGSYHCECYEGYTLNEDRKTCSAQDKCALGTHGCQHICVNDRTGSHHCECYEGYTLNADKKTCSVRDKCALGSHGCQHICVSDGAASYHCDCYPGYTLNEDKKTCSATEEARRLVSTEDACGCEATLAFQDKVSSYLQRLNTKLDDILEKLKINEYGQIHR

SEQ ID NO: 127854 - protein, 444 aa, Artificial Sequence
  derived and/or modified sequence
MPRPAPARRLPGLLLLLWPLLLLPSAAPDPVARPGFRRLETRGPGGSPGRRPSPAAPDGAPASGTSEPGRARGAGVCKSRPLDLVFIIDSSRSVRPLEFTKVKTFVSRIIDTLDIGPADTRVAVVNYASTVKIEFQLQAYTDKQSLKQAVGRITPLSTGTMSGLAIQTAMDEAFTVEAGAREPSSNIPKVAIIVTDGRPQDQVNEVAARAQASGIELYAVGVDRADMASLKMMASEPLEEHVFYVETYGVIEKLSSRFQETFCALDRCALNTHGCEHICVNDRSGSYHCECYEGYTLNEDRKTCSAQDKCALGTHGCQHICVNDRTGSHHCECYEGYTLNADKKTCSVRDKCALGSHGCQHICVSDGAASYHCDCYPGYTLNEDKKTCSATEEARRLVSTEDACGCEATLAFQDKVSSYLQRLNTKLDDILEKLKINEYGQIHR

SEQ ID NO: 127855 - DNA, 1461 bp, Artificial Sequence
  derived and/or modified sequence
atgccacgacctgcccccgcgagacgtttgccagggttactgctcctgttgtggcctctcctcctcttaccgagcgccgcacccgatccagtcgcgcgcccaggttttagacgtctcgagacccggggccccggaggaagccctggtagaaggccatccccagctgcaccagacggcgccccggcgtctgggactagcgaacctggcagagctcgcggtgccggggtatgtaaaagtcggcccctcgacctggtgtttattattgattcctccagatcagtgaggcctctagagtttacaaaagttaaaacttttgtgagccggataatcgacaccctggacattgggcccgccgatacacgtgtcgccgtcgtgaattacgccagcacagtgaagatcgaattccaactgcaggcctatacagacaagcaatctctgaagcaagcagtgggaaggatcaccccccttagcacgggaactatgtccggcctggctatccagactgcaatggatgaagcctttaccgtcgaggcgggagcgagggaaccatcctcaaacattcctaaagtcgccatcatagtgactgatggccggcctcaagatcaggttaatgaagttgccgcccgggcacaggcctctggtattgagctgtatgcagtgggagtagatcgggccgacatggctagccttaagatgatggcaagtgagccactggaggaacatgtgttttacgtggaaacatacggagtcattgagaagctgagtagccgctttcaggagaccttttgcgccctggacccttgcgtgctgggaacacatcagtgtcagcacgtgtgtatttctgatggtgagggtaagcaccattgcgagtgctcacagggatacacgttgaacgctgacaagaaaacctgctcagcactcgacaggtgcgccctgaatactcatgggtgtgaacatatttgtgtgaatgaccgcagcggatcataccattgtgaatgctacgaaggatacaccctaaatgaagaccgcaaaacttgcagcgcccaggataagtgcgccttaggaactcacggatgccaacacatatgtgtgaatgacaggaccgggagtcatcactgtgagtgctatgagggatatacgctgaatgccgataaaaaaacgtgctccgtgcgagacaaatgcgctctgggttcacacggctgtcagcacatctgcgtatcagacggagccgcctcctaccattgtgactgttatcccggctacacacttaacgaggataaaaagacctgcagcgctacagaagaggccaggcgcctagtgagcactgaggatgcttgtgggtgcgaagcgactcttgcgttccaggataaggtaagctcctatctgcaacgcttgaataccaaactggacgacatactcgagaagctgaaaataaacgagtacggccaaatacaccgctag

SEQ ID NO: 127856 - DNA, 1335 bp, Artificial Sequence
  derived and/or modified sequence
atgccacgccctgccccagcacgccgccttcccggactcctcctgcttctgtggccattattgctcctgccttccgctgcgccagatcccgtggcaaggccagggtttaggagactggagactagaggtcccggcggatctcccggccgtcgcccaagtcccgccgcaccagacggggcaccggccagcggcacctccgaacccggtcgagcacgcggcgctggagtgtgcaagtcccgccctctggacctagtgttcatcatagattcatctcggtctgttaggcctcttgagtttacaaaagtgaagacatttgtgagcagaattattgatacgctggacattggccccgcagataccagggtagccgtcgtaaattatgccagtaccgtcaagatcgagtttcagctccaggcttacactgacaaacagtctcttaaacaggccgtcggcaggataacgcccctgtcaaccggtactatgagtggtctggccatccagaccgcaatggatgaagcctttactgtagaggctggtgcacgagaacctagctccaatatccctaaggttgctatcatcgtgactgatggaagaccccaggaccaggtgaacgaggtggctgccagggcacaggcgagcggtattgagttgtacgccgttggcgtggatcgcgctgatatggcttccctgaagatgatggccagtgaacccttagaggagcatgttttttatgtggaaacatatggcgtgatcgagaaactgagtagtaggtttcaagaaaccttttgtgcattggaccgctgcgctctgaatactcatggctgtgaacatatctgcgttaatgacaggagcgggtcataccattgcgagtgttacgagggatacacgctaaatgaggaccgtaaaacgtgttccgctcaagacaagtgcgctctcgggacccatggatgtcagcatatttgtgttaatgacaggactggctcacaccactgtgagtgctacgaaggctacacccttaacgctgacaagaagacctgtagtgtcagagacaagtgcgccctgggtagccacggatgtcagcacatttgcgtctccgacggagcagcgtcataccactgcgattgctaccctggctatacactgaatgaggataaaaaaacgtgcagcgcaacagaggaggcccgccggctggtctctactgaggacgcttgcggatgtgaagccaccctggccttccaggacaaagtcagttcctatctgcagaggctcaacacaaagttggatgacatccttgagaaactgaagatcaacgagtacggacagattcaccgctag

SEQ ID NO: 127857 - DNA, 1461 bp, Artificial Sequence
  derived and/or modified sequence
atgcccaggcctgccccagcccggcggctgcccggcctgctgctgctgctgtggcccctgctgctgctgcccagcgctgccccagaccctgtggcccggcccggcttccggcggctggagacccggggccctgggggcagccctggccggcggcccagccctgctgccccagatggagccccagccagcggcaccagcgagcccggccgggcccggggggccggcgtgtgcaagagccggcccctggacctggtgttcatcatcgacagcagccgctctgtgcggcccctggagttcaccaaggtgaagacctttgtgagccgcatcatcgacaccctggacatcggccctgctgacaccagggtggccgtggtgaactatgccagcacagtgaagattgagttccagctgcaggcctacacagacaagcagagcctgaagcaggccgtgggccgcatcacccccctgagcacaggcaccatgagcggcctggccatccagacagccatggatgaggccttcaccgtggaggccggggcccgggagcccagcagcaacatccccaaggtggccatcatcgtgacagatggccggccccaggaccaggtgaatgaggtggccgcccgggcccaggccagcggcatcgagctgtatgctgtgggcgtggacagagctgacatggccagcctgaagatgatggccagcgagcccctggaggagcacgtgttctacgtggagacctacggcgtgattgagaagctgagcagccgcttccaggagaccttctgtgccctggacccctgtgtgctgggcacccaccagtgccagcacgtgtgcatcagtgatggagagggcaagcaccactgtgagtgcagccagggctacaccctgaatgctgacaagaagacctgcagcgccctggacagatgtgccctgaacacccacggctgtgagcacatctgtgtgaatgacaggagcggcagctaccactgtgagtgctatgagggctacaccctgaatgaagacaggaagacctgcagcgcccaggacaagtgtgccctgggcacccacggctgccagcacatctgtgtgaatgacagaacaggcagccaccactgtgagtgctatgagggctacaccctgaatgctgacaagaagacctgcagcgtgcgggacaagtgtgccctgggcagccacggctgccagcacatctgtgtgtctgatggagctgccagctaccactgtgactgctacccaggctacaccctgaatgaagacaagaagacctgcagcgccacagaggaggcccggcggctggtgtccacagaagatgcctgtggctgtgaggccaccctggccttccaggacaaggtgagcagctacctgcagaggctgaacaccaagctggatgacatcctggagaagctgaagatcaatgaatatggccagatccacaggtag

SEQ ID NO: 127858 - DNA, 1335 bp, Artificial Sequence
  derived and/or modified sequence
atgcccaggcctgccccagcccggcggctgcccggcctgctgctgctgctgtggcccctgctgctgctgcccagcgctgccccagaccctgtggcccggcccggcttccggcggctggagacccggggccctgggggcagccctggccggcggcccagccctgctgccccagatggagccccagccagcggcaccagcgagcccggccgggcccggggggccggcgtgtgcaagagccggcccctggacctggtgttcatcatcgacagcagccgctctgtgcggcccctggagttcaccaaggtgaagacctttgtgagccgcatcatcgacaccctggacatcggccctgctgacaccagggtggccgtggtgaactatgccagcacagtgaagattgagttccagctgcaggcctacacagacaagcagagcctgaagcaggccgtgggccgcatcacccccctgagcacaggcaccatgagcggcctggccatccagacagccatggatgaggccttcaccgtggaggccggggcccgggagcccagcagcaacatccccaaggtggccatcatcgtgacagatggccggccccaggaccaggtgaatgaggtggccgcccgggcccaggccagcggcatcgagctgtatgctgtgggcgtggacagagctgacatggccagcctgaagatgatggccagcgagcccctggaggagcacgtgttctacgtggagacctacggcgtgattgagaagctgagcagccgcttccaggagaccttctgtgccctggacagatgtgccctgaacacccacggctgtgagcacatctgtgtgaatgacaggagcggcagctaccactgtgagtgctatgagggctacaccctgaatgaagacaggaagacctgcagcgcccaggacaagtgtgccctgggcacccacggctgccagcacatctgtgtgaatgacagaacaggcagccaccactgtgagtgctatgagggctacaccctgaatgctgacaagaagacctgcagcgtgcgggacaagtgtgccctgggcagccacggctgccagcacatctgtgtgtctgatggagctgccagctaccactgtgactgctacccaggctacaccctgaatgaagacaagaagacctgcagcgccacagaggaggcccggcggctggtgtccacagaagatgcctgtggctgtgaggccaccctggccttccaggacaaggtgagcagctacctgcagaggctgaacaccaagctggatgacatcctggagaagctgaagatcaatgaatatggccagatccacaggtag

SEQ ID NO: 127859 - DNA, 2524 bp, Artificial Sequence
  derived and/or modified sequence
aaatccgagcctcgcgtgggctcctggcccccgacggacaccaccaggcccacggagcccaccatgccgcgcccggcccccgcgcgccgcctcccgggactcctcctgctgctctggccgctgctgctgctgccctccgccgcccccgaccccgtggcccgcccgggcttccggaggctggagacccgaggtcccgggggcagccctggacgccgcccctctcctgcggctcccgacggcgcgcccgcttccgggaccagcgagcctggccgcgcccgcggtgcaggtgtttgcaagagcagacccttggacctggtgtttatcattgatagttctcgtagcgtacggcccctggaattcaccaaagtgaaaacttttgtctcccggataatcgacactctggacattgggccagccgacacgcgggtggcagtggtgaactatgctagcactgtgaagatcgagttccaactccaggcctacacagataagcagtccctgaagcaggccgtgggtcgaatcacacccttgtcaacaggcaccatgtcaggcctagccatccagacagcaatggacgaagccttcacagtggaggcaggggctcgagagccctcttctaacatccctaaggtggccatcattgttacagatgggaggccccaggaccaggtgaatgaggtggcggctcgggcccaagcatctggtattgagctctatgctgtgggcgtggaccgggcagacatggcgtccctcaagatgatggccagtgagcccctagaggagcatgttttctacgtggagacctatggggtcattgagaaactttcctctagattccaggaaaccttctgtgcgctggacccctgtgtgcttggaacacaccagtgccagcacgtctgcatcagtgatggggaaggcaagcaccactgtgagtgtagccaaggatacaccttgaatgccgacaagaaaacgtgttcagctcttgataggtgtgctcttaacacccacggatgtgagcacatctgtgtgaatgacagaagtggctcttatcattgtgagtgctatgaaggttataccttgaatgaagacaggaaaacttgttcagctcaagataaatgtgctttgggtacccatgggtgtcagcacatttgtgtgaatgacagaacagggtcccatcattgtgaatgctatgagggctacactctgaatgcagataaaaaaacatgttcagtccgtgacaagtgtgccctaggctctcatggttgccagcacatttgtgtgagtgatggggccgcatcctaccactgtgattgctatcctggctacaccttaaatgaggacaagaaaacatgttcagccactgaggaagcacgaagacttgtttccactgaagatgcttgtggatgtgaagctacactggcattccaggacaaggtcagctcgtatcttcaaagactgaacactaaacttgatgacattttggagaagttgaaaataaatgaatatggacaaatacatcgttaaattgctccaatttctcacctgaaaatgtggacagcttggtgtacttaatactcatgcattcttttgcacacctgttattgccaatgttcctgctaataatttgccattatctgtattaatgcttgaatattactggataaattgtatgaagatcttctgcagaatcagcatgattcttccaaggaaatacatatgcagatacttattaagagcaaactttagtgtctctaagttatgactgtgaaatgattggtaggaaatagaatgaaaagtttagtgtttctttatctactaattgagccatttaatttttaaatgtttatattagataaccatattcacaatggaaactttaggtctagtttcttttgatagtatttataatataaatcaatcttattactgagagtgcaaattgtacaaggtatttacacatacaacttcatataactgagatgaatgtaattttgaactgtttaacactttttgttttttgcttattttgttggagtattattgaagatgtgatcaatagattgtaatacacatatctaaaaatagttaacacagatcaagtgaacattacattgccatttttaattcattctggtctttgaaagaaatgtactactaaagagcactagttgtgaatttagggtgttaaactttttaccaagtacaaaaatcccaaattcactttattattttgcttcaggatccaagtgacaaagttatatatttataaaattgctataaatcgacaaaatctaatgttgtctttttaatgttagtgatccacctgcctcagcctcccaaagtgctgggattacaggcttgaaagtctaacttttttttacttatatatttgatacatataattcttttggctttgaaacttgcaactttgagaacaaaacagtcctttaaattttgcactgctcaattctgtttttcgtttgcattgtctttaatataataaaagttattacctttacatatt

SEQ ID NO: 127860 - DNA, 1443 bp, Artificial Sequence
  derived and/or modified sequence
cccgacggacaccaccaggcccacggagcccaccatgccgcgcccggcccccgcgcgccgcctcccgggactcctcctgctgctctggccgctgctgctgctgccctccgccgcccccgaccccgtggcccgcccgggcttccggaggctggagacccgaggtcccgggggcagccctggacgccgcccctctcctgcggctcccgacggcgcgcccgcttccgggaccagcgagcctggccgcgcccgcggtgcaggtgtttgcaagagcagacccttggacctggtgtttatcattgatagttctcgtagcgtacggcccctggaattcaccaaagtgaaaacttttgtctcccggataatcgacactctggacattgggccagccgacacgcgggtggcagtggtgaactatgctagcactgtgaagatcgagttccaactccaggcctacacagataagcagtccctgaagcaggccgtgggtcgaatcacacccttgtcaacaggcaccatgtcaggcctagccatccagacagcaatggacgaagccttcacagtggaggcaggggctcgagagccctcttctaacatccctaaggtggccatcattgttacagatgggaggccccaggaccaggtgaatgaggtggcggctcgggcccaagcatctggtattgagctctatgctgtgggcgtggaccgggcagacatggcgtccctcaagatgatggccagtgagcccctagaggagcatgttttctacgtggagacctatggggtcattgagaaactttcctctagattccaggaaaccttctgtgctcttgataggtgtgctcttaacacccacggatgtgagcacatctgtgtgaatgacagaagtggctcttatcattgtgagtgctatgaaggttataccttgaatgaagacaggaaaacttgttcagctcaagataaatgtgctttgggtacccatgggtgtcagcacatttgtgtgaatgacagaacagggtcccatcattgtgaatgctatgagggctacactctgaatgcagataaaaaaacatgttcagtccgtgacaagtgtgccctaggctctcatggttgccagcacatttgtgtgagtgatggggccgcatcctaccactgtgattgctatcctggctacaccttaaatgaggacaagaaaacatgttcagccactgaggaagcacgaagacttgtttccactgaagatgcttgtggatgtgaagctacactggcattccaggacaaggtcagctcgtatcttcaaagactgaacactaaacttgatgacattttggagaagttgaaaataaatgaatatggacaaatacatcgttaaattgctccaatttctcacctgaaaatgtggacagcttggtgtacttaatactcatgcattcttttgcacacctg

SEQ ID NO: 127861 - DNA, 1461 bp, Artificial Sequence
  derived and/or modified sequence
atgccccggcccgcccccgcccggcggctgcccggcctgctgctgctcctgtggcctctgctgcttctgccaagcgccgcaccagacccagtagctaggccaggcttcagacgcctggaaacacggggaccgggcggcagccctggccgtagaccatctcctgcagctcccgacggggcccctgcgtcagggacatcagagccagggagggctcggggtgccggggtgtgtaagagtcgaccattagacctcgtgttcataattgattcatccagaagcgtgcggccccttgagtttaccaaggttaagacctttgtttccaggatcatcgacaccctggatatcggccccgcggataccagagtggccgtggtaaactatgcgagcacggtgaaaattgagtttcagttgcaagcctatacagataaacagtcactcaagcaggccgttggccgaatcaccccattatcaaccgggactatgtctggcctcgctatccagactgctatggacgaggcgttcactgtagaggccggcgcaagggaacccagttccaatattccgaaggtggccataatcgtgaccgacggccggccacaagaccaggttaacgaggtggctgctagggcgcaagcaagtggtatcgaactttatgcagtgggcgtcgatcgggctgacatggctagtctgaagatgatggcaagcgaaccactcgaggaacacgttttctacgtggagacatatggcgtgattgaaaagttatccagccggttccaggaaacattttgcgccttggatccctgcgtcctggggactcaccagtgccagcatgtgtgtatatcagacggtgaaggcaaacaccactgcgaatgtagccaaggctacacgcttaatgccgacaagaaaacatgcagtgctctagacaggtgcgccctgaatacccatggatgtgaacacatttgtgtaaacgacaggagcggatcctatcactgcgaatgctatgagggttacaccctcaacgaagacaggaagacctgcagtgcgcaagacaagtgtgcactggggactcacggttgtcagcacatttgcgtgaatgaccgcaccgggtctcatcactgtgaatgctatgaagggtataccctaaacgccgacaagaaaacatgcagcgttcgggacaaatgcgcgcttgggagccatggatgccagcatatttgtgtctctgacggtgccgcgtcataccactgcgactgctaccccggctacactctgaatgaggacaaaaagacatgctcggccacagaagaggctagacgcttagtctcaacagaagatgcctgtggatgcgaggcaacactggcttttcaggacaaagtaagtagttacctgcagcggctgaacacaaaacttgacgatattctggaaaagctcaaaatcaacgaatacggccaaattcaccggtag

SEQ ID NO: 127862 - DNA, 1335 bp, Artificial Sequence
  derived and/or modified sequence
atgccccggcccgcccccgcccggcggctgcccggcctgctgctgctcctgtggccattattactcctcccatctgccgcccctgaccccgtggcacgaccgggatttagacgactcgaaactagaggcccgggggggtcaccaggtaggagacctagcccagccgctcctgacggcgcaccagcctccggaacaagcgaaccaggccgcgcccgcggcgccggggtatgtaagtccaggccacttgatctcgtgtttattattgattcctctaggagcgtgaggccattggagttcaccaaagtgaagacattcgttagcagaattattgatactttggacatcggcccagcggatacacgggtggcagttgtgaattacgcaagcactgtaaaaattgaattccagctccaggcttatactgacaagcaatccctcaagcaggccgtcggtagaatcacccctctgtccacaggtacaatgagtggtttggccatccaaaccgcgatggatgaggcatttaccgtcgaggccggagcccgtgagccctcctctaatatacccaaagtggctatcatcgtgaccgacgggaggccgcaggatcaggtcaatgaggtggcggctcgagcccaagcttctggaattgagctttacgctgtaggggttgatagggccgatatggcctccctcaagatgatggccagcgagccattagaggagcatgtgttttacgtcgaaacatacggcgtcatcgaaaagttatctagcaggttccaagagacgttctgcgctctcgatcgatgcgcgctcaacacccacggctgcgagcatatctgtgtgaatgatagatccggtagctatcactgtgaatgctacgagggatacaccttaaacgaggatagaaagacttgcagcgcgcaggacaaatgcgccctggggacacacgggtgccaacacatctgtgtcaatgacagaactggttcacaccattgcgaatgttatgagggatacactctgaacgccgataaaaaaacctgctctgtccgggacaaatgcgcactaggcagccacgggtgccagcacatctgtgtttctgatggagcagcctcctaccactgtgactgctacccgggatacactctcaacgaagataaaaagacctgttcagcgactgaggaggctagacgtctcgtgtctacagaggatgcctgcggctgcgaggcgactctagcctttcaggacaaggtatctagctacctccagcgcttaaacactaaactggacgacattttggaaaagcttaagattaacgaatatggtcagatccatagatag

SEQ ID NO: 127863 - DNA, 1461 bp, Artificial Sequence
  derived and/or modified sequence
atgcctcgccctgccccagccagaagactgcctggactcctactcctgctgtggccactcctgctgctgccttctgctgctcctgatcctgtagcgcgacctggcttccgacgccttgaaaccagagggccagggggatccccagggcgtcgtcccagcccggctgccccagacggagcacctgcatcaggcactagtgagcctggacgggcaagaggcgcaggcgtgtgcaagagtcgtccactggacctcgtgttcattattgactcctcacggtcagttcgtccgttagagttcacgaaagttaagacttttgtgagcagaatcattgatacactggacatcggccctgcagatacccgtgtcgctgtggtgaactacgcctcaaccgtcaagatagaatttcagctgcaggcatacacagacaaacaaagcctgaaacaagccgtgggtagaattactcccctctccactggtaccatgtcaggcctagcaattcagacagctatggatgaggcgtttaccgtcgaggctggcgctagagaaccaagcagtaacattccgaaagtggcgattatcgtgaccgacgggagacctcaagaccaggtgaacgaagttgctgctcgggcacaggcatcgggaattgaattgtatgcggtgggcgtggaccgggctgatatggcctccttgaagatgatggcctctgaacctttagaagagcacgttttctacgtagagacttatggtgtgatcgaaaagttgagctcacgctttcaggagacattttgcgcacttgacccatgcgtgctcggaacccatcagtgtcagcacgtctgcatttctgacggggaggggaagcatcactgcgagtgctctcagggctacaccctgaacgccgataagaaaacatgtagcgcactcgatcgctgcgctttgaatacccatggctgtgagcacatctgtgtgaatgatcgctccgggagctatcattgtgagtgttacgaaggatacacattgaacgaagacagaaagacgtgtagcgcccaggacaagtgcgctctaggaactcacggttgccaacacatctgcgtgaacgaccgaactgggtcgcaccattgcgagtgctacgaaggctatacgctgaacgcggataagaagacctgcagcgttcgggataagtgcgccctcggatcccacgggtgccagcatatttgcgtctccgatggggctgcgtcctatcactgtgattgttacccagggtatacgctgaacgaggacaagaagacatgcagcgctacagaggaggcgcgaaggctcgtttcaacggaggatgcttgtgggtgcgaggctaccctcgcattccaagacaaggtctcgtcttacctacagcgtctaaatactaaactggacgacattctggaaaagctgaaaatcaatgaatatggacaaattcatcggtag

SEQ ID NO: 127864 - DNA, 1335 bp, Artificial Sequence
  derived and/or modified sequence
atgccccgtcctgctcccgcaaggcggctgccaggtcttcttctccttctatggcctctattattattaccaagtgcggctccagacccagtcgccagacccggattcaggagacttgagacgagaggtccaggcggtagtcccggacgtaggccatcgcccgctgcgccagacggtgccccagcttctgggaccagtgaacccggtcgcgcacggggagctggtgtgtgcaaatcccgcccactcgacctggtgttcattatcgactcttccaggagtgtgcgccctctcgaattcaccaaagtgaaaacatttgttagtcggatcattgacactttggacatagggcctgcagatactcgggtggcggtggtcaactatgcgagcacggtcaagattgagttccagctgcaggcatacacagataaacagtccctgaaacaggctgtcgggcgaatcacaccattgagtacgggaaccatgagcggccttgccatccagactgcaatggacgaagcattcaccgtggaagctggggcaagggaacctagttcaaatatacccaaagtagcgattattgtaacagacgggagacctcaagaccaggtgaacgaggtggctgcaagagcccaggcctctgggatcgaactgtacgcagtgggagtggaccgggcagacatggcgtcactcaaaatgatggccagcgagccactggaagagcatgttttttacgttgaaacctatggagtaattgagaaactcagttccagatttcaggagactttttgtgcgctggacagatgcgctctgaatacccacggctgcgagcatatatgtgtaaacgaccgcagcggttcctaccattgtgagtgctatgagggttatacccttaacgaggacagaaaaacgtgcagcgcccaggacaaatgcgctctgggcacccacggttgccaacacatctgcgtgaacgatcgcaccgggagtcaccattgcgagtgctatgaaggatatacactgaacgcggacaagaaaacttgcagcgtccgagataaatgcgcgttgggatctcacggttgccaacacatttgcgtatccgatggcgctgcaagctaccactgcgactgctatcctggctataccctcaatgaagacaagaagacttgctccgccacagaagaggcccgtcggcttgtctctactgaggatgcttgtggatgcgaagcaactctggcctttcaagataaagtctcctcatacctgcaaaggctgaataccaagctggacgacatcctagagaaattaaaaatcaacgagtatggtcagatccatcgttag

SEQ ID NO: 127865 - DNA, 1461 bp, Artificial Sequence
  derived and/or modified sequence
atgcccagacccgcccccgccagaagactgcccggcctgctgctgctgctgtggcccctgctgctgctgcccagcgccgcccccgaccccgtggccagacccggcttcagaagactggagaccagaggccccggcggcagccccggcagaagacccagccccgccgcccccgacggcgcccccgccagcggcaccagcgagcccggcagagccagaggcgccggcgtgtgcaagagcagacccctggacctggtgttcatcatcgacagcagcagaagcgtgagacccctggagttcaccaaggtgaagaccttcgtgagcagaatcatcgacaccctggacatcggccccgccgacaccagagtggccgtggtgaactacgccagcaccgtgaagatcgagttccagctgcaggcctacaccgacaagcagagcctgaagcaggccgtgggcagaatcacccccctgagcaccggcaccatgagcggcctggccatccagaccgccatggacgaggccttcaccgtggaggccggcgccagagagcccagcagcaacatccccaaggtggccatcatcgtgaccgacggcagaccccaggaccaggtgaacgaggtggccgccagagcccaggccagcggcatcgagctgtacgccgtgggcgtggacagagccgacatggccagcctgaagatgatggccagcgagcccctggaggagcacgtgttctacgtggagacctacggcgtgatcgagaagctgagcagcagattccaggagaccttctgcgccctggacccctgcgtgctgggcacccaccagtgccagcacgtgtgcatcagcgacggcgagggcaagcaccactgcgagtgcagccagggctacaccctgaacgccgacaagaagacctgcagcgccctggacagatgcgccctgaacacccacggctgcgagcacatctgcgtgaacgacagaagcggcagctaccactgcgagtgctacgagggctacaccctgaacgaggacagaaagacctgcagcgcccaggacaagtgcgccctgggcacccacggctgccagcacatctgcgtgaacgacagaaccggcagccaccactgcgagtgctacgagggctacaccctgaacgccgacaagaagacctgcagcgtgagagacaagtgcgccctgggcagccacggctgccagcacatctgcgtgagcgacggcgccgccagctaccactgcgactgctaccccggctacaccctgaacgaggacaagaagacctgcagcgccaccgaggaggccagaagactggtgagcaccgaggacgcctgcggctgcgaggccaccctggccttccaggacaaggtgagcagctacctgcagagactgaacaccaagctggacgacatcctggagaagctgaagatcaacgagtacggccagatccacagatag

SEQ ID NO: 127866 - DNA, 1335 bp, Artificial Sequence
  derived and/or modified sequence
atgcccagacccgcccccgccagaagactgcccggcctgctgctgctgctgtggcccctgctgctgctgcccagcgccgcccccgaccccgtggccagacccggcttcagaagactggagaccagaggccccggcggcagccccggcagaagacccagccccgccgcccccgacggcgcccccgccagcggcaccagcgagcccggcagagccagaggcgccggcgtgtgcaagagcagacccctggacctggtgttcatcatcgacagcagcagaagcgtgagacccctggagttcaccaaggtgaagaccttcgtgagcagaatcatcgacaccctggacatcggccccgccgacaccagagtggccgtggtgaactacgccagcaccgtgaagatcgagttccagctgcaggcctacaccgacaagcagagcctgaagcaggccgtgggcagaatcacccccctgagcaccggcaccatgagcggcctggccatccagaccgccatggacgaggccttcaccgtggaggccggcgccagagagcccagcagcaacatccccaaggtggccatcatcgtgaccgacggcagaccccaggaccaggtgaacgaggtggccgccagagcccaggccagcggcatcgagctgtacgccgtgggcgtggacagagccgacatggccagcctgaagatgatggccagcgagcccctggaggagcacgtgttctacgtggagacctacggcgtgatcgagaagctgagcagcagattccaggagaccttctgcgccctggacagatgcgccctgaacacccacggctgcgagcacatctgcgtgaacgacagaagcggcagctaccactgcgagtgctacgagggctacaccctgaacgaggacagaaagacctgcagcgcccaggacaagtgcgccctgggcacccacggctgccagcacatctgcgtgaacgacagaaccggcagccaccactgcgagtgctacgagggctacaccctgaacgccgacaagaagacctgcagcgtgagagacaagtgcgccctgggcagccacggctgccagcacatctgcgtgagcgacggcgccgccagctaccactgcgactgctaccccggctacaccctgaacgaggacaagaagacctgcagcgccaccgaggaggccagaagactggtgagcaccgaggacgcctgcggctgcgaggccaccctggccttccaggacaaggtgagcagctacctgcagagactgaacaccaagctggacgacatcctggagaagctgaagatcaacgagtacggccagatccacagatag

SEQ ID NO: 127867 - protein, 160 aa, Artificial Sequence
  derived and/or modified sequence
MSDNDDIEVESDEEQPRFQSAADKRAHHNALERKRRDHIKDSFHSLRDSVPSLQGEKASRAQILDKATEYIQYMRRKNHTHQQDIDDLKRQNALLEQQVRALEKARSSAQLQTNYPSSDNSLYTNAKGSTISAFDGGSDSSSESEPEEPQSRKKLRMEAS

SEQ ID NO: 127868 - protein, 91 aa, Artificial Sequence
  derived and/or modified sequence
MSAADKRAHHNALERKRRDHIKDSFHSLRDSVPSLQGEKASRAQILDKATEYIQYMRRKNHTHQQDIDDLKRQNALLEQQVRALEKARSSA

SEQ ID NO: 127869 - DNA, 483 bp, Artificial Sequence
  derived and/or modified sequence
atgagcgacaacgacgacatcgaggtggagagcgacgaggagcagcccagattccagagcgccgccgacaagagagcccaccacaacgccctggagagaaagagaagagaccacatcaaggacagcttccacagcctgagagacagcgtgcccagcctgcagggcgagaaggccagcagagcccagatcctggacaaggccaccgagtacatccagtacatgagaagaaagaaccacacccaccagcaggacatcgacgacctgaagagacagaacgccctgctggagcagcaggtgagagccctggagaaggccagaagcagcgcccagctgcagaccaactaccccagcagcgacaacagcctgtacaccaacgccaagggcagcaccatcagcgccttcgacggcggcagcgacagcagcagcgagagcgagcccgaggagccccagagcagaaagaagctgagaatggaggccagctag

SEQ ID NO: 127870 - DNA, 483 bp, Artificial Sequence
  derived and/or modified sequence
atgagtgataatgacgacatcgaagtagaatccgatgaggagcagccaagattccagtcggcagcagacaagcgggcccaccataatgccctggagagaaagaggcgggaccacatcaaggactcctttcactctttgagagattctgtgccgtcccttcagggcgaaaaagccagtcgggcgcagattctcgacaaggctaccgaatacatccagtatatgagacgcaagaaccacacccaccaacaggacatcgatgacctgaagcgccagaacgcgcttctggagcaacaggttagggctttggagaaagctcgcagcagcgcccagcttcaaactaattaccctagttcggacaactcgttgtatactaacgctaagggttccacaatttccgcctttgacggcggtagcgattcgtctagcgagtcagagccagaggagcctcagagcaggaagaaactgcgcatggaagccagctag

SEQ ID NO: 127871 - DNA, 483 bp, Artificial Sequence
  derived and/or modified sequence
atgtctgacaatgatgacatcgaggtggagagtgatgaggagcagccccgcttccagagcgctgctgacaagagggcccaccacaatgccctggagaggaagagaagagaccacatcaaggacagcttccacagcctgcgggacagcgtgcccagcctgcagggcgagaaggccagccgggcccagatcctggacaaggccacagagtacatccagtacatgaggaggaagaaccacacccaccagcaggacattgatgacctgaagaggcagaatgccctgctggagcagcaggtgcgggccctggagaaggcccggagcagcgcccagctgcagaccaactaccccagcagtgacaacagcctgtacaccaatgccaagggcagcaccatcagcgcctttgatggcggcagtgacagcagcagcgagagcgagcctgaggagccccagagcaggaagaagctgaggatggaggccagctag

SEQ ID NO: 127872 - DNA, 483 bp, Artificial Sequence
  derived and/or modified sequence
atgagcgacaacgacgacatcgaggtggagagcgacgaggagcagccccgattccaaagcgctgccgacaagagggcccaccataacgccctcgagaggaaaagacgggatcatataaaagactctttccacagcttacgggattcggttccttcattacagggggaaaaggcatcgcgggcccaaatattggacaaagctacagaatatattcagtatatgaggcgaaagaaccacactcatcaacaagacattgatgatctcaaacgccagaacgccctgctcgagcagcaagtacgggctctggagaaagcccggagctccgctcagttgcagactaactatcccagctccgacaatagcctgtacactaacgctaaaggaagtaccatcagcgcctttgatggcggatccgattcttcctccgagagcgagccggaggagcctcagagtcggaagaagctcagaatggaggcatcctag

SEQ ID NO: 127873 - DNA, 1546 bp, Artificial Sequence
  derived and/or modified sequence
gagcgagtgagtgagtgagtgagtgtgtgtgtgggggggactcggcttgttgttgtcggtgacttccccctccccttcaccccttcccctccccgccgccgctgcagtggccgctccctgggccgtaggaaatgagcgataacgatgacatcgaggtggagagcgacgaagagcaaccgaggtttcaatctgcggctgacaaacgggctcatcataatgcactggaacgaaaacgtagggaccacatcaaagacagctttcacagtttgcgggactcagtcccatcactccaaggagagaaggcatcccgggcccaaatcctagacaaagccacagaatatatccagtatatgcgaaggaaaaaccacacacaccagcaagatattgacgacctcaagcggcagaatgctcttctggagcagcaagtccgtgcactggagaaggcgaggtcaagtgcccaactgcagaccaactacccctcctcagacaacagcctctacaccaacgccaagggcagcaccatctctgccttcgatgggggctcggactccagctcggagtctgagcctgaagagccccaaagcaggaagaagctccggatggaggccagctaagccactcggggcaggccagcaataaaaactgtctgtctccatcgtctcatcctcctttcagttcgttggtagagccctcagaaccatttaagagactctttatttttctctttctcccttttttttttaaatttttatttttacgtagaagctcttggacaacagctctcgttctccttccccatttccactgtatattttttaatgtattcccttcagggattccctgtccccaacaggaatttttaaaccaaaacaccccaacttggcagctttttctgtggaggacagacggccggccggacctctgagcacatagtgtcctgcccaccctaccagctcctccagccctgccgggcacatgcccgggggacgcctgccctgcccaggtggcctcctggcccgccctcacctctgatagactttgtgaatctgaactgctctactttgagaagatgaccggtttggagtaatcagaatgaaccctcctcctttttaagggttttttttttttcctttttctaaaaagctatgtatcgctcctattgaaagaccagatccttagagaagtttgtggtataaaaaggaagtggggacagattcgcagcacagagtcgctggcatgtttcactcctgcttctctcagccagctgtttaagcctgcggcgccagcctcacggagggccgtgtgacactctcgtggtatgtatgggagatggcagcagtgaagcagcagccaccagggagtggccatttggggttgggacagggagggtgttttgggtggcatagaggttttgtattgagggccagtgatgatgttttgatatttatttcctgctacttaaatttgaatctgagtgaattgtacctatttctgatgatgtcggtcttgcaaagcgacagattcataaagtaatgatgaaatcttt

SEQ ID NO: 127874 - DNA, 2097 bp, Artificial Sequence
  derived and/or modified sequence
gcagtgaggaggtggttcttgcccgtgttgtgtgtgtgtgtgagtgagagagcgagtgagtgagtgagtgagtgtgtgtgtgggggggactcggcttgttgttgtcggtgacttccccctccccttcaccccttcccctccccgccgccgctgcagtggccgctccctgggccgtaggaaatgagcgataacgatgacatcgaggtggagagcgacgaagagcaaccgaggtttcaatctgcggctgacaaacgggctcatcataatgcactggaacgaaaacgtagggaccacatcaaagacagctttcacagtttgcgggactcagtcccatcactccaaggagagaaggcatcccgggcccaaatcctagacaaagccacagaatatatccagtatatgcgaaggaaaaaccacacacaccagcaagatattgacgacctcaagcggcagaatgctcttctggagcagcaaggggaaagcgagagctgatcaagttctttgttcctggggaattcacttctcttcctccctcatggaagatgcaagtaaaaggaaattccgtgcactggagaaggcgaggtcaagtgcccaactgcagaccaactacccctcctcagacaacagcctctacaccaacgccaagggcagcaccatctctgccttcgatgggggctcggactccagctcggagtctgagcctgaagagccccaaagcaggaagaagctccggatggaggccagctaagccactcggggcaggccagcaataaaaactgtctgtctccatcgtctcatcctcctttcagttcgttggtagagccctcagaaccatttaagagactctttatttttctctttctcccttttttttttaaatttttatttttacgtagaagctcttggacaacagctctcgttctccttccccatttccactgtatattttttaatgtattcccttcagggattccctgtccccaacaggaatttttaaaccaaaacaccccaacttggcagctttttctgtggaggacagacggccggccggacctctgagcacatagtgtcctgcccaccctaccagctcctccagccctgccgggcacatgcccgggggacgcctgccctgcccaggtggcctcctggcccgccctcacctctgatagactttgtgaatctgaactgctctactttgagaagatgaccggtttggagtaatcagaatgaaccctcctcctttttaagggttttttttttttcctttttctaaaaagctatgtatcgctcctattgaaagaccagatccttagagaagtttgtggtataaaaaggaagtggggacagattcgcagcacagagtcgctggcatgtttcactcctgcttctctcagccagctgtttaagcctgcggcgccagcctcacggagggccgtgtgacactctcgtggtatgtatgggagatggcagcagtgaagcagcagccaccagggagtggccatttggggttgggacagggagggtgttttgggtggcatagaggttttgtattgagggccagtgatgatgttttgatatttatttcctgctacttaaatttgaatctgagtgaattgtacctatttctgatgatgtcggtcttgcaaagcgacagattcataaagtaatgatgaaatctttctttcttcccgtgtgtatttctaagaaatagagccaactgattttgtatgtaaataccaagagcaatttacctggtactaaacccgcaccccagtgcggacccttcccagccctcatcccacttcctttcctactgtcctggaacctgtctccattgtgtgatccagccctggttctggctgtggtcagcagatgccagtgaagggttttgtgtgtttaggcctcatttctttgtctttttcctactccgttcctggcatttgctgatttctagtgtatactctgtagtctcagttcgtgtttgattccattccatggaaataaaaagtatgttgtacatactgccgaagaattgtcttgcaagttaaggcttccccctttactataagactataaataaaaacttattttatcctt

SEQ ID NO: 127875 - DNA, 483 bp, Artificial Sequence
  derived and/or modified sequence
atgtctgataatgatgatattgaggtagagtccgacgaagaacagcccaggttccaatccgccgctgacaagcgggcacaccacaacgctttggagcgaaaacggagagaccacatcaaagactcatttcattccctgagggactccgtaccttcactccagggagaaaaggctagtagggcacagatcttggataaggccacagaatatatccaatatatgagaagaaagaatcacactcaccagcaggacatcgacgatctgaaaaggcagaatgccttactggaacagcaagtacgggctttggaaaaagcccgttcttctgcgcagctgcagacgaactacccttcgtctgacaatagcttatacactaacgccaaggggagcacgatctcagccttcgatgggggatccgacagctcaagtgaaagcgaacctgaagagccccaatctagaaaaaagctgcggatggaagcgtcatag

SEQ ID NO: 127876 - DNA, 273 bp, Artificial Sequence
  derived and/or modified sequence
atgtctgctgccgacaagagggcacaccacaacgccctcgagcgcaaacgtcgggatcacatcaaggacagctttcattctcttcgcgactcggtgccaagtctgcagggggaaaaagcttccagggcccagatcctggacaaggccaccgaatacatccagtacatgagacgaaaaaaccacacacaccagcaggacatcgatgacctaaagcgccaaaacgccctacttgagcaacaagtgcgcgccctagagaaggctaggagtagtgcc

SEQ ID NO: 127877 - DNA, 273 bp, Artificial Sequence
  derived and/or modified sequence
atgtccgccgctgacaagcgcgcccatcacaatgccctcgagcgaaagcgccgagatcacatcaaagatagctttcactccctcagggactctgtccctagtttacagggcgagaaagcgtccagggctcagatcttagataaagccaccgaatatattcagtacatgaggagaaagaaccacacccaccagcaggacatcgacgacctgaaaagacagaatgcgttgctggagcagcaagtgagggctctggaaaaagctagatcctctgcc

SEQ ID NO: 127878 - DNA, 273 bp, Artificial Sequence
  derived and/or modified sequence
atgtctgccgcggataaaagggcacatcacaatgctcttgagcggaaaaggagggatcatataaaagattctttccattctctcagagattctgttccttcattacagggagagaaagcttccagagcccagatccttgacaaagcgacagaatatatccaatatatgcggcggaaaaatcacacacaccagcaggatatagatgacttaaaaagacaaaatgctcttctggagcagcaggtccgcgcacttgaaaaagctaggtcaagtgca

SEQ ID NO: 127879 - DNA, 273 bp, Artificial Sequence
  derived and/or modified sequence
atgtcagcggcagataagcgcgcacatcacaatgccctcgaaagaaagaggagggatcacatcaaagatagctttcatagcttgagggacagcgtgccaagcctgcagggcgagaaagcatcaagagctcagatcttagacaaggcgacggagtatattcaatatatgaggagaaagaaccacacgcaccaacaagatatagatgacctcaagcgtcagaatgctttgttagagcaacaggtgcgcgcactcgagaaggcaaggagtagcgcc

SEQ ID NO: 127880 - DNA, 273 bp, Artificial Sequence
  derived and/or modified sequence
atgagtgccgccgataagcgggcgcatcataatgccttggagcgcaagagacgggaccacatcaaggatagcttccattcattgcgagatagcgtcccttctctccagggcgagaaggcatcacgagcccagattctcgacaaagctaccgagtatatacagtatatgaggagaaagaaccacacacatcaacaagacatcgatgacctgaagaggcagaatgccctcctggagcagcaggtcagggctttagagaaggcgaggagcagtgcc

SEQ ID NO: 127881 - DNA, 273 bp, Artificial Sequence
  derived and/or modified sequence
atgagtgccgccgataagcgggcccaccataatgctttagaaagaaaaaggagagaccacattaaagattcgttccacagtctaagagatagtgtgcctagtttacagggagaaaaggcatctcgggctcagatactggataaagccactgaatacatccagtacatgcggcgaaaaaaccatacacaccagcaggatatcgatgatcttaaaaggcagaacgccctccttgaacagcaagtcagagcattagaaaaagcccggagttcggct

SEQ ID NO: 127882 - DNA, 273 bp, Artificial Sequence
  derived and/or modified sequence
atgtccgcagctgataagcgggcccatcacaatgccctggaaaggaaacgacgggatcacataaaagattcttttcactctttgcgcgattccgtgccttctctgcagggagaaaaagccagtcgggctcagatattagataaagctacagagtatatccagtatatgagaaggaaaaaccatacacatcagcaggacattgatgatctgaagcgacagaacgctctcctagagcagcaggtccgcgctctagaaaaagctcggtcctcagct

SEQ ID NO: 127883 - DNA, 273 bp, Artificial Sequence
  derived and/or modified sequence
atgagtgcagctgacaagagagctcatcacaacgcgttggagaggaagagacgggaccatattaaggacagctttcacagtttgcgagattctgtgccatctctccagggagagaaggccagtcgagcccaaatcctggacaaggctaccgagtatatccagtacatgagaagaaaaaaccatactcatcaacaagacatcgatgatctcaaacggcagaacgctttgctcgagcagcaggtgcgcgcactggaaaaagctcgatcctccgcc

SEQ ID NO: 127884 - DNA, 273 bp, Artificial Sequence
  derived and/or modified sequence
atgtctgctgcagataaacgagcacaccacaacgctctggaacggaaacggcgtgaccatattaaagattccttccactccctccgggatagtgttccaagtcttcagggagaaaaagccagtcgcgcccagatcctagataaagctactgagtatattcagtatatgagacgcaaaaaccatactcaccagcaggatatcgatgacctgaaacgccagaatgccctcctagaacagcaggttagagctctagaaaaagctcgatcatccgca

SEQ ID NO: 127885 - DNA, 273 bp, Artificial Sequence
  derived and/or modified sequence
atgagtgctgctgataaacgggcgcatcacaacgccctcgaacgcaaacgacgggaccatataaaggattctttccattccctccgggattcggtcccatcactgcagggagagaaagcctcaagggcccagatcctggataaagctactgaatacatacagtacatgagaaggaaaaatcacacacatcagcaggatatagatgatctgaaacggcagaacgcactgttagaacagcaggtgagggccctcgaaaaggccagatcttctgcc

SEQ ID NO: 127886 - DNA, 273 bp, Artificial Sequence
  derived and/or modified sequence
atgtccgccgctgataagcgagcgcaccacaatgcgttggagagaaaacggagagatcacattaaagatagctttcacagccttagggacagcgtgccatctcttcagggagaaaaggcatctcgagcccagatcctcgacaaagctaccgagtacatccagtacatgaggaggaagaatcacactcaccagcaagatatcgatgacctcaagaggcagaacgcattgctggagcaacaggtacgagcactcgagaaggccaggagtagcgcc

SEQ ID NO: 127887 - DNA, 273 bp, Artificial Sequence
  derived and/or modified sequence
atgtcagccgcagacaagcgcgcgcatcacaacgctctggagcgcaaacggcgcgatcacattaaggattccttccactctctgagggacagcgtgcctagtctccagggggagaaggcctcacgtgctcagatcctggataaggcaaccgaatacattcagtatatgaggcggaaaaaccatactcatcaacaggatatcgacgacttgaaacgacagaacgcccttctggagcagcaggtgcgggctcttgaaaaggctcggtccagcgct

SEQ ID NO: 127888 - DNA, 273 bp, Artificial Sequence
  derived and/or modified sequence
atgagcgctgctgacaagagagctcaccataatgcattggagcggaagcgacgcgatcatataaaagatagtttccactccctgagagattctgtccccagtctccaaggtgagaaagcctcccgggcccagatcctggataaggcgactgagtacatacaatacatgaggagaaaaaaccatactcaccagcaagacatcgacgacttgaagcggcagaatgccctgctggagcagcaagtccgcgcgctggagaaagcccggagttccgca

SEQ ID NO: 127889 - DNA, 273 bp, Artificial Sequence
  derived and/or modified sequence
atgtctgccgcagataaaagggcccaccacaatgcactagagagaaaacgccgcgatcacatcaaggactcattccacagtcttcgtgactctgttccatctcttcagggggaaaaagcgtcacgggcacagatcctcgataaagccactgaatatattcagtacatgcggcgaaaaaaccacacacaccagcaggatattgacgaccttaaacggcagaacgcccttttagaacagcaagtgcgggctctggaaaaagccagatcaagtgca

SEQ ID NO: 127890 - DNA, 273 bp, Artificial Sequence
  derived and/or modified sequence
atgagcgctgctgacaaacgagctcatcataacgcactcgaacggaaacgccgcgaccacatcaaagattcctttcattcattgcgggacagcgttccttccttgcaaggggagaaggcaagccgagcgcaaatcttggataaagcaacagagtacatccagtatatgaggagaaagaatcacacacatcaacaggacatcgacgatctgaagcgccagaatgccctcctggaacaacaagttcgggccctggagaaggcaagaagtagcgcc

SEQ ID NO: 127891 - DNA, 273 bp, Artificial Sequence
  derived and/or modified sequence
atgagtgctgctgacaagagagcccaccataacgcgctagaacgaaaaagaagggatcacataaaggacagctttcacagcctgcgcgattctgtgccaagtctgcaaggggagaaagcatccagggcacagatcctggataaggctactgaatacatacaatacatgcgacgcaaaaaccatacccaccaacaagacatcgatgatctgaagagacaaaacgccctcctggagcagcaagtccgcgccctggagaaggcgaggtctagcgcc

SEQ ID NO: 127892 - DNA, 273 bp, Artificial Sequence
  derived and/or modified sequence
atgtctgcggctgacaaacgcgcacaccataacgctctcgaacgcaagagacgcgatcatattaaggactcatttcacagtctccgggacagtgtcccatctctgcagggggagaaggctagcagggcgcaaatcctggataaggccactgaatacatccagtacatgcggcgtaaaaatcatacgcatcaacaggatatagatgatctgaaaaggcagaatgccctcctcgaacaacaggtgcgggctttagagaaagccagatcaagtgct

SEQ ID NO: 127893 - DNA, 273 bp, Artificial Sequence
  derived and/or modified sequence
atgtctgcagcagacaagcgcgctcaccataacgccctggaaagaaaaagaagggaccatataaaggattcttttcactccttgcgggattccgtcccctccctgcagggagaaaaggcctcaagagcacaaattctagataaggcaacggaatacatacaatacatgcgtaggaaaaatcatacacaccagcaggatattgacgatttgaagagacaaaacgccctccttgaacagcaggtcagggccctggaaaaggctaggagcagtgct

SEQ ID NO: 127894 - DNA, 273 bp, Artificial Sequence
  derived and/or modified sequence
atgtccgcagctgataagcgcgcccatcataatgcactggaaagaaaacgacgagatcatataaaagattcattccactctctacgagattcagtgccttccctgcagggggaaaaggcctctagggcccaaatcctcgataaggccacagaatatatacagtatatgcggaggaaaaatcacacacaccagcaggatatcgatgatctcaaaaggcagaacgctttactagagcagcaagtccgggcattagaaaaagctcggtcatccgcc

SEQ ID NO: 127895 - DNA, 273 bp, Artificial Sequence
  derived and/or modified sequence
atgagcgccgctgacaaacgggcgcatcacaacgccctcgaaaggaagcgacgtgatcacattaaagacagttttcattcgctgcgcgactctgtaccatccttgcagggcgagaaagcatcacgcgctcagatcctagacaaggctactgaatatatccagtatatgagaaggaaaaatcatacacaccagcaggatattgatgatctcaagagacaaaacgccctcctggagcaacaagtgcgcgccctggagaaggcacggtccagtgcg

SEQ ID NO: 127896 - DNA, 273 bp, Artificial Sequence
  derived and/or modified sequence
atgtcagcggccgataagcgggcccaccacaacgcactggaaaggaagcgacgggatcacatcaaggatagtttccactctttgcgagattctgtcccatctctgcaaggtgagaaggcttctagagcccagatcctcgacaaagcgacggagtacattcagtatatgcgacggaagaatcacacgcaccaacaggatatcgacgatctgaagaggcaaaatgcactgctggagcagcaggtccgtgcccttgaaaaagccagaagtagtgcg

SEQ ID NO: 127897 - DNA, 273 bp, Artificial Sequence
  derived and/or modified sequence
atgagtgctgcagacaagcgggctcaccacaacgccctggaaagaaagcgccgagaccatatcaaggacagcttccatagcctcagggattccgtacctagtttacagggggagaaggcatcccgggctcagattctagacaaggcgacggaatatattcagtatatgaggcgcaaaaaccacacacaccaacaagacatcgatgacctaaaacgtcaaaacgccctcctggagcaacaggtacgggctcttgagaaagccaggtcttcagcc

SEQ ID NO: 127898 - DNA, 273 bp, Artificial Sequence
  derived and/or modified sequence
atgtcggccgcagacaaacgggcccaccataacgctttggaaaggaaaaggcgggatcacatcaaagattccttccattccctccgcgattccgttcctagtcttcagggcgagaaggcctcccgcgcccaaattctagacaaggctaccgagtatatccagtatatgcgcaggaaaaatcacacgcaccagcaggacatcgacgaccttaagcgccaaaacgccctcctggaacagcaggtccgggcgttggagaaagcaaggtcttctgcc

SEQ ID NO: 127899 - DNA, 273 bp, Artificial Sequence
  derived and/or modified sequence
atgtctgcggcggataaacgggcccaccataacgccctggaaaggaaaaggagagaccacataaaagattcatttcattcattacgggattctgtgccaagtctgcagggagaaaaggcaagtagagcccagatacttgacaaagcaacagagtacatccaatacatgcgcaggaaaaaccacactcaccagcaggatatagacgatctaaaaaggcagaacgcgctcctcgaacaacaggtgagggccctggaaaaagcacggtcgtcagct

SEQ ID NO: 127900 - DNA, 273 bp, Artificial Sequence
  derived and/or modified sequence
atgagtgccgccgacaaacgcgcacatcataacgcactggaacgaaagcggagggatcacatcaaggacagcttccatagtctgcgcgacagtgtcccatccctccagggagagaaggcttcacgggctcagatcctggataaggccacagaatatatacaatacatgcgaagaaaaaatcatacccaccaacaggacatcgatgatctgaaaaggcagaacgccctcctcgagcagcaggtccgcgcccttgagaaggccaggtcctctgcg

SEQ ID NO: 127901 - DNA, 273 bp, Artificial Sequence
  derived and/or modified sequence
atgagcgctgccgacaagcgagcacaccacaacgccctggagcggaaaagacgggatcacattaaagacagcttccactccctccgcgattccgtcccttccctgcagggcgaaaaagccagtcgggcgcaaatcctggataaggcaaccgaatatatccagtacatgagacgaaagaatcacacacaccagcaggacatcgacgatctcaaacggcagaatgcactgcttgagcagcaagttagagccctggagaaggccagatctagtgcg

SEQ ID NO: 127902 - DNA, 273 bp, Artificial Sequence
  derived and/or modified sequence
atgagcgccgccgataaaagggcccaccacaacgccctggagaggaaaagacgggaccacatcaaggactcttttcattcactgagggactcagtgcccagcctccagggcgaaaaggcgagccgcgcacagatcctggacaaggcgactgagtatattcaatacatgagacgtaaaaaccatacccaccaacaggatatcgatgacctcaaacggcagaacgcacttcttgagcagcaggtgagggctctcgaaaaggcccgctcatctgct

SEQ ID NO: 127903 - DNA, 273 bp, Artificial Sequence
  derived and/or modified sequence
atgtccgcagcagataaaagggcacatcacaacgccctggagaggaagcggcgtgatcatatcaaagactcattccatagcctgagggatagcgtacccagcctgcaaggggaaaaggctagccgagctcaaattcttgacaaagctactgagtacattcagtacatgcgtaggaagaatcacacccatcagcaggatatagacgacctaaaaagacaaaatgctcttctcgaacagcaggtgcgcgccctggagaaggccaggtcctccgcc

SEQ ID NO: 127904 - DNA, 273 bp, Artificial Sequence
  derived and/or modified sequence
atgagtgcagctgataagcgggcccatcacaatgcgttggagcgaaaaagaagagaccacatcaaagattcatttcattcacttcgggattccgtaccctcgctgcagggagagaaagcgagccgggctcaaatcctggataaggctacagagtacattcaatatatgcgccgaaaaaatcacacacaccagcaggatattgatgacctcaaacgccagaacgcgttgttggagcagcaggtgagagctttagagaaggcccgctcctccgct

SEQ ID NO: 127905 - DNA, 273 bp, Artificial Sequence
  derived and/or modified sequence
atgagtgctgccgacaaacgtgcccaccacaacgccctggaaaggaaaaggcgtgaccacattaaagatagtttccattctttgcgggacagcgtgccctctcttcaaggcgagaaggcatcaagagctcagattctcgataaggcaactgaatacattcagtacatgaggaggaaaaaccacacacaccaacaggatatcgacgatctgaagcgtcagaacgcattgctggagcagcaggtgagagcccttgaaaaagctcgctcaagcgct

SEQ ID NO: 127906 - DNA, 273 bp, Artificial Sequence
  derived and/or modified sequence
atgagtgccgcggacaaacgtgcccaccacaatgctctagagaggaaacgtcgggatcacataaaggactccttccatagcttgcgggactcagtgccctctctccagggcgaaaaagcaagccgcgcccagatcctcgacaaagctaccgagtatatccaatatatgagacgaaaaaaccatacgcatcagcaggacatcgacgacctcaaacggcagaatgcactgctcgagcagcaggtcagggccctggaaaaggcccgatccagtgcg

SEQ ID NO: 127907 - DNA, 273 bp, Artificial Sequence
  derived and/or modified sequence
atgagcgcggcagacaaacgggcccatcataacgccttagagagaaagcgaagggaccacattaaagatagttttcacagtttgcgggacagtgttccctctttacagggcgagaaagcatctcgcgcgcagattctcgataaggccacagagtatattcagtatatgcgacggaaaaaccatactcaccagcaggacattgatgaccttaaacgtcagaatgccttgctggagcagcaagtccgagcactggagaaagcacgctcctcagct

SEQ ID NO: 127908 - DNA, 273 bp, Artificial Sequence
  derived and/or modified sequence
atgtctgccgccgacaaaagggcccaccataacgccctggaaagaaaaagaagagatcacattaaagattctttccactccctgagagattccgtgccaagtcttcagggggaaaaggcaagtcgggcacagatactggataaggccactgaatatattcagtacatgagacgcaagaatcacactcaccagcaggatatagatgacctgaaacgccaaaacgcgctcctcgagcagcaagtacgggccctggaaaaagcacgctcctctgca

SEQ ID NO: 127909 - DNA, 273 bp, Artificial Sequence
  derived and/or modified sequence
atgagcgccgccgacaaaagagcccaccacaatgctctcgagagaaagcggagagatcatatcaaagacagcttccatagtcttcgggacagcgtcccatccctccagggcgagaaagcctcacgggcacagatccttgataaggcaacagaatacatacagtacatgaggcgcaagaaccacactcaccagcaggacattgatgacctgaaacgacagaatgcgctgttggaacagcaggtgagagctttggagaaggcccggagctccgcc

SEQ ID NO: 127910 - DNA, 273 bp, Artificial Sequence
  derived and/or modified sequence
atgtccgcggcggacaaaagggcccaccacaacgcgctcgagaggaagagacgagaccacataaaggactcattccacagcctccgggattctgtacccagtctccagggggagaaggcatcccgcgctcagatcctggataaggctacagagtacatccaatatatgagaaggaaaaatcacacacaccagcaggacattgacgacctcaaacgacagaacgcgctgctcgagcaacaagtgcgggcccttgagaaagcacggagttctgcc

SEQ ID NO: 127911 - DNA, 273 bp, Artificial Sequence
  derived and/or modified sequence
atgagcgccgcagataaacgcgctcatcataacgccctcgaacggaagaggagggaccacatcaaggactcctttcactctctgcgagattcggtgcccagcctgcagggggagaaggcctcccgggcccaaattctggacaaagcgaccgaatacatacagtacatgcggcggaaaaaccacacccatcagcaagacatcgatgatctgaagaggcagaacgccttgctcgaacaacaggttagagctctcgagaaagcccgcagctctgct

SEQ ID NO: 127912 - DNA, 273 bp, Artificial Sequence
  derived and/or modified sequence
atgtctgccgccgataagagagcccaccacaatgccctagaacggaagcgcagagaccacataaaagatagcttccattcgctcagagacagcgtgccttccctgcagggtgaaaaggcgtccagggctcagattctcgataaggccaccgaatacattcagtatatgaggcggaaaaaccacacgcaccaacaggatatcgatgacctgaagcgtcagaacgcgctgttagaacagcaagtgcgcgccctggagaaggcacggtcaagcgcc

SEQ ID NO: 127913 - DNA, 273 bp, Artificial Sequence
  derived and/or modified sequence
atgagcgccgccgataaaagggcccaccacaacgccttggaaaggaaaagaagggatcacataaaggactcattccattcccttagagattcagtgccatctctgcagggcgagaaggcttccagagcccaaatcctggacaaggctacggagtatatccagtacatgcgcagaaagaaccacacccatcagcaggatattgacgatcttaagagacagaacgcacttttggagcaacaggtgcgagcgctggagaaagcgcgcagctccgcc

SEQ ID NO: 127914 - DNA, 273 bp, Artificial Sequence
  derived and/or modified sequence
atgagcgccgccgacaagcgcgctcaccacaacgcactggagaggaaaaggagggaccacatcaaagactcattccacagtctcagggactcggttcccagtctgcagggcgagaaggcgtcccgggcacagattctggataaagccactgaatacattcaatacatgcgtagaaagaaccacacccatcagcaggacattgacgacctcaaacggcagaatgccttgttagaacagcaggtgcgtgcattggagaaagcacgttcatctgca

SEQ ID NO: 127915 - DNA, 273 bp, Artificial Sequence
  derived and/or modified sequence
atgtcggcagcggacaagagggctcaccataacgcgctggaaagaaaaagaagagatcatattaaagacagcttccacagtctcagggactctgtgcccagcctacagggagagaaagcaagcagagctcagatcctcgataaagctacagaatatatccagtacatgagaaggaaaaatcacacccaccaacaggacattgacgatctcaagcgccagaacgcccttctcgagcagcaagtccgggccctcgaaaaggcccggagttccgcg

SEQ ID NO: 127916 - DNA, 273 bp, Artificial Sequence
  derived and/or modified sequence
atgagcgccgcagataagagggcccaccacaacgctctagagaggaagcgtagggaccatatcaaagatagttttcactcactccgggattcagtcccttccctgcaaggggaaaaagcctccagggcacagatactggataaagcaaccgagtatattcaatacatgcgcaggaagaaccatacccatcagcaggatattgatgacctcaagagacagaatgcccttcttgaacaacaggttcgcgctctggagaaggcgagatcaagcgcc

SEQ ID NO: 127917 - DNA, 273 bp, Artificial Sequence
  derived and/or modified sequence
atgtccgccgcagacaagagggcacatcacaacgcacttgaacgcaagaggcgcgaccatatcaaggatagctttcatagcctccgggactcagtcccgagcctccagggcgagaaagcctctcgcgcacaaattcttgacaaagctactgagtacattcagtacatgcggcgaaagaatcacacccatcagcaagacatcgacgatctgaaacgtcagaacgccctgctcgaacagcaggtcagggcattggaaaaagctcggtccagcgca

SEQ ID NO: 127918 - DNA, 273 bp, Artificial Sequence
  derived and/or modified sequence
atgtccgccgccgataagagggcccatcacaatgccttggagagaaaacggcgggatcatattaaagattctttccatagcttgcgcgatagcgtaccgtctctccagggggagaaggcaagccgggcacagatattggataaggcgactgagtatattcaatacatgcgacggaagaatcatacacatcaacaggacatcgacgatctcaaacggcagaacgccctgcttgagcagcaggttcgcgctctcgagaaagcgcggtccagtgcc

SEQ ID NO: 127919 - DNA, 273 bp, Artificial Sequence
  derived and/or modified sequence
atgtccgccgccgacaaacgcgcacatcacaacgcccttgagaggaagagaagagaccatattaaagattcgttccacagcttgagggacagcgtcccttccctccaaggcgagaaggccagcagagctcagatactcgacaaggccacagagtacatacagtacatgagaagaaaaaaccacacacaccaacaggacattgatgatctgaaacgccagaatgcactgctggaacagcaggtgcgggccttggaaaaggcaaggagctccgct

SEQ ID NO: 127920 - DNA, 273 bp, Artificial Sequence
  derived and/or modified sequence
atgagcgccgctgataagcgcgctcatcataatgcgctcgagaggaaaagaagggaccacattaaagattcttttcacagtctgcgcgactccgttccatccctgcagggagagaaggccagcagagcccaaatactggacaaagccaccgagtatatacagtacatgcggaggaagaaccatacccatcagcaggatatagatgatctgaagaggcagaacgccctgttggagcagcaggtacgcgctttggagaaggcaagatcatcagcc

SEQ ID NO: 127921 - DNA, 273 bp, Artificial Sequence
  derived and/or modified sequence
atgagcgctgctgacaagcgcgcccatcataacgctctagaaaggaaaaggcgggatcatattaaagacagtttccactcacttagagactctgtccctagcctgcaaggggagaaagctagccgagctcaaatccttgacaaagcgaccgagtatatccagtacatgcgacgtaagaatcacacacatcaacaggatattgatgacctaaagcgacagaacgcactgttggaacaacaggttagagcactcgagaaggctaggtcttccgct

SEQ ID NO: 127922 - DNA, 273 bp, Artificial Sequence
  derived and/or modified sequence
atgagcgccgccgacaagagagcccaccataacgctctggaacgaaagcgccgagatcatatcaaagattcattccactctttgcgggattcagtgccctctctccagggcgaaaaggcaagccgggcgcagatcctggacaaggccaccgaatatatacagtatatgaggcgcaaaaatcacactcatcaacaagatatagatgatttgaaacgacaaaacgcgctgcttgagcagcaggtgagagccttggagaaagcacgcagtagcgcc

SEQ ID NO: 127923 - DNA, 273 bp, Artificial Sequence
  derived and/or modified sequence
atgtcggctgctgacaagagggcacatcataacgctttggagaggaagagacgcgatcacatcaaagatagcttccactcattgagggattcggtcccaagtctgcagggagagaaggcctcacgtgcccaaatcctggataaggccactgagtatattcagtacatgcgcagaaagaatcatactcaccagcaggatatagacgacctgaagcggcaaaatgctctcctggagcagcaagtgagggcccttgagaaagctagatcttctgcc

SEQ ID NO: 127924 - DNA, 273 bp, Artificial Sequence
  derived and/or modified sequence
atgagcgctgccgataagcgtgcccaccataacgctctggaacggaaaaggcgcgatcacataaaggacagcttccatagcctgagagacagtgtcccatcgcttcaaggggaaaaggcctcacgagctcaaattctggataaagccacggagtacattcagtatatgcggcggaaaaatcatacacatcaacaggatatcgacgacctgaaacggcagaacgcgctccttgagcagcaggtccgcgccctcgaaaaagctcgctcctctgcg

SEQ ID NO: 127925 - DNA, 273 bp, Artificial Sequence
  derived and/or modified sequence
atgtcagccgccgataaacgtgctcatcataacgctcttgaaagaaagagacgcgatcatattaaagattctttccactcccttagagattctgtgccctctctgcagggggaaaaagcaagtagagctcagatactagataaagctacagaatatatccagtacatgcggagaaaaaatcatactcaccagcaagatatagatgatctaaaaagacagaatgcattgctggaacagcaggtaagagccctggagaaagcaaggtcctcagcg

SEQ ID NO: 127926 - DNA, 273 bp, Artificial Sequence
  derived and/or modified sequence
atgtcagctgcggataagcgggcacaccacaatgcccttgaacgcaagagaagggaccacatcaaggacagcttccattcgctccgcgactccgtcccgtccctccaaggagaaaaagcgagcagagcgcagatcttggacaaggcaactgagtacatccagtacatgcggcgaaagaaccacacccatcagcaggatattgacgatctgaagcgccaaaacgccctgctggagcaacaggtgcgcgctctggaaaaagcccggtcgtcagcc

SEQ ID NO: 127927 - DNA, 273 bp, Artificial Sequence
  derived and/or modified sequence
atgtcagcggcagacaagagagcccaccataacgcgctcgaaagaaagagacgagatcacataaaggactcctttcatagccttagggattcggtcccttcgcttcaaggagagaaggcctcacgtgctcaaattctcgataaagcaactgagtacattcagtacatgaggcgcaagaaccatacccatcaacaggacatcgatgatctgaagcggcaaaatgcactgttggaacagcaggtgcgggcactggaaaaagcacgcagctccgcc

SEQ ID NO: 127928 - DNA, 273 bp, Artificial Sequence
  derived and/or modified sequence
atgagcgcagccgacaagcgagcccaccacaacgcgctggaacgcaaacgcagagatcacatcaaggacagcttccactcgctgcgggactcggtgccgtcccttcaaggagaaaaggcgtcaagagctcaaatcctcgacaaggcaaccgagtacatccagtacatgaggcggaagaatcatactcatcagcaagacattgatgatctcaagcgccagaacgcgctgctggaacagcaggtccgcgctttggagaaagcccggtcctcagcc

SEQ ID NO: 127929 - DNA, 273 bp, Artificial Sequence
  derived and/or modified sequence
atgagcgcagccgataagcgcgcacatcataatgcattggaaagaaagcggagagatcacattaaggactcctttcactcactccgcgattcggtgccttcgctgcaaggagagaaagcgtcccgtgcccaaatacttgacaaggcaaccgagtacatccaatacatgaggagaaagaaccatactcatcagcaagatattgatgacctcaaacggcagaacgcacttctggaacagcaggtccgagcgctggaaaaggccaggtcaagcgct

SEQ ID NO: 127930 - DNA, 439 bp, Artificial Sequence
  derived and/or modified sequence
gggaaataagagagaaaagaagagtaagaagaaatataagagccaccatgagcgccgctgataagcgggctcaccacaatgcgttggagaggaagaggcgcgaccacatcaaagactcgttccattcactccgggactccgtgccgtcgctgcaaggagaaaaagcctcccgggcacagatcctcgacaaggcgactgagtacattcagtacatgcgccgcaagaaccacacccatcagcaagatatcgacgatcttaagagacagaacgcgctgctggaacaacaggtccgcgcactggaaaaggccagaagctcagcctgataataggctggagcctcggtggccatgcttcttgccccttgggcctccccccagcccctcctccccttcctgcacccgtacccccgtggtctttgaataaagtctgagtgggcggc

SEQ ID NO: 127931 - protein, 477 aa, Artificial Sequence
  derived and/or modified sequence
MFPVFPCTLLAPPFPVLGLDSRGVGGLMNSFPPPQGHAQNPLQVGAELQSRFFASQGCAQSPFQAAPAPPPTPQAPAAEPLQVDLLPVLAAAQESAAAAAAAAAAAAAVAAAPPAPAAASTVDTAALKQPPAPPPPPPPVSAPAAEAAPPASAATIAAAAATAVVAPTSTVAVAPVASALEKKTKSKGPYICALCAKEFKNGYNLRRHEAIHTGAKAGRVPSGAMKMPTMVPLSLLSVPQLSGAGGGGGEAGAGGGAAAVAAGGVVTTTASGKRIRKNHACEMCGKAFRDVYHLNRHKLSHSDEKPYQCPVCQQRFKRKDRMSYHVRSHDGAVHKPYNCSHCGKSFSRPDHLNSHVRQVHSTERPFKCEKCEAAFATKDRLRAHTVRHEEKVPCHVCGKMLSSAYISDHMKVHSQGPHHVCELCNKGTGEVCPMAAAAAAAAAAAAAAVAAPPTAVGSLSGAEGVPVSSQPLPSQPW

SEQ ID NO: 127932 - DNA, 1434 bp, Artificial Sequence
  derived and/or modified sequence
atgttcccagtgttcccctgcacattgctcgcccctccctttcctgtgctcggcttggactcccggggtgtcgggggcctcatgaattcgtttccaccacctcagggacatgcccagaacccactgcaggtgggtgcagaactacagtcccggttcttcgcgagccagggttgtgctcagagccccttccaggcagcacctgcccctccccctacccctcaggccccagccgcagagccgctgcaagttgacctccttcccgtcctcgccgctgcccaggaaagcgcggccgccgcagccgcggctgctgcagccgccgccgcggtcgcggccgcaccaccggctcccgctgcagcctccaccgtcgacactgccgcactaaagcagccaccagcccccccacccccccctcctcctgtctctgcccccgcagccgaagcagctccaccagccagcgcagccacaatagccgccgctgccgccacagccgttgtcgcgccaacatcaacagtcgcagtggcccccgtggccagtgcactcgagaagaagaccaaaagtaagggaccatatatctgtgcgctgtgcgccaaggagtttaagaacggctataacctaagacgtcacgaagccattcacaccggagctaaagccggacgagtgcctagcggtgccatgaagatgcctacaatggtgccactcagtctcctgtccgtcccacagctgagcggagccggagggggggggggagaagccggagccgggggcggcgccgccgctgtggccgctggcggggtggtgaccaccaccgctagcgggaagcgtatacggaaaaatcacgcatgtgaaatgtgtggaaaagcatttcgtgatgtttatcacctgaaccggcacaagctctcgcactccgatgagaagccctatcaatgcccagtgtgccagcaacgattcaaaaggaaggatcgcatgtcataccatgtgcgtagccacgacggtgcagtccacaaaccgtacaactgttcccactgcgggaagtcgttcagtcggcctgaccacctcaacagtcacgtaaggcaggtccatagtacagagagacccttcaagtgcgagaaatgtgaagccgcatttgctaccaaagacaggctgcgcgcccacactgtcagacatgaagagaaagtcccctgccacgtgtgcggcaagatgctgtcttccgcgtatattagtgaccatatgaaggttcactctcaggggcctcatcacgtgtgcgagctctgtaacaagggcaccggcgaggtctgccccatggcagccgcagccgctgcagcggccgccgccgctgcagccgccgttgctgccccaccaactgctgtaggctccctgagcggggcggaaggggtaccagtgagctcccagcccttaccatctcagccctggtag

SEQ ID NO: 127933 - DNA, 1434 bp, Artificial Sequence
  derived and/or modified sequence
atgtttcctgtgttcccctgcaccctgctggccccacccttccctgtgctgggcctggacagcagaggagtgggcggcctgatgaacagcttccccccaccccagggccacgcccagaaccccctgcaggtgggcgctgagctgcagagccgcttctttgccagccagggctgtgcccagagccccttccaggccgccccagcccccccacccaccccccaggccccagctgctgagcccctgcaggtggacctgctgcctgtgctggccgccgcccaggagagcgctgctgctgctgctgctgctgctgctgctgctgctgctgtggccgccgcccccccagccccagctgctgccagcacagtggacacagctgccctgaagcagcccccagcccctcctcctcctcctcctcctgtgtctgccccagctgctgaggccgcccccccagccagcgctgccaccatcgctgctgctgctgccacagctgtggtggcccccaccagcacagtggccgtggcccctgtggccagcgccctggagaagaagaccaagagcaagggcccctacatctgtgccctgtgtgccaaggagttcaagaatggctacaacctgcggagacatgaggccatccacactggagccaaggccggccgggtgcccagcggggccatgaagatgcccaccatggtgcccctgagcctgctgtctgtgccccagctgagcggggccggcggcggcggcggggaggccggggccggcggcggcgctgctgctgtggccgccggcggcgtggtgaccaccacagccagcggcaagaggatcaggaagaaccacgcctgtgagatgtgtgggaaggccttcagagatgtgtaccacctgaacagacacaagctgagccacagtgatgagaagccctaccagtgccctgtgtgccagcagcgcttcaagaggaaggacaggatgagctaccacgtgcgcagccatgatggagctgtgcacaagccctacaactgcagccactgtgggaagagcttcagcaggccagaccacctgaacagccacgtgcggcaggtgcacagcacagagcggcccttcaagtgtgagaagtgtgaggccgcctttgccaccaaggaccggctgcgggcccacacagtgagacatgaggagaaggtgccctgccacgtgtgtgggaagatgctgagcagcgcctacatcagtgaccacatgaaggtgcacagccagggcccccaccacgtgtgtgagctgtgcaacaagggcaccggggaggtgtgccccatggctgctgctgctgctgctgctgctgctgctgctgctgctgctgtggccgccccacccacagctgtgggcagcctgagcggggctgagggcgtgcctgtgagcagccagcccctgcccagccagccctggtag

SEQ ID NO: 127934 - DNA, 2552 bp, Artificial Sequence
  derived and/or modified sequence
ttcctccctcccgccggccggggtgcgcgggcggcggggcggcccgcgggccatgcgttcggcgcggcccagcccggccggccgggggcggcgccccgagcccgggccccgcgcggcccgcgcccccggcccccgctgagccccgggggccccgctgcggccgaggccatgttcccggtgtttccttgcacgctgctggccccccccttccccgtgctgggcctggactcccggggggtgggcggcctcatgaactccttcccgccacctcagggtcacgcccagaaccccctgcaggtcggggctgagctccagtcccgcttctttgcctcccagggctgcgcccagagtccattccaggccgcgccggcgcccccgcccacgccccaggccccggcggccgagcccctccaggtggacttgctcccggtgctcgccgccgcccaggagtccgccgcggctgctgcggccgctgccgccgctgctgccgccgtcgctgccgcgcccccggcccctgccgccgcctctacggtggacacagcggccctgaagcagcctccggcgccccctccgccacccccgccagtgtcggcgcccgcggccgaggccgcgccccccgcctccgccgccactatcgccgcggcggcggccaccgccgtcgtagccccaacctcgacggtcgccgtggccccggtcgcgtctgccttggagaagaagacaaagagcaaggggccctacatctgcgctctgtgcgccaaggagttcaagaacggctacaatctccggaggcacgaagccatccacacgggagccaaggccggccgggtcccctcgggtgctatgaagatgccgaccatggtgcccctgagcctcctgagcgtgccccagctgagcggagccggcgggggagggggagaggcgggtgccggcggcggcgctgccgcagtggccgccggtggcgtggtgaccacgaccgcctcggggaagcgcatccggaagaaccatgcctgcgagatgtgtggcaaggccttccgcgacgtctaccacctgaaccgacacaagctgtcgcactcggacgagaagccctaccagtgcccggtgtgccagcagcgcttcaagcgcaaggaccgcatgagctaccacgtgcgctcacatgacggcgctgtgcacaagccctacaactgctcccactgtggcaagagcttctcccggccggatcacctcaacagtcacgtcagacaagtgcactcaacagaacggcccttcaaatgtgagaaatgtgaggcagctttcgccacgaaggatcggctgcgggcgcacacagtacgacacgaggagaaagtgccatgtcacgtgtgtggcaagatgctgagctcggcttatatttcggaccacatgaaggtgcacagccagggtcctcaccatgtctgtgagctctgcaacaaaggtactggtgaggtttgtccaatggcggcggcagcggcagcggcggcagcggcagcagcggcagcagtagcagcccctcccacagctgtgggctccctctcgggggcggagggggtgcctgtgagctctcagccacttccctcccaaccctggtgagctccaagttggttgcgggggagaggggagaatggagtagagtcccttggtacaagctcctctcccccctcttttcccaccaactcctatttccctaccaaccaaggagcctccagaaggaaaggaggaagaaatgttttcttaggggaattcgctaggttttaacgatttgtttctcctgctcctcttctgtcagacctgaccccacacaaacctgtcccctcggttgtgttgaagtcccctggacagtgggcaggggtggcagaggacacgagcagccactgcccgtaccccctctcctctctgtaagcccatgccctgtcttcccagggacttgtgagcctcttccctcgacggtcctcttctctccttccagtcctctccccctgctgtctgcagcccctccccggggagttggtgctttcttttccttttttttttttttccagggggagggaggagaggaaggagggggatcagagctgtcccaaagagggaaagcggtgaggtttgaggaggggcagaagcagggccggcaaaggttgtaccttcataaggtggtatggggggttggggtcaggccctgaacatcgtcctacttgagaatctgtcaggggaaaaagtcaaggggagcaggaggaagagccaggagggccagaggcagagaagagatggagtcttaggggccagggtgagcgaggggtccagggcctagaggtgcttcctgggggcgggggaatgcagccagtgtccccctcccctcttccaccccagctccagccctggtcttgtcttttcatccctcttccccacgacagaagaagttgtggccctggccatgtcatcgtgttcctgtgtcccctgcatgtaccccaccctccaccccttccttttgcgcggaccccattacaataaattttaaataaaatcctgtttctggctctggattg

SEQ ID NO: 127935 - DNA, 1434 bp, Artificial Sequence
  derived and/or modified sequence
atgttccccgtgttcccctgcaccctgctggccccccccttccccgtgctggggttagatagtcgcggagttggcggactgatgaatagcttccctcctcctcaggggcacgcgcaaaatcccctgcaagtgggcgccgagctgcagtcaagatttttcgcaagtcagggttgtgcccagtcgccgttccaggccgctccagcccccccacctactccacaggcacccgccgcagagcctctgcaggtggacctactgccagtgctcgctgcagcccaggagagcgccgctgccgccgccgctgcagcagccgcagcagccgccgtggcggctgctcctccagctccagctgcagcctctaccgtggataccgctgccctcaagcagccccctgccccgcccccacccccacctccggtatccgccccagccgccgaggccgctccccccgcaagcgcagctaccatagccgccgccgctgcaacagccgtcgtcgccccaacttcaactgtggccgttgcccctgtagcctccgcacttgagaaaaagaccaagtctaaggggccttatatttgcgccctgtgcgccaaagagttcaaaaatggatacaatctgagacgccatgaagcaattcacaccggggcaaaagccggccgcgttccctcaggcgcaatgaaaatgcccaccatggtgcccctgagtctgctgtctgttccacagttgagcggtgccggagggggcggtggtgaggcaggagccggtggaggtgctgcagccgttgccgccggtggtgtcgtgactactactgccagcggaaaacgaattagaaaaaatcacgcatgtgaaatgtgcgggaaagcattccgggatgtctaccacttgaaccgccacaagctcagtcactcagacgagaagccataccaatgtccagtatgccaacaaagattcaagcggaaggacaggatgtcctatcacgtgagaagtcacgatggagctgttcacaagccctacaactgtagccattgtggtaagagtttctcacgccctgaccacctaaacagccacgtcaggcaggtgcattcaacagaaagaccctttaagtgtgagaaatgcgaagcggccttcgctactaaggatcgcttacgcgcccatactgttcggcacgaggagaaagtgccatgccacgtttgtggaaagatgctgtcatcagcgtatatctctgaccacatgaaagtccattctcaggggcctcatcatgtctgtgaactttgtaacaaaggcaccggcgaagtgtgtcccatggctgcggcagccgcagcggccgcggcagctgcggccgctgccgtggcagccccccctacggctgtgggatcactgagcggagcagaaggagtgcccgtgtcatctcagcctctgcccagccagccctggtag

SEQ ID NO: 127936 - DNA, 1434 bp, Artificial Sequence
  derived and/or modified sequence
atgttccctgtcttcccgtgcacactgctggccccacctttcccagtgctcggtctggacagtagaggcgttggagggttgatgaacagcttccctcccccacagggccacgctcagaatccactgcaggtgggggctgagctccagtcccggttctttgcttcccagggctgcgcgcagagcccgttccaggctgcgccagcacctccgcctacaccccaggctcccgctgccgagcctcttcaggtggacctgctccctgttctcgccgctgcacaggaaagcgctgctgccgctgctgctgcagcagccgctgcagccgcagtggcggcagcccctcctgcccctgccgcagccagcacagtcgatacagctgctctgaagcagccgcctgcccctccacctccccctcccccagtcagtgcgcctgccgctgaagccgctcctcctgcatccgccgcaacgatcgccgcagctgctgccaccgctgtggtcgcgccaaccagcaccgtcgccgttgctcctgtggcctcagcgctagagaaaaaaacaaagagtaagggcccttatatttgcgcgctgtgtgcaaaagagttcaagaatggatataacctgcggagacacgaggcaatccatactggggctaaggctggacgtgtgcctagcggagcaatgaaaatgcccacaatggtgcctctgtcgttgctgtccgtgcctcagctatcaggagccggaggagggggaggtgaggccggagctggcggaggcgctgcagcagtggccgcaggcggagtggttaccaccacagctagcggtaaaaggatccgcaagaaccacgcatgtgagatgtgtggcaaggcattccgagatgtataccacttgaaccggcacaagctctctcactccgatgagaagccataccagtgccctgtgtgccagcagcgttttaagagaaaggatagaatgagctaccacgtccggtcacatgatggagcagtccacaaaccttacaattgtagccattgtgggaaatcgttttcccgccctgaccacttgaatagccacgtccgccaggttcacagtaccgagcgcccttttaagtgtgaaaagtgtgaggccgcttttgcaaccaaggaccgccttcgggcacatacagtgagacacgaggagaaagtgccctgccatgtctgcggtaaaatgctgtctagtgcatacatctctgaccacatgaaagtccactcacaaggcccacatcacgtgtgcgaattgtgcaataagggcacaggggaggtctgcccgatggccgcagctgctgccgcagccgctgctgccgctgccgcagcagtggctgctccccctaccgctgtgggctcactgagcggtgctgagggggtcccagtgtcttcacagcctttaccaagtcaaccttggtag

SEQ ID NO: 127937 - DNA, 1434 bp, Artificial Sequence
  derived and/or modified sequence
atgttccccgtgttcccctgcaccctgctggccccccccttccccgtgctgggcctggacagcagaggcgtgggcggcctgatgaacagcttcccccccccccagggccacgcccagaaccccctgcaggtgggcgccgagctgcagagcagattcttcgccagccagggctgcgcccagagccccttccaggccgcccccgcccccccccccaccccccaggcccccgccgccgagcccctgcaggtggacctgctgcccgtgctggccgccgcccaggagagcgccgccgccgccgccgccgccgccgccgccgccgccgccgtggccgccgccccccccgcccccgccgccgccagcaccgtggacaccgccgccctgaagcagccccccgcccccccccccccccccccccccgtgagcgcccccgccgccgaggccgccccccccgccagcgccgccaccatcgccgccgccgccgccaccgccgtggtggcccccaccagcaccgtggccgtggcccccgtggccagcgccctggagaagaagaccaagagcaagggcccctacatctgcgccctgtgcgccaaggagttcaagaacggctacaacctgagaagacacgaggccatccacaccggcgccaaggccggcagagtgcccagcggcgccatgaagatgcccaccatggtgcccctgagcctgctgagcgtgccccagctgagcggcgccggcggcggcggcggcgaggccggcgccggcggcggcgccgccgccgtggccgccggcggcgtggtgaccaccaccgccagcggcaagagaatcagaaagaaccacgcctgcgagatgtgcggcaaggccttcagagacgtgtaccacctgaacagacacaagctgagccacagcgacgagaagccctaccagtgccccgtgtgccagcagagattcaagagaaaggacagaatgagctaccacgtgagaagccacgacggcgccgtgcacaagccctacaactgcagccactgcggcaagagcttcagcagacccgaccacctgaacagccacgtgagacaggtgcacagcaccgagagacccttcaagtgcgagaagtgcgaggccgccttcgccaccaaggacagactgagagcccacaccgtgagacacgaggagaaggtgccctgccacgtgtgcggcaagatgctgagcagcgcctacatcagcgaccacatgaaggtgcacagccagggcccccaccacgtgtgcgagctgtgcaacaagggcaccggcgaggtgtgccccatggccgccgccgccgccgccgccgccgccgccgccgccgccgccgtggccgccccccccaccgccgtgggcagcctgagcggcgccgagggcgtgcccgtgagcagccagcccctgcccagccagccctggtag

SEQ ID NO: 127938 - protein, 503 aa, Artificial Sequence
  derived and/or modified sequence
MAEDWLDCPALGPGWKRREVFRKSGATCGRSDTYYQSPTGDRIRSKVELTRYLGPACDLTLFDFKQGILCYPAPKAHPVAVASKKRKKPSRPAKTRKRQVGPQSGEVRKEAPRDETKADTDTAPASFPAPGCCENCGISFSGDGTQRQRLKTLCKDCRAQRIAFNREQRMFKRVGCGECAACQVTEDCGACSTCLLQLPHDVASGLFCKCERRRCLRIVERSRGCGVCRGCQTQEDCGHCPICLRPPRPGLRRQWKCVQRRCLRGKHARRKGGCDSKMAARRRPGAQPLPPPPPSQSPEPTEPHPRALAPSPPAEFIYYCVDEDELKRLLPSVWSESEDGAGSPPPYRRRKRPSSARRHHLGPTLKPTLATRTAQPDHTQAPTKQEAGGGFVLPPPGTDLVFLREGASSPVQVPGPVAASTEALLQAVDPGLPSVKQEPPDPEEDKEENKDDSASKLAPEEEAGGAGTPVITEIFSLGGTRFRDTAVWLPRSKDLKKPGARKQ

SEQ ID NO: 127939 - DNA, 1512 bp, Artificial Sequence
  derived and/or modified sequence
atggctgaggactggctcgactgccctgccctgggcccgggatggaaaaggagagaggtttttcgcaaaagcggagccacatgtggccggtccgacacatactaccagtccccaaccggcgaccgtatcagatctaaagtggagcttacgaggtacttaggacctgcttgcgacctcaccctgtttgatttcaagcagggtatcctttgttaccctgctcccaaagcgcatccagtggccgttgcgtccaagaagcggaaaaagccaagtagaccagccaagactagaaaaagacaagtgggcccacagtccggagaagtgcgcaaagaggctccaagagatgaaacgaaagccgataccgacacagcccctgcttcttttcccgcgcctggctgctgcgaaaactgtggtatttcctttagtggggatggcacccagaggcaacgcttgaagacgttgtgtaaggattgtcgcgcacagaggatagcttttaatcgtgaacagaggatgtttaagcgcgtcgggtgcggagaatgtgccgcttgtcaggtgacagaggactgcggagcctgcagcacttgcctcctgcaactgcctcatgacgttgcttccggattgttctgcaaatgcgagcgccgccggtgcttgcgcatagttgagagaagccgcggatgcggcgtgtgtaggggttgccagacgcaggaggattgcggccattgccccatatgcctgcgccctccccgacccggactgcgaaggcagtggaagtgtgtgcagaggcggtgtctgagggggaagcacgctcgcagaaagggaggatgcgatagcaagatggccgcccgcaggagaccaggggcccagcctttgccacctcctcccccaagtcaaagcccagaacctacagagccacaccctcgagcccttgcaccctctccgccagccgagtttatatactactgcgttgatgaagacgaacttaagagactgttgccctcagtctggtctgaatctgaagatggcgctggctccccccccccttatagacggagaaagaggccaagctccgccagaagacatcacctgggcccaacactgaagccaaccctagccactcgaactgcacagccagatcacactcaggctcccacgaagcaagaagccggtggcggattcgtgctaccgcctcccggcaccgatctggtcttcctgagagaaggagcatcctccccagtgcaggtccctggtcccgtcgctgcatcaaccgaggccctgttgcaagcagtggacccagggctgccttccgtcaaacaggaaccccccgatcccgaggaagacaaggaggagaataaggatgatagtgcttctaagttggccccagaggaggaggcaggcggtgccgggacacctgtgatcacagaaattttttcactgggcggtacccgcttccgagacacggccgtctggttgccgagatcgaaagacttgaaaaagcccggagctaggaaacaatag

SEQ ID NO: 127940 - DNA, 1512 bp, Artificial Sequence
  derived and/or modified sequence
atggcggaggactggttagattgtcccgcgcttggccctggctggaagagacgggaagtgtttagaaaatcgggagccacctgcgggcgatctgatacttactaccagtccccaaccggtgaccggatcagatctaaggtggaactgacccgttacctcggccctgcctgtgaccttacactcttcgattttaagcagggcattctttgctaccctgctcccaaggcccaccctgtggccgtggcctctaagaagcgaaaaaagccgtcacgacctgccaagaccaggaagcgacaggttggccctcagtccggggaagttaggaaggaggcccctcgggatgaaaccaaggcagacaccgatactgcacccgcttctttcccagcaccaggctgttgcgagaactgcgggatcagcttttccggcgacgggacccagagacaacggctcaaaaccctttgtaaggattgccgtgcccagaggatcgccttcaatcgagaacagaggatgtttaaacgggtaggatgtggagaatgtgctgcttgtcaggtgactgaagactgtggtgcctgttccacatgtctgctccaacttccacatgacgtggcaagtggactgttctgcaagtgcgagcgtcgccgctgcttacgcattgtagaacgatcgagaggctgcggggtctgtcgcggttgccagacccaagaagattgcgggcattgtcctatctgcctccgcccaccaaggcctggcctgcggcggcagtggaaatgtgtgcagcgccggtgtctgcgcggaaagcacgcccgacgcaaaggaggctgtgattctaagatggccgctagaagaaggcctggggcgcagccgctccctcctcccccgccctctcagagtcctgaacccacagagcctcatcctcgagccctggcaccatcccctccagccgagttcatctattactgcgtagacgaggacgaactgaagcgcttactcccatctgtgtggagcgagagtgaggatggcgcaggaagtcctcccccttaccgccgtaggaagcgccccagttcggcgaggaggcatcaccttgggcccacactcaagcctacattggctacccgcactgcacagccagatcacacccaggcccctaccaagcaggaggcaggaggaggatttgtccttccgccacccggaacggatctggtcttcctgcgggagggtgcctcatcacccgtgcaggtgcccggcccggtggcggcgtctaccgaagcacttctccaggcagtcgacccaggactgccctccgtgaagcaggagcctccggatcctgaggaggacaaggaggaaaataaagacgactctgctagtaaattagcccctgaggaggaggccgggggcgcagggacccctgtgattaccgaaatcttttccttggggggcactcgctttcgagacacggcggtgtggctccccagaagcaaagacctcaaaaagcctggtgcccgaaagcagtag

SEQ ID NO: 127941 - DNA, 1512 bp, Artificial Sequence
  derived and/or modified sequence
atggccgaggactggctggactgcccagccctgggccctggctggaagagaagagaggtgttcaggaagagcggggccacctgtggccgcagtgacacctactaccagagccccactggagaccgcatccgcagcaaggtggagctgacccgctacctgggccctgcctgtgacctgaccctgtttgacttcaagcagggcatcctgtgctacccagcccccaaggcccaccctgtggccgtggccagcaagaagaggaagaagcccagcaggcctgccaagaccaggaagaggcaggtgggcccccagagcggggaggtgaggaaggaggcccccagagatgagaccaaggctgacacagacacagccccagccagcttccctgcccctggctgctgtgagaactgtggcatctccttctctggagatggcacccagaggcagaggctgaagaccctgtgcaaggactgccgggcccagagaattgccttcaaccgggagcagaggatgttcaagagggtgggctgtggggagtgtgccgcctgccaggtgacagaggactgtggggcctgcagcacctgcctgctgcagctgccccatgatgtggccagcggcctcttctgcaagtgtgagcggcggcgctgcctgcgcatcgtggagaggagccggggctgcggcgtgtgccggggctgccagacccaggaggactgtggccactgccccatctgcctgcggccccccaggcctggcctgcggcggcagtggaagtgtgtgcagaggcgctgcctgcggggcaagcacgcccggaggaaaggaggctgtgacagcaagatggccgcccggcggcggcctggggcccagcccctgcccccacctccacccagccagagccctgagcccacagagccccacccccgggccctggcccccagccccccagctgagttcatctactactgtgtggatgaagatgagctgaagaggctgctgcccagcgtgtggagcgagagtgaagatggagctggcagccccccaccctacagaagaaggaagaggcccagcagcgcccggcggcaccacctgggccccaccctgaagcccaccctggccaccaggacagcccagcctgaccacacccaggcccccaccaagcaggaggccggcggcggctttgtgctgcccccacctggaacagacctggtgttcctgcgggagggcgccagcagccctgtgcaggtgcccggccctgtggccgccagcacagaggccctgctgcaggccgtggaccccggcctgcccagcgtgaagcaggagcccccagaccctgaggaggacaaggaggagaacaaggatgattctgccagcaagctggcccctgaggaggaggccggcggggccggcacccctgtgatcacagagatcttcagcctgggcggcacccgcttccgggacacagctgtgtggctgcccaggagcaaggacctgaagaagccaggggccaggaagcagtag

SEQ ID NO: 127942 - DNA, 1512 bp, Artificial Sequence
  derived and/or modified sequence
atggctgaggactggctggactgcccggccctgggccctggctggaagcgccgcgaagtctttcgcaagtcaggggccacctgtggacgctcagacacctattaccagagccccacaggagacaggatccgaagcaaagttgagctgactcgatacctgggccctgcgtgtgatctcaccctcttcgacttcaaacaaggcatcttgtgctatccagcccccaaggcccatcccgtggcggttgccagcaagaagcgaaagaagccttcaaggccagccaagactcggaaacgtcaggttggaccccagagtggtgaggtcaggaaggaggccccgagggatgagaccaaggctgacactgacacagccccagcttcattccctgctcctgggtgctgtgagaactgtggaatcagcttctcaggggatggcacccaaaggcagcggctcaaaacgttgtgcaaagactgtcgagcacagagaattgccttcaaccgggaacagagaatgtttaagcgtgtgggctgtggggagtgtgcagcctgccaggtaacagaagactgtggggcctgctccacctgcctcctgcagctgccccatgatgtggcatcggggctgttctgcaagtgtgaacggagacgctgcctccggattgtggaaaggagccgagggtgtggagtatgccggggctgtcagacccaagaggattgtggccattgccccatctgccttcgccctccccgccctggtctcaggcgccagtggaaatgtgtccagcgacgttgcctacggggtaaacatgcccgccgcaagggaggctgtgactccaagatggctgccaggcggcgccccggagcccagccactgcctccaccacccccatcacagtccccagagcccacagagccgcaccccagagccctggccccctcgccacctgccgagttcatctattactgtgtagacgaggacgagctaaagcggctgctgcccagtgtctggtcagagtctgaggatggggcaggatcgcccccaccttaccgtcgtcgaaagaggcccagctctgcccgacggcaccatcttggccctaccttgaagcccaccttggctacacgcacagcccaaccagaccatacccaggctccaacgaagcaggaagcaggtggtggctttgtgctgcccccgcctggcactgaccttgtgtttttacgggaaggcgcaagcagtcctgtgcaggtgccgggccctgttgcagcttccacagaagccctgttgcaggcagtagacccaggcctgccttctgtgaagcaagagccacctgacccagaggaggacaaggaggagaacaaggatgattctgcctccaaattggccccagaggaagaggcaggaggggctggcacacccgtgatcacggagattttcagcctgggtggaacccgcttccgagatacagcagtctggttgccaaggtccaaagaccttaaaaaacctggagctagaaagcagtag

SEQ ID NO: 127943 - DNA, 1512 bp, Artificial Sequence
  derived and/or modified sequence
atggccgaggactggctggactgccccgccctgggccccggctggaagcgccgcgaagtctttagaaaaagcggagctacttgtggtagatccgacacgtactaccagagccccacgggcgatcgcatacgatccaaggttgaacttactaggtatctcggcccagcttgtgatctgactctgttcgacttcaaacagggaatcctgtgttatccagcgccaaaggctcacccggttgcagttgcatcaaagaaaagaaagaaaccatcacggccggctaaaacccgtaaacgacaagtgggcccccagtctggggaagtgagaaaggaggcccctcgggacgagactaaggctgatacagataccgcgccggcaagcttcccagcaccaggatgctgcgagaactgcggcatttctttcagcggagatggaacgcagagacagcggctcaagacgttgtgtaaagactgtcgagcacagcggatagcctttaatcgggagcagcggatgtttaaacgcgtgggctgcggggagtgcgcagcatgtcaggtgacagaagattgcggcgcatgtagtacctgtctcctacaattgccacacgacgtggcgagcggtctgttttgcaaatgtgagagacgcaggtgcctcaggattgtagagcggtctaggggctgtggggtatgtcgaggatgccagacccaggaagactgtggccactgtcctatctgcctcagaccacctaggcctggcctccgcagacagtggaaatgcgtgcagagacggtgccttcgtggcaagcacgcgcgcaggaaagggggctgtgatagcaaaatggccgctcgacggaggcctggagcacagccgctaccacctcctccaccttcacaatccccagagccaaccgaacctcacccaagggcccttgcaccgtcacctcctgccgagtttatctattattgtgtcgacgaggatgagctgaaaaggttgctgccgagcgtatggagcgaatcagaagatggggcaggaagccccccgccctacagacggcggaagcgaccatcctctgcaaggcgccaccacttggggcctacactcaaacccaccctggcaacccggacagcccagccggatcatactcaggccccgacaaagcaggaggccgggggaggctttgtgttaccacctcctgggactgatcttgtctttctgagagagggcgcttcatccccggtgcaggtgccaggccctgtggccgcctccaccgaggcactgttacaggccgtggaccccggtctcccctctgttaagcaggagccgcctgatcctgaagaggataaggaagagaataaggacgattctgctagcaagttggctcccgaggaggaagcgggcggggctggcactccagtcatcacagagatattcagtctcggcggtactcgtttcagagataccgccgtctggctcccacggtcgaaggacctgaaaaaacccggtgcaagaaaacaatag

SEQ ID NO: 127944 - DNA, 1512 bp, Artificial Sequence
  derived and/or modified sequence
atggccgaggactggctggactgccccgccctgggccccggctggaagcgcagagaggtctttcggaaatcaggagccacatgcggtcgttccgacacatattaccagtcacccacaggtgataggattcggagcaaagtcgagctgacaagatacttgggcccggcgtgtgacctcactctctttgactttaagcagggcatcttgtgttacccagctccaaaggctcatcccgtggccgtcgcatccaaaaaacgcaaaaagccatctaggcccgccaaaacccgaaagcgccaggtagggccccaatcaggcgaagtcaggaaagaggcaccccgcgacgagaccaaagccgacaccgataccgcccctgctagctttcctgctccaggatgctgtgagaattgtggaatcagtttttccggcgatggcacacaacgccaaagactgaagacactatgcaaggactgtcgggctcagaggatcgcttttaaccgggagcaaaggatgttcaaacgtgttggatgtggagaatgtgcggcatgccaggttacagaagactgtggggcatgctcaacttgccttctccaactcccccatgacgtggcgtcgggcctcttttgtaagtgtgaaaggcgccgctgtctacggattgtggagaggagcaggggctgcggcgtgtgcagaggctgccaaacacaggaggattgcgggcattgtcctatctgtctccgcccaccccgcccgggcctgaggcggcagtggaagtgcgtacaacggcgctgtctccgagggaaacacgctaggagaaaaggaggttgtgactcaaagatggccgctcgccggcggcctggcgcacagcccctgccccctcctcctccttcacaatctcctgaaccaaccgaaccacacccacgtgccttagcaccatcaccgcctgctgagttcatatactactgcgtggacgaagatgagctaaaaagactgcttcccagcgtgtggtctgagtccgaggacggtgcgggctcaccacccccttacagacgaaggaagcgaccaagcagtgcacgaagacatcacctggggcccacgttgaagcccacattagccacaaggaccgctcagccagaccacacccaggcaccaaccaagcaagaagccgggggcggatttgtactgccgccgcccgggaccgacttagtgtttttgcgtgaaggcgccagtagccccgtacaggtccctggaccagtcgccgcctcgacggaagccttgctgcaagcggtcgaccctgggctgcccagcgtgaagcaggagccgccggatccagaggaagataaagaggagaacaaggatgacagcgcctccaagcttgccccggaggaagaagctgggggcgcgggaacgcctgttatcacagaaatcttctcattaggaggtactcgcttccgagatacagccgtgtggctccctagatccaaagatctgaaaaagcccggggcaagaaagcagtag

SEQ ID NO: 127945 - DNA, 1512 bp, Artificial Sequence
  derived and/or modified sequence
atggccgaggattggttagattgccccgctcttggacccggatggaagaggcgagaggtctttaggaaaagtggggcaacatgtggcagatccgacacctattaccagagccctactggcgaccggattcggtccaaggttgagctgacaaggtacctgggcccagcttgtgaccttaccctcttcgacttcaagcaggggatcctttgctacccggcacccaaagcacatccggtcgccgtggcctctaagaagcgcaagaagccaagtagacctgccaaaacgcgtaagaggcaggtagggcctcagagcggcgaggtgcggaaggaggcccctcgcgacgaaaccaaggccgacacggacactgccccagcgtccttccccgctcccggatgttgcgaaaattgtggtatctccttttcgggtgacggaacccaacgtcagcgccttaagacactgtgtaaggactgtagagcccaaaggatcgcctttaatcgagaacagcgcatgtttaaacgcgttgggtgtggcgaatgtgctgcgtgccaggttacggaggactgtggcgcatgctcgacgtgtctcctgcagctgcctcatgatgtagcttccggtctgttctgcaagtgcgagaggagacgctgcctacgcattgtggagcggtccagaggttgcggagtatgccgagggtgccaaacccaggaggattgcgggcactgtcccatttgtctgcgacctcctcgccctggcctcaggaggcagtggaagtgtgtgcaacggaggtgtctgcggggtaagcacgcacgtagaaaaggaggctgcgatagtaagatggctgccaggcgccgtcccggagcccagccactgccccctccccctccttcacagagcccggagcccaccgagccacatccgagggcgctggccccttcacctcccgcagaatttatctattactgtgtggacgaggacgagttgaagagattgctccctagcgtgtggtccgagtctgaagacggcgctggaagcccacccccataccgaagaagaaagaggccctcatcagccagaaggcatcatttagggcctactttaaagcccaccctggcgacaaggacagctcagcccgaccatacacaagcacctacaaaacaggaagcgggtggaggattcgtcttgccgccacctgggaccgatctggtcttcctccgcgagggagctagttccccagttcaggtccctggaccagtcgcagcctctacagaggctctcttacaggccgtggaccctggtctgccatccgtgaagcaggaaccccctgatccagaggaggataaggaagaaaacaaggacgattccgcctctaaactggcccctgaggaggaagccggtggggctggcacccccgtcataacagagatattttctcttggcggaacccgattcagggacacagcagtgtggctgccccgatcaaaggacctgaaaaagcccggtgcccgtaaacagtag

SEQ ID NO: 127946 - DNA, 1512 bp, Artificial Sequence
  derived and/or modified sequence
atggcggaagattggcttgactgccctgcacttgggccagggtggaagagacgcgaagtttttaggaagagcggcgcaacatgcggccgaagcgacacatactatcagagcccaactggagatcgcatccgcagtaaggtggaactgacccgctatctgggccctgcctgtgacctgactctgttcgacttcaagcaggggattctctgttacccagcaccaaaagctcaccccgtggccgtagcctccaagaaacggaaaaagccgagcagaccagccaagactcggaagagacaggtcggcccacagagtggggaagtaaggaaggaagcccctcgggatgagactaaggccgataccgacacagctcctgctagttttcctgctcctgggtgctgcgaaaattgcgggatctctttcagtggagacggcacacagaggcagcggctcaaaacattatgcaaggactgcagggcccagagaattgcttttaacagggagcagcgaatgttcaagcgtgtcggctgtggggaatgtgccgcatgtcaagtgaccgaggactgcggtgcctgtagcacatgtctccttcagctacctcacgacgtggcctccggcttgttttgcaagtgcgaaaggcgcagatgtctgcgcattgtggaaaggtcacgcggatgcggcgtatgtaggggatgccaaacgcaggaggactgcgggcactgcccaatttgcctgcgcccaccccgacctgggctgcgaaggcagtggaaatgtgtgcagagacgttgccttaggggcaagcacgcccgtagaaagggtggctgcgacagcaaaatggccgctaggcggaggcccggtgcccagcccctgcctcctccacctccatcccagtccccggagccgactgagcctcatcctagagcactggccccttcccccccagcggaattcatctactactgtgtagacgaagacgagctcaaaagactgctgcccagcgtgtggtccgagagtgaggatggcgctgggtcaccacctccttaccgcaggcgaaagcgcccaagctcagcacggaggcatcatctgggcccaacgctgaaacccaccttagctaccagaacagctcagcctgaccatacacaggcccctaccaagcaggaggctggcggtgggtttgtgctgccgccaccgggtacggacctggtgtttttacgcgaaggagcctcctcccctgtgcaggtgcccggtcctgtcgctgcgtctaccgaagccctgttacaggccgtggacccaggactgccgagcgtaaagcaggaaccacctgatcctgaggaggacaaagaagaaaacaaggacgattccgcaagcaaactcgcaccagaggaagaggcaggaggcgcaggaacccctgtcattactgaaatattctcactcggagggacccggtttcgggataccgctgtctggctgcctcggagcaaagacttgaaaaagccaggggcacgtaagcagtag

SEQ ID NO: 127947 - DNA, 559 bp, Artificial Sequence
  derived and/or modified sequence
aacatttgtccctggggtctgaggcaggcatgacctgttgaaaaccccaggccagcagagacacctgtccagggctcgatagaaaacatttcttgcatttaaggacaggaggtttaagccactcgggctacgttgactcttcattctagaatcttgggacagcgtattcccttttaactcctggggagcccagggccttggtctgagtttagcttcctccagggaacccgggtggaaaggagagacaggttgctccaccccggtcaggatcaggcgagggggaaccagcctgagtgcagctgccaactcccgccgagtgcgtctgcgaactcccggagcggagtcccgcgtgccgccacctccccgcgggacgcactctcctcgctcccccgggccccgcgtcctccccccggccacccttccccacttttccccccttttccaatcacatggcattttaagaatgccggaaagatggcggtagcggcggcggcggcggcggctgggccggctggcgcgggaggcggccgggcgcagcggagcgggctgctggaagttt

SEQ ID NO: 127948 - DNA, 1512 bp, Artificial Sequence
  derived and/or modified sequence
atggccgaggactggctggactgccccgccctgggccccggctggaagagaagagaggtgttcagaaagagcggcgccacctgcggcagaagcgacacctactaccagagccccaccggcgacagaatcagaagcaaggtggagctgaccagatacctgggccccgcctgcgacctgaccctgttcgacttcaagcagggcatcctgtgctaccccgcccccaaggcccaccccgtggccgtggccagcaagaagagaaagaagcccagcagacccgccaagaccagaaagagacaggtgggcccccagagcggcgaggtgagaaaggaggcccccagagacgagaccaaggccgacaccgacaccgcccccgccagcttccccgcccccggctgctgcgagaactgcggcatcagcttcagcggcgacggcacccagagacagagactgaagaccctgtgcaaggactgcagagcccagagaatcgccttcaacagagagcagagaatgttcaagagagtgggctgcggcgagtgcgccgcctgccaggtgaccgaggactgcggcgcctgcagcacctgcctgctgcagctgccccacgacgtggccagcggcctgttctgcaagtgcgagagaagaagatgcctgagaatcgtggagagaagcagaggctgcggcgtgtgcagaggctgccagacccaggaggactgcggccactgccccatctgcctgagaccccccagacccggcctgagaagacagtggaagtgcgtgcagagaagatgcctgagaggcaagcacgccagaagaaagggcggctgcgacagcaagatggccgccagaagaagacccggcgcccagcccctgcccccccccccccccagccagagccccgagcccaccgagccccaccccagagccctggcccccagcccccccgccgagttcatctactactgcgtggacgaggacgagctgaagagactgctgcccagcgtgtggagcgagagcgaggacggcgccggcagcccccccccctacagaagaagaaagagacccagcagcgccagaagacaccacctgggccccaccctgaagcccaccctggccaccagaaccgcccagcccgaccacacccaggcccccaccaagcaggaggccggcggcggcttcgtgctgcccccccccggcaccgacctggtgttcctgagagagggcgccagcagccccgtgcaggtgcccggccccgtggccgccagcaccgaggccctgctgcaggccgtggaccccggcctgcccagcgtgaagcaggagccccccgaccccgaggaggacaaggaggagaacaaggacgacagcgccagcaagctggcccccgaggaggaggccggcggcgccggcacccccgtgatcaccgagatcttcagcctgggcggcaccagattcagagacaccgccgtgtggctgcccagaagcaaggacctgaagaagcccggcgccagaaagcagtag

SEQ ID NO: 127949 - protein, 186 aa, Artificial Sequence
  derived and/or modified sequence
MASQKRPSQRHGSKYLATASTMDHARHGFLPRHRDTGILDSIGRFFGGDRGAPKRGSGKVPWLKPGRSPLPSHARSQPGLCNMYKDSHHPARTAHYGSLPQKSHGRTQDENPVVHFFKNIVTPRTPPPSQGKGAEGQRPGFGYGGRASDYKSAHKGFKGVDAQGTLSKIFKLGGRDSRSGSPMARR

SEQ ID NO: 127950 - DNA, 561 bp, Artificial Sequence
  derived and/or modified sequence
atggcttctcagaagcgtccctcacaaagacatgggtcgaagtacctcgcaacagcaagcaccatggaccatgctagacatggatttctgcccagacatcgcgacacaggtatcctggacagcattggtagatttttcggcggcgatcgtggtgcccccaaacgagggtccgggaaggtcccgtggctcaaaccaggcaggtcgcccttacccagccacgcccggtcccagcccggtctgtgtaatatgtataaagattcacatcacccagcaaggactgcgcactacggttctctgcctcagaaaagccacggccggacccaggacgaaaatccagtggtccatttcttcaaaaatatcgtaaccccgagaactcctcctcccagccaaggcaaaggagctgagggtcagcgccctggtttcggctatggggggcgggcctccgattataaatccgcacacaagggctttaaaggagtggacgcccaaggtaccctgagcaagatctttaaactgggcggtcgtgactcccgaagcgggagccccatggccaggagatag

SEQ ID NO: 127951 - DNA, 561 bp, Artificial Sequence
  derived and/or modified sequence
atggccagccagaagaggcccagccagagacatggcagcaagtacctggccacagccagcaccatggaccacgcccggcacggcttcctgcccaggcaccgggacaccggcatcctggacagcatcggccgcttcttcggcggggacagaggagcccccaagaggggcagcggcaaggtgccctggctgaagccaggccgcagccccctgcccagccacgcccggagccagcccggcctgtgcaacatgtacaaggacagccaccacccagccaggacagcccactacggcagcctgccccagaagagccacggccgcacccaggatgagaaccctgtggtgcacttcttcaagaacatcgtgacccccaggaccccaccacccagccagggcaaaggagctgagggccagaggcctggcttcggctatggaggccgggccagtgactacaagagcgcccacaagggcttcaagggcgtggatgcccagggcaccctgagcaagatcttcaagctgggcggccgggacagccgcagcggcagccccatggcccggaggtag

SEQ ID NO: 127952 - DNA, 1255 bp, Artificial Sequence
  derived and/or modified sequence
agacagtgcagccacctccgagagcctggatgtgatggcgtcacagaagagaccctcccagaggcacggatccaagtacctggccacagcaagtaccatggaccatgccaggcatggcttcctcccaaggcacagagacacgggcatccttgactccatcgggcgcttctttggcggtgacaggggtgcgcccaagcggggctctggcaaggtaccctggctaaagccgggccggagccctctgccctctcatgcccgcagccagcctgggctgtgcaacatgtacaaggactcacaccacccggcaagaactgctcactacggctccctgccccagaagtcacacggccggacccaagatgaaaaccccgtagtccacttcttcaagaacattgtgacgcctcgcacaccacccccgtcgcagggaaagggggccgaaggccagagaccaggatttggctacggaggcagagcgtccgactataaatcggctcacaagggattcaagggagtcgatgcccagggcacgctttccaaaatttttaagctgggaggaagagatagtcgctctggatcacccatggctagacgctgaaaacccacctggttccggaatcctgtcctcagcttcttaatataactgccttaaaactttaatcccacttgcccctgttacctaattagagcagatgacccctcccctaatgcctgcggagttgtgcacgtagtagggtcaggccacggcagcctaccggcaatttccggccaacagttaaatgagaacatgaaaacagaaaacggttaaaactgtccctttctgtgtgaagatcacgttccttcccccgcaatgtgcccccagacgcacgtgggtcttcagggggccaggtgcacagacgtccctccacgttcacccctccacccttggactttcttttcgccgtggctgcggcacccttgcgcttttgctggtcactgccatggaggcacacagctgcagagacagagaggacgtgggcggcagagaggactgttgacatccaagcttcctttgtttttttttcctgtccttctctcacctcctaaagtagacttcatttttcctaacaggattagacagtcaaggagtggcttactacatgtgggagcttttggtatgtgacatgcgggctgggcagctgttagagtccaacgtggggcagcacagagagggggccacctccccaggccgtggctgcccacacaccccaattagctg

SEQ ID NO: 127953 - DNA, 561 bp, Artificial Sequence
  derived and/or modified sequence
atggccagccagaagcggcccagccagcggcacggcagcaagtacctggctacagcaagtacgatggaccacgcccgccatggtttcctgccaaggcacagagacacaggcatcctggacagtatcggcaggttttttggtggagatagaggcgccccaaagcgcggctctggcaaggtgccatggttgaagcccggacgcagtcctttgccatcacatgccagatcacagccgggcctatgtaatatgtacaaagactcgcaccacccggcacgaacagctcactatgggtctctgccccaaaaaagtcatggtcgtacccaggacgaaaatcctgtagttcacttcttcaagaacatagtaactcccaggacccccccaccatctcagggaaaaggcgccgagggccagcgtcccggatttggatacgggggaagagcctccgattacaagtcggcccacaagggtttcaaaggcgtggacgctcagggtaccttgtccaagatcttcaaactgggcggaagagattccaggtccgggtctcccatggcccggcggtag

SEQ ID NO: 127954 - DNA, 561 bp, Artificial Sequence
  derived and/or modified sequence
atggcatcacaaaaacgtccctcacagagacacggatctaaatacttggctacagcttctactatggaccatgccaggcacgggtttctgcctagacatcgagacaccggcattttagacagtatcggacggtttttcggcggagataggggggcacccaaaaggggtagtggtaaagtgccctggttaaaacccggaagatcccctttgcctagtcacgctcggtcccagccgggtctgtgtaacatgtataaggattctcatcaccctgcgaggacagcccactacgggtcactgcctcagaagtctcatggcagaactcaggatgagaaccctgtggttcacttttttaagaatatcgtgactcccagaacaccacctccatctcagggtaagggcgcagaggggcagcgaccgggatttgggtacggcggaagagcttctgactacaaatctgctcacaagggctttaaaggcgtggatgcccaggggacactgtccaagatcttcaagctcgggggaagggatagtcgtagtgggagccccatggctagacggtag

SEQ ID NO: 127955 - DNA, 561 bp, Artificial Sequence
  derived and/or modified sequence
atggccagccagaagagacccagccagagacacggcagcaagtacctggccaccgccagcaccatggaccacgccagacacggcttcctgcccagacacagagacaccggcatcctggacagcatcggcagattcttcggcggcgacagaggcgcccccaagagaggcagcggcaaggtgccctggctgaagcccggcagaagccccctgcccagccacgccagaagccagcccggcctgtgcaacatgtacaaggacagccaccaccccgccagaaccgcccactacggcagcctgccccagaagagccacggcagaacccaggacgagaaccccgtggtgcacttcttcaagaacatcgtgacccccagaacccccccccccagccagggcaagggcgccgagggccagagacccggcttcggctacggcggcagagccagcgactacaagagcgcccacaagggcttcaagggcgtggacgcccagggcaccctgagcaagatcttcaagctgggcggcagagacagcagaagcggcagccccatggccagaagatag

SEQ ID NO: 127956 - protein, 317 aa, Artificial Sequence
  derived and/or modified sequence
MAVQGSQRRLLGSLNSTPTAIPQLGLAANQTGARCLEVSISDGLFLSLGLVSLVENALVVATIAKNRNLHSPMYCFICCLALSDLLVSGSNVLETAVILLLEAGALVARAAVLQQLDNVIDVITCSSMLSSLCFLGAIAVDRYISIFYALRYHSIVTLPRARRAVAAIWVASVVFSTLFIAYYDHVAVLLCLVVFFLAMLVLMAVLYVHMLARACQHAQGIARLHKRQRPVHQGFGLKGAVTLTILLGIFFLCWGPFFLHLTLIVLCPEHPTCGCIFKNFNLFLALIICNAIIDPLIYAFHSQELRRTLKEVLTCSW

SEQ ID NO: 127957 - DNA, 954 bp, Artificial Sequence
  derived and/or modified sequence
atggccgtgcagggcagccagagaagactgctgggcagcctgaacagcacccccaccgccatcccccagctgggcctggccgccaaccagaccggcgccagatgcctggaggtgagcatcagcgacggcctgttcctgagcctgggcctggtgagcctggtggagaacgccctggtggtggccaccatcgccaagaacagaaacctgcacagccccatgtactgcttcatctgctgcctggccctgagcgacctgctggtgagcggcagcaacgtgctggagaccgccgtgatcctgctgctggaggccggcgccctggtggccagagccgccgtgctgcagcagctggacaacgtgatcgacgtgatcacctgcagcagcatgctgagcagcctgtgcttcctgggcgccatcgccgtggacagatacatcagcatcttctacgccctgagataccacagcatcgtgaccctgcccagagccagaagagccgtggccgccatctgggtggccagcgtggtgttcagcaccctgttcatcgcctactacgaccacgtggccgtgctgctgtgcctggtggtgttcttcctggccatgctggtgctgatggccgtgctgtacgtgcacatgctggccagagcctgccagcacgcccagggcatcgccagactgcacaagagacagagacccgtgcaccagggcttcggcctgaagggcgccgtgaccctgaccatcctgctgggcatcttcttcctgtgctggggccccttcttcctgcacctgaccctgatcgtgctgtgccccgagcaccccacctgcggctgcatcttcaagaacttcaacctgttcctggccctgatcatctgcaacgccatcatcgaccccctgatctacgccttccacagccaggagctgagaagaaccctgaaggaggtgctgacctgcagctggtag

SEQ ID NO: 127958 - DNA, 954 bp, Artificial Sequence
  derived and/or modified sequence
atggccgtccagggctcacaaagacggttattaggctccctcaattcaacacccacagccattccacaactggggctcgccgccaatcagactggggcccgatgtctggaagtctccatatctgatggcctgtttcttagcctaggtctcgtctctttagtcgaaaacgccctggtggtggcaacaatcgctaagaataggaatctccactccccaatgtattgctttatctgttgcctcgctctgagcgatctgttagtttccggttccaacgtcttggaaaccgctgtcatcctcctactagaagcaggagctctggtggcccgggctgcagtgctgcagcaactggacaacgtcattgatgtgattacttgtagttcaatgctgtcttcactgtgtttcctgggtgccattgcggtggaccgctacatttcaatattttacgctttgcggtatcactccatagtcacactgccccgtgcgagaagggccgtagcagccatctgggtcgccagtgtcgttttctcaacactgtttatcgcctattatgatcatgtggccgttctgctgtgtttagtggtgtttttcctagccatgctagtgctgatggctgttctgtatgtgcatatgctcgctagggcttgtcagcatgcccaggggatcgcccgacttcacaaaagacagcgccctgtgcatcagggctttggactcaaaggcgctgtcacacttaccatcctcctgggaattttttttctttgctggggaccatttttcttgcatttaacactgattgtgctgtgtcctgaacatcccacatgcgggtgcatctttaagaattttaacctgttccttgcccttataatctgcaatgcaattatcgaccctcttatttacgcctttcactctcaggagttaagacgcacactgaaagaagtcctaacttgctcttggtag

SEQ ID NO: 127959 - DNA, 954 bp, Artificial Sequence
  derived and/or modified sequence
atggctgtgcagggcagccagaggcggctgctgggcagcctgaacagcacccccacagccatcccccagctgggcctggccgccaaccagacaggagcccgctgcctggaggtgtccatcagtgatggcctcttcctgagcctgggcctggtgtccctggtggagaatgccctggtggtggccaccatcgccaagaacagaaacctgcacagccccatgtactgcttcatctgctgcctggccctgagtgacctgctggtgtctggcagcaatgtgctggagacagctgtgatcctgctgctggaggccggggccctggtggcccgggctgctgtgctgcagcagctggacaacgtgattgatgtgatcacctgcagctccatgctgagcagcctgtgcttcctgggcgccatcgctgtggaccgctacatcagcatcttctacgccctgcgctaccacagcatcgtgaccctgccccgggcccggcgggctgtggccgccatctgggtggcctctgtggtgttcagcaccctcttcatcgcctactatgaccacgtggccgtgctgctgtgcctggtggtgttcttcctggccatgctggtgctgatggctgtgctgtatgtgcacatgctggcccgggcctgccagcacgcccagggcatcgcccggctgcacaagaggcagaggcctgtgcaccagggcttcggcctgaagggagctgtgaccctgaccatcctgctgggcatcttcttcctgtgctggggccccttcttcctgcacctgaccctcatcgtgctgtgcccagagcaccccacctgtggctgcatcttcaagaacttcaacctcttcctggccctgatcatctgcaatgccatcatcgaccccctcatctatgccttccacagccaggagctgcggaggaccctgaaggaggtgctgacctgctcctggtag

SEQ ID NO: 127960 - DNA, 954 bp, Artificial Sequence
  derived and/or modified sequence
atggccgtgcagggcagccagcggcggctgctgggcagcctgaactctacaccaactgccatcccacagcttggattggctgcgaatcaaacaggggcccggtgcctggaggtttctatctccgatggattattcttatcacttggactggtgtcgctggtggagaacgcactggtggtcgcgacaattgctaagaatcgcaatttgcattcccccatgtactgtttcatctgttgcctggccctgagtgacttgcttgtcagtgggtcgaatgttttggagacagccgtcatcctactcctggaagccggagcactggtcgctagagccgccgtgcttcagcaactggacaacgttatcgatgtgatcacttgctcgtctatgttgtcaagtctgtgcttcctaggagccatcgccgttgataggtatatttcaatcttctacgcgctgagataccactccatcgttaccctgcctcgcgcccggcgtgccgttgctgccatttgggtggccagcgtggttttttcaaccctcttcatcgcttactatgatcatgtggccgtcctgttgtgcttagttgtgttctttttagccatgctggtcctgatggccgtcctttacgtccacatgttggccagagcctgtcagcatgctcaaggtatcgcccgccttcataaacgacagcggcccgtgcaccaaggcttcggccttaaaggagccgtgacactgaccatattacttggtatcttttttctatgttgggggccattcttcctgcacctgaccctgattgttctgtgccccgaacaccccacttgcggctgtatcttcaagaatttcaacctctttctggcactgattatttgtaacgctatcatcgatcctcttatctacgctttccactcacaagaactccggaggactctgaaagaggtcctcacctgctcttggtag

SEQ ID NO: 127961 - DNA, 954 bp, Artificial Sequence
  derived and/or modified sequence
atggcggttcaggggtcccagcggcgtctcctggggagcctcaattctactcctactgccatcccacagctgggactagcagcaaaccagacaggtgctcgctgcctggaggtgtctatctccgacggtttgttcctctctctgggactggtgagcttagtggagaatgcattggtcgtggctacaatcgcaaaaaatcgaaacctccattcccctatgtactgcttcatatgttgtttggcgctgtctgatctgctggtgagcggctcaaatgtgctggagaccgctgtcatccttcttctcgaagccggagccctggtggccagggccgcagtgctgcagcagttggataatgtcattgacgtgataacctgttcgagcatgctgagtagcctgtgcttcctgggagctatagcagtggatcggtatataagtattttttatgcactcagataccacagcatagtcacactgcctcgggctcggagggccgtagcggctatttgggtggctagtgtggtctttagtacactgttcatcgcctactatgatcatgtcgcagtccttctctgtctggttgtgttttttctcgccatgttagtcctgatggcagttctgtacgtgcacatgcttgctcgtgcctgccagcacgcgcagggaatcgcccgtcttcacaagaggcagcggccagtgcaccaaggattcggactcaagggtgctgtgacgctaaccatattgttaggaatctttttcctgtgttgggggccattttttctgcacctcacactgatcgtactttgccctgaacaccccacctgcggatgcatctttaaaaacttcaacctgtttttggccctgattatctgcaatgctataatcgatcccttgatttatgccttccactctcaagaattgagaaggacactgaaagaagtacttacctgtagctggtag

SEQ ID NO: 127962 - DNA, 3099 bp, Artificial Sequence
  derived and/or modified sequence
agacgcagtcttcagcaaggaagtgctgggaacgccctggagtgaacccaggaagatgcctgcagtgggtgccagggcccctctccaccgtccctgctgggcttcggggccacgcccgactgctgtgaacggcctgcggagcaccacgtgcgacggctggaggcgagaggtctgcctttgatgtggctgttggtgcagggcctgtggtgccttccgcagcggaaatggcgcgccgcccggggagggcgggagcagcgtcccgggtgcccctgtgaggatgagcgacgagatgactggagggtccctgaagacctcactagggtgcccccagccggtccgctcccaggaagcgacacccccacagccccagggctgcagctgagggggtcgccactctggctgggcgaggctgggcccttgggggcaggcgccagagtggcctcaggctctacaagatgcctgaaaacaccaacctctccagggctcactagcattggacgctttcacgctctgccctggccggaagccccctcaccccgcgcgatgtgcaaactcctgcagggctcactcagtttccagaactttaattattggaaagttctccctggtccagcccccaaatctgccgtgaacgttgacagctgagttgctgctccatgcgtgctttggctgagagcagaggggacccctgtcctccctgagctgctgacgaggggaggggtgaagggtggggcctctggagagggcaggtcccggggaagctccggactcctagaggggcggccaggtgggggccctggtgaccaggacagactgtggtgttttttaacgtaaaggagatccgcggtgtgagggaccccctgggtcctgcacgccgcctggtggcaggccgggccatggtgggtgctcacgcccccggcatgtggccgccctcagtgggaggggctctgagaacgactttttaaaacgcagagaaaagctccattcttcccaggacctcagcgcagccctggcccaggaaggcaggagacagaggccaggacggtccagaggtgtcgaaatgtcctggggacctgagcagcagccaccagggaagaggcagggagggagctgaggaccaggcttggttgtgagaatccctgagcccaggcggtagatgccaggaggtgtctggactggctgggccatgcctgggctgacctgtccagccagggagagggtgtgagggcagatctgggggtgcccagatggaaggaggcaggcatgggggacacccaaggccccctggcagcaccatgaactaagcaggacacctggaggggaagaactgtggggacctggaggcctccaacgactccttcctgcttcctggacaggactatggctgtgcagggatcccagagaagacttctgggctccctcaactccacccccacagccatcccccagctggggctggctgccaaccagacaggagcccggtgcctggaggtgtccatctctgacgggctcttcctcagcctggggctggtgagcttggtggagaacgcgctggtggtggccaccatcgccaagaaccggaacctgcactcacccatgtactgcttcatctgctgcctggccttgtcggacctgctggtgagcgggagcaacgtgctggagacggccgtcatcctcctgctggaggccggtgcactggtggcccgggctgcggtgctgcagcagctggacaatgtcattgacgtgatcacctgcagctccatgctgtccagcctctgcttcctgggcgccatcgccgtggaccgctacatctccatcttctacgcactgcgctaccacagcatcgtgaccctgccgcgggcgcggcgagccgttgcggccatctgggtggccagtgtcgtcttcagcacgctcttcatcgcctactacgaccacgtggccgtcctgctgtgcctcgtggtcttcttcctggctatgctggtgctcatggccgtgctgtacgtccacatgctggcccgggcctgccagcacgcccagggcatcgcccggctccacaagaggcagcgcccggtccaccagggctttggccttaaaggcgctgtcaccctcaccatcctgctgggcattttcttcctctgctggggccccttcttcctgcatctcacactcatcgtcctctgccccgagcaccccacgtgcggctgcatcttcaagaacttcaacctctttctcgccctcatcatctgcaatgccatcatcgaccccctcatctacgccttccacagccaggagctccgcaggacgctcaaggaggtgctgacatgctcctggtgagcgcggtgcacgcggctttaagtgtgctgggcagagggaggtggtgatattgtgtggtctggttcctgtgtgaccctgggcagttccttacctccctggtccccgtttgtcaaagaggatggactaaatgatctctgaaagtgttgaagcgcggacccttctgggtccagggaggggtccctgcaaaactccaggcaggacttctcaccagcagtcgtggggaacggaggaggacatggggaggttgtggggcctcaggctccgggcaccaggggccaacctcaggctcctaaagagacattttccgcccactcctgggacactccgtctgctccaatgactgagcagcatccaccccaccccatctttgctgccagctctcaggaccgtgccctcgtcagctgggatgtgaagtctctgggtggaagtgtgtgccaagagctactcccacagcagccccaggagaaggggctttgtgaccagaaagcttcatccacagccttgcagcggctcctgcaaaaggaggtgaaatccctgcctcaggccaagggaccaggtttgcaggagcccccctagtggtatggggctgagccctcctgagggccggttctaaggctcagactgggcactggggcctcagcctgctttcctgcagcagtcgcccaagcagacagccctggcaaatgcctgactcagtgaccagtgcctgtgagcatggggccaggaaagtctggtaataaatgtgactcagcatcacccacctta

SEQ ID NO: 127963 - protein, 829 aa, Artificial Sequence
  derived and/or modified sequence
MNSGVAMKYGNDSSAELSELHSAALASLKGDIVELNKRLQQTERERDLLEKKLAKAQCEQSHLMREHEDVQERTTLRYEERITELHSVIAELNKKIDRLQGTTIREEDEYSELRSELSQSQHEVNEDSRSMDQDQTSVSIPENQSTMVTADMDNCSDLNSELQRVLTGLENVVCGRKKSSCSLSVAEVDKHIEQLTTASEHCDLAIKTVEEIEGVLGRDLYPNLAEERSRWEKELAGLREENESLTAMLCSKEEELNRTKATMNAIREERDRLRRRVRELQTRLQSVQATGPSSPGRLTSTNRPINPSTGELSTSSSSNDIPIAKIAERVKLSKTRSESSSSDRPVLGSEISSIGVSSSVAEHLAHSLQDCSNIQEIFQTLYSHGSAISESKIREFEVETERLNSRIEHLKSQNDLLTITLEECKSNAERMSMLVGKYESNATALRLALQYSEQCIEAYELLLALAESEQSLILGQFRAAGVGSSPGDQSGDENITQMLKRAHDCRKTAENAAKALLMKLDGSCGGAFAVAGCSVQPWESLSSNSHTSTTSSTASSCDTEFTKEDEQRLKDYIQQLKNDRAAVKLTMLELESIHIDPLSYDVKPRGDSQRLDLENAVLMQELMAMKEEMAELKAQLYLLEKEKKALELKLSTREAQEQAYLVHIEHLKSEVEEQKEQRMRSLSSTSSGSKDKPGKECADAASPALSLAELRTTCSENELAAEFTNAIRREKKLKARVQELVSALERLTKSSEIRHQQSAEFVNDLKRANSNLVAAYEKAKKKHQNKLKKLESQMMAMVERHETQVRMLKQRIALLEEENSRPHTNETSL

SEQ ID NO: 127964 - DNA, 2490 bp, Artificial Sequence
  derived and/or modified sequence
atgaacagcggcgtggccatgaagtacggcaacgacagcagcgccgagctgagcgagctgcacagcgccgccctggccagcctgaagggcgacatcgtggagctgaacaagagactgcagcagaccgagagagagagagacctgctggagaagaagctggccaaggcccagtgcgagcagagccacctgatgagagagcacgaggacgtgcaggagagaaccaccctgagatacgaggagagaatcaccgagctgcacagcgtgatcgccgagctgaacaagaagatcgacagactgcagggcaccaccatcagagaggaggacgagtacagcgagctgagaagcgagctgagccagagccagcacgaggtgaacgaggacagcagaagcatggaccaggaccagaccagcgtgagcatccccgagaaccagagcaccatggtgaccgccgacatggacaactgcagcgacctgaacagcgagctgcagagagtgctgaccggcctggagaacgtggtgtgcggcagaaagaagagcagctgcagcctgagcgtggccgaggtggacaagcacatcgagcagctgaccaccgccagcgagcactgcgacctggccatcaagaccgtggaggagatcgagggcgtgctgggcagagacctgtaccccaacctggccgaggagagaagcagatgggagaaggagctggccggcctgagagaggagaacgagagcctgaccgccatgctgtgcagcaaggaggaggagctgaacagaaccaaggccaccatgaacgccatcagagaggagagagacagactgagaagaagagtgagagagctgcagaccagactgcagagcgtgcaggccaccggccccagcagccccggcagactgaccagcaccaacagacccatcaaccccagcaccggcgagctgagcaccagcagcagcagcaacgacatccccatcgccaagatcgccgagagagtgaagctgagcaagaccagaagcgagagcagcagcagcgacagacccgtgctgggcagcgagatcagcagcatcggcgtgagcagcagcgtggccgagcacctggcccacagcctgcaggactgcagcaacatccaggagatcttccagaccctgtacagccacggcagcgccatcagcgagagcaagatcagagagttcgaggtggagaccgagagactgaacagcagaatcgagcacctgaagagccagaacgacctgctgaccatcaccctggaggagtgcaagagcaacgccgagagaatgagcatgctggtgggcaagtacgagagcaacgccaccgccctgagactggccctgcagtacagcgagcagtgcatcgaggcctacgagctgctgctggccctggccgagagcgagcagagcctgatcctgggccagttcagagccgccggcgtgggcagcagccccggcgaccagagcggcgacgagaacatcacccagatgctgaagagagcccacgactgcagaaagaccgccgagaacgccgccaaggccctgctgatgaagctggacggcagctgcggcggcgccttcgccgtggccggctgcagcgtgcagccctgggagagcctgagcagcaacagccacaccagcaccaccagcagcaccgccagcagctgcgacaccgagttcaccaaggaggacgagcagagactgaaggactacatccagcagctgaagaacgacagagccgccgtgaagctgaccatgctggagctggagagcatccacatcgaccccctgagctacgacgtgaagcccagaggcgacagccagagactggacctggagaacgccgtgctgatgcaggagctgatggccatgaaggaggagatggccgagctgaaggcccagctgtacctgctggagaaggagaagaaggccctggagctgaagctgagcaccagagaggcccaggagcaggcctacctggtgcacatcgagcacctgaagagcgaggtggaggagcagaaggagcagagaatgagaagcctgagcagcaccagcagcggcagcaaggacaagcccggcaaggagtgcgccgacgccgccagccccgccctgagcctggccgagctgagaaccacctgcagcgagaacgagctggccgccgagttcaccaacgccatcagaagagagaagaagctgaaggccagagtgcaggagctggtgagcgccctggagagactgaccaagagcagcgagatcagacaccagcagagcgccgagttcgtgaacgacctgaagagagccaacagcaacctggtggccgcctacgagaaggccaagaagaagcaccagaacaagctgaagaagctggagagccagatgatggccatggtggagagacacgagacccaggtgagaatgctgaagcagagaatcgccctgctggaggaggagaacagcagaccccacaccaacgagaccagcctgtag

SEQ ID NO: 127965 - DNA, 2490 bp, Artificial Sequence
  derived and/or modified sequence
atgaacagcggcgtcgcaatgaagtacggaaatgatagctcagccgaactcagcgagctgcactcggccgcattggcatctttgaagggcgatatcgtggagctgaacaagcgcctgcaacagaccgaaagggagagagacctccttgagaagaagctggccaaagcccaatgtgagcagagccacctgatgcgagaacatgaggacgtgcaggagaggacgaccttgcgctatgaagagcggattaccgagctgcattctgtgattgctgagctgaacaagaagatcgacagactgcaaggcaccaccatccgggaggaagatgaatactctgaattacgcagtgagttgtcccagtctcagcacgaggtgaatgaggattctcgatcgatggatcaggaccagaccagtgtgtctatccctgagaaccagtcaacgatggtcaccgccgacatggataattgttcagacttgaattcagagcttcagcgggttcttaccgggttggaaaatgtggtatgcggtcggaaaaaatcttcttgctccttgagcgtggccgaggtggacaagcacattgagcagctgaccaccgctagcgaacattgcgacctcgccataaagacagtggaagaaatcgaaggcgtcttaggacgtgacttatacccaaacctggccgaggagcgcagccgttgggaaaaggaactcgccgggctccgcgaggagaatgagtccctcaccgctatgttatgttccaaagaggaggagttgaaccgcaccaaagcaactatgaacgcaatccgggaggagcgtgatcgtctgcgcaggcgcgtcagagagctgcagacgaggctgcaatccgtgcaggcgaccggcccatcatcaccaggccgcctgacttccacaaacaggccaatcaatcccagtactggcgagctgtcaacctcttcctctagtaatgatattccaattgcaaaaattgcagagagggttaagctctccaagacacggtctgaatcatcatcgtctgacaggccagtgctgggctcagaaattagtagcatcggcgtatcatcttcagtggccgagcatctcgcacacagcctgcaagattgctctaacatccaggagatcttccaaacactgtacagccacggctcagcaatatccgagtccaaaatacgcgagttcgaagtcgaaaccgaacgactgaactcacggatcgaacacctgaaatcccagaacgatcttctcaccattacactggaggagtgcaaatctaacgctgaacggatgagcatgctggttggaaagtacgagtccaatgccacagcactgagactcgcactccaatattccgagcaatgcatcgaagcctacgagctactcctggctctcgctgagagcgaacagtcactcatacttgggcagttccgagctgccggcgtgggcagttcaccaggcgatcaatccggggacgagaatatcacccaaatgctgaagagggcacatgattgtaggaagacagctgagaatgctgctaaagcactgctgatgaagctggatgggagttgtggcggtgcttttgccgtagcgggatgctcagtacaaccttgggagtctctgtcttcaaactctcacacgagcacgacaagctctacagcatcctcatgcgatacggagtttacaaaggaggacgagcaaagattgaaggattacatccagcaactgaagaacgatcgagctgctgtcaagctgacaatgctggaactggagtccattcacattgatccactgagctatgatgtgaaacctcgcggcgatagtcaaaggctagatctggaaaacgcggttctgatgcaagaattgatggcgatgaaagaagaaatggctgagttgaaggcacagctgtacctccttgagaaggagaaaaaagccttagagttgaaattgtctacgcgtgaggcgcaagagcaagcctacctagtgcacattgagcacctaaagagcgaggtggaggaacagaaggaacagcggatgcgttctctctccagcactagtagtggctctaaggacaaacccggaaaggaatgcgcagatgcggcctcacctgctctgtctctcgccgaattgcgaaccacttgttctgagaatgaattggcagccgaattcaccaacgctataaggagggaaaaaaagctcaaggctcgtgtgcaggagttagtttccgccttggagaggctcaccaaaagctcggagatacgacatcaacaatcagccgaattcgtgaacgacctgaaaagggctaacagcaacctggtggccgcgtacgaaaaggccaagaaaaaacaccagaacaaactaaaaaagctggaatcacagatgatggctatggtggaaagacacgagacacaagtgaggatgctgaaacagaggatcgccctgcttgaggaagagaacagccgccctcatactaacgagacaagcctctag

SEQ ID NO: 127966 - DNA, 2490 bp, Artificial Sequence
  derived and/or modified sequence
atgaacagcggcgtggccatgaagtatggaaatgacagcagcgctgagctgtctgagctgcacagcgctgccctggccagcctgaagggggacatcgtggagctgaacaagaggctgcagcagacagagcgggagcgggacctgctggagaagaagctggccaaggcccagtgtgagcagagccacctgatgagggagcatgaagatgtgcaggagaggaccaccctgcgctatgaggagcgcatcacagagctgcacagcgtgattgctgagctgaacaagaagattgaccggctgcagggcaccaccatccgggaggaggatgagtacagcgagctgcggtctgagctgagccagagccagcacgaggtgaatgaagacagccgctccatggaccaggaccagacctctgtgtccatccctgagaaccagagcaccatggtgacagctgacatggacaactgcagcgacctgaacagcgagctgcagagggtgctgaccggcctggagaatgtggtgtgtggcaggaagaagagcagctgcagcctgtctgtggccgaggtggacaagcacatcgagcagctgaccacagccagcgagcactgtgacctggccatcaagacagtggaggagattgagggcgtgctgggccgggacctgtaccccaacctggccgaggagaggagccgctgggagaaggagctggccggcctgcgggaggagaatgaaagcctgacagccatgctgtgcagcaaggaggaggagctgaacagaaccaaggccaccatgaatgccatccgggaggagcgggaccggctgcggaggagagtgcgggagctgcagacccggctgcagagcgtgcaggccaccggccccagcagccctggccgcctgaccagcaccaaccggcccatcaaccccagcactggagagctgagcaccagcagcagcagcaatgacatccccatcgccaagattgctgagcgggtgaagctgagcaagaccaggtctgagagcagcagcagtgacaggcctgtgctgggcagcgagatcagcagcattggagtgagcagctctgtggccgagcacctggcccacagcctgcaggactgcagcaacatccaggagatcttccagaccctgtacagccacggcagcgccatcagcgagagcaagatccgggagtttgaggtggagacagagcggctgaacagcagaattgagcacctgaagagccagaatgacctgctgaccatcaccctggaggagtgcaagagcaatgctgagaggatgtccatgctggtgggcaagtatgagagcaatgccacagccctgcggctggccctgcagtacagcgagcagtgcatcgaggcctatgagctgctgctggccctggccgagagcgagcagagcctcatcctgggccagttccgggccgccggcgtgggcagcagccctggggaccagagcggagatgagaacatcacccagatgctgaagagggcccatgactgcaggaagacagcagaaaatgctgccaaggccctgctgatgaagctggatggcagctgtggcggggcctttgctgtggccggctgcagcgtgcagccctgggagagcctgagcagcaacagccacaccagcaccaccagcagcacagccagcagctgtgacacagagttcaccaaggaggatgagcagaggctgaaggactacatccagcagctgaagaatgacagagctgctgtgaagctgaccatgctggagctggagagcatccacatcgaccccctgtcctatgatgtgaagcccaggggggacagccagaggctggacctggagaatgctgtgctgatgcaggagctgatggccatgaaggaggagatggccgagctgaaggcccagctgtacctgctggagaaggagaagaaggccctggagctgaagctgagcacccgggaggcccaggagcaggcctacctggtgcacatcgagcacctgaagtctgaggtggaggagcagaaggagcagaggatgaggagcctgagcagcaccagcagcggcagcaaggacaagccaggcaaggaatgtgctgatgctgccagccctgccctgagcctggccgagctgcggaccacctgcagtgaaaatgagctggccgctgagttcaccaatgccatccggcgggagaagaagctgaaggcccgggtgcaggagctggtgtctgccctggagcggctgaccaagagcagcgagatccgccaccagcagagcgctgagtttgtgaatgacctgaagagggccaacagcaacctggtggccgcctatgagaaggccaagaagaagcaccagaacaagctgaagaagctggagagccagatgatggccatggtggagagacatgagacccaggtgaggatgctgaagcagagaattgccctgctggaggaggagaacagccggccccacaccaatgagaccagcctgtag

SEQ ID NO: 127967 - DNA, 2490 bp, Artificial Sequence
  derived and/or modified sequence
atgaacagcggcgtggccatgaagtacggcaacgacagcagcgccgagctcagcgagttgcactccgccgcgctcgcatcgttgaagggtgacatcgtggagctgaataagcggctgcagcagactgaaagagagagggatctgttggaaaagaagctcgcgaaggctcagtgcgaacaatctcatctgatgcgggaacacgaagacgtccaagagaggactacgctgaggtacgaagaacgaatcacagaactgcatagtgttatcgcagagctgaataaaaagatcgataggctgcaaggaaccaccattcgcgaagaggacgagtattcagagctgcgctcggagctatcacagtcccagcacgaggtcaatgaagacagtagaagcatggatcaggatcagactagtgtttctattccagaaaaccagtccacaatggtaaccgccgatatggacaactgctctgatcttaactctgagctgcagcgcgtcctgacgggactagagaatgtcgtgtgtggccggaaaaaatcatcatgtagtctgtccgtcgccgaagtggataaacatattgagcagctgaccacagctagtgaacactgcgatctggcaattaagactgtggaagaaattgaaggggtgctgggccgggatctataccctaacttggcagaagagagatcccgctgggagaaagaacttgctggtctccgtgaggaaaatgagtccctaacagcaatgttgtgcagcaaggaagaggaactgaaccggactaaggctaccatgaacgcgatccgagaggagagggatcggctgcgccgtagagtgcgcgagttgcagacaaggctccaaagcgtgcaggcgaccggaccaagtagtcccggccgcttgacgagtacaaaccggcctatcaatccatccacaggcgaactctccacttcctcctctagtaacgacattccaatcgccaaaatagctgaacgcgtcaaactgtctaagactaggagtgaatcctcctcaagtgatcggccggtcctgggctctgagatatcgagcatcggcgtgagctcttctgtggccgagcacctggcccacagcctgcaggattgtagtaatattcaggagatttttcagacattgtattcccatggatccgcgatcagcgaatccaaaatacgcgaatttgaagttgaaactgaaagattgaattctaggatcgaacatttgaagagccagaacgatctgctgacaattactctcgaggagtgcaaatccaacgccgagagaatgtcaatgctggtgggaaaatatgaatctaacgcgacggccctgcgcctcgccctacagtactcagaacagtgtattgaagcctacgaactgttgctcgcactggccgaatccgaacagagcctaattttgggacagttccgagcagccggtgtaggatcgtcccccggcgaccagagcggggatgagaatattacccagatgttaaagagagctcacgactgtcgaaagaccgctgagaacgctgcgaaggcacttcttatgaaattagatggctcttgtggcggcgcctttgcggtggccgggtgcagcgtacagccctgggaaagtctatcttccaattcacacacaagcacaacgtcttccactgcctcttcctgcgacaccgaatttactaaggaggacgaacaacggctgaaagattatattcagcagctcaaaaatgatcgagcggccgtcaaactgacaatgcttgaactggagagtatccacattgatcccctgagttacgacgtgaagccaaggggggactcacagagactggatctagagaacgctgttctgatgcaggaactgatggccatgaaggaggagatggccgaactgaaggcgcagctgtacctgcttgaaaaggaaaaaaaggcactggaactcaaactctctacgcgcgaggcacaggagcaggcttatctggttcacattgagcatttgaagtcggaagtggaagaacagaaagagcagcggatgcgttctctgtctagtacgagctcaggctccaaagacaagcccggcaaagaatgcgccgatgccgcctctcccgccttgtctctggctgaattgaggactacatgttccgaaaatgagctcgccgctgagtttacaaatgcgatacgcagagaaaagaagctgaaagccagggtccaagagttggtaagtgcactggaaaggttgactaagtctagtgagatacggcatcagcagtctgctgagttcgtcaacgaccttaagcgagcgaattccaacctcgtcgccgcatatgagaaggctaaaaagaaacaccagaataagctgaagaaactcgaatcgcagatgatggccatggtcgagagacatgaaacccaggtccggatgcttaaacagcggatcgcactgctggaggaggaaaatagccgcccccatacaaacgaaacatccttgtag

SEQ ID NO: 127968 - DNA, 8257 bp, Artificial Sequence
  derived and/or modified sequence
agaaaccacttacaactccagacgattcgaaggggaaacttcggcgtgaagtgcagctccgctccggctccctctagctttctttccttctctggaatccgaggcgcggatcttcctcgccccaccgccctagttttttcgggagctcgccggtgccctctagggtgtcggctcgtgctgggaagtgccctccatcctggtaatggggggcggcgaggcaccgtaggagtggcgaggcggcgcccagggtggcactgccccggaacggggcgctgggtgcgcgcgggagggtccccgcgcgggctccgccgctgccgcagctgcgagcgcgccgcgccaccgagcctcctgcagcaatggctcgtccgtgaaacgcgagccacggctgctctttttaagagtgcctgcatcctccgtttgcgcttcgcaactgtcctgggtgaaaatggctgtctagactaaaatgtggcagaagggaccaagcagtggatattgagcctgtgaagtccaactcttaagctccgagacctgggggactgagagcccagctctgaaaagtgcatcatgaattccggagttgccatgaaatatggaaacgactcctcggccgagctgagtgagctccattcagcagccctggcatcactaaagggagatatagtggaacttaataaacgtctccagcaaacagagagggaacgggaccttctggaaaagaaattggccaaggcacagtgcgagcagtcccacctcatgagagagcatgaggatgtccaggagcgaacgacacttcgctatgaggaacgcatcacagagctccacagcgtcattgcggagctcaacaagaagatagaccgtctgcaaggcaccaccatcagggaggaagatgagtactcagaactgcgatcagaactcagccagagccaacacgaggtcaacgaggactctcgaagcatggaccaagaccagacctctgtctctatccccgaaaaccagtctaccatggttactgctgacatggacaactgcagtgacctgaactcagaactgcagagggtgctgacagggctggagaatgttgtctgcggcaggaagaagagcagctgcagcctctccgtggccgaggtggacaagcacattgagcagctcaccacagccagcgagcactgtgacctggctattaagacagtcgaggagattgagggggtgcttggccgggacctgtatcccaacctggctgaagagaggtctcggtgggagaaggagctggctgggctgagggaagagaatgagagcctgactgccatgctgtgcagcaaagaggaagaactgaaccggactaaggccaccatgaatgccatccgggaagagcgggaccggctccggaggagggtcagagagcttcaaactcgactacagagcgtgcaggccacaggtccctccagccctggccgcctcacttccaccaaccgcccgattaaccccagcactggggagctgagcacaagcagcagcagcaatgacattcccatcgccaagattgctgagagggtgaagctatcaaagacaaggtccgaatcgtcatcatctgatcggccagtcctgggctcagaaatcagtagcataggggtatccagcagtgtggctgaacacctggcccactcacttcaggactgctccaatatccaagagattttccaaacactctactcacacggatctgccatctcagaaagcaagattagagagtttgaggtggaaacagaacggctgaatagccggattgagcacctcaaatcccaaaatgacctcctgaccataaccttggaggaatgtaaaagcaatgccgagaggatgagcatgctggtgggaaaatacgaatccaatgccacagcgctgaggctggccttgcagtacagcgagcagtgcatcgaagcctacgaactcctcctggcgctggcagagagtgagcagagcctcatcctggggcagttccgagcggcgggcgtggggtcctcccctggagaccagtcgggggatgaaaacatcactcagatgctcaagcgagctcatgactgccggaagacagctgagaacgctgccaaggccctgctcatgaagctggacggcagctgtgggggagcctttgccgtggccggctgcagcgtgcagccctgggagagcctttcctccaacagccacaccagcacaaccagctccacagccagtagttgcgacaccgagttcactaaagaagacgagcagaggctgaaggattatatccagcagctcaagaatgacagggctgcggtcaagctgaccatgctggagctggaaagcatccacatcgatcctctcagctatgacgtcaagcctcggggagacagccagaggctggatctggaaaacgcagtgcttatgcaggagctcatggccatgaaggaggagatggccgagttgaaggcccagctctacctactggagaaagagaagaaggccctggagctgaagctgagcacgcgggaggcccaggagcaggcctacctggtgcacattgagcacctgaagtccgaggtggaggagcagaaggagcagcggatgcgatccctcagctccaccagcagcggcagcaaagacaaacctggcaaggagtgtgctgatgctgcctccccagctctgtccctagccgaactcaggacaacgtgcagcgagaatgagctggctgcggagttcaccaacgccattcgtcgagaaaagaagttgaaggccagagttcaagagctggtgagtgccttggagagactcaccaagagcagtgaaatccgacatcagcaatctgcagagttcgtgaatgatctaaagcgggccaacagcaacctggtggctgcctatgagaaagcaaagaaaaagcatcaaaacaaactgaagaagttagagtcgcagatgatggccatggtggagagacatgagacccaagtgaggatgctcaagcaaagaatagctctgctagaggaggagaactccaggccacacaccaatgaaacttcgctttaatcagcactcacgcaccggagttctgcccatgggaagtaaactgcagcaggccactggggacagaagggcccatgtacttgttgggaggaggaggaaagggaaggctggcaggtaggtcggcacttggacaatggagtgccccaactcaacccttggggcgactggccatggtgacattgtggactgtatccagaggtgcccgctcttccctcctgggcccacaacagcgtgtaaacacatgttctgtgcctgctcagcagagcctcgtttctgctttcagcactcactctccccctcctcttctggtctggcggctgtgcatcagtgggatcccagacatttgtttctgtaagattttccattgtatcctctttttggtagatgctgggctcatcttctagaatctcgtttctcctctttcctcctgcttcatgggaaaacagacctgtgtgtgcctccagcatttaaaaggactgctgatttgtttactacagcaaggctttggtttccaagtcccgggtctcaactttaagatagaggcggccataagaggtgatctctgggagttataggtcatgggaagagcgtagacaggtgttacttacagtcccagatacactaaagttacaaacagaccaccaccaggactgtgcctgaacaattttgtattgagagaataaaaacttccttcaatcttcattttggaggcagggctgggaagggagcgctctcttgattctgggatttctccctctcagtggagccttattaatatccaagacttagagctgggaatctttttgatacctgtagtggaactaaaattctgtcaggggtttcttcaagagctgagaaacattattagcacttcccgccccagggcactacataattgctgttctgctgaatcaaatctcttccacatgggtgcatttgtagctctggacctgtctctacctaaggacaagacactgaggagatactgaacattttgcaaaacttatcacgcctacttaagagtgctgtgtaacccccagttcaagacttagctcctgttgtcatgacggggacagagtgagggaatggtagttaaggcttcttttttgcccccagatacatggtgatggttagcatatggtgcttaaaaggttaaatttcaagcaaaatgcttacagggctaggcagtaccaaagtaactgaattatttcaggaaggtcttcaatcttaaaacaaattcattattctttttcagttttacctcttctctctcagttctacactgatacacttgaaggaccatttactgtttttttctgtagcaccagagaatccatccaaagttccctatgaaaaatgtgttccattgccatagctgactacaaattaaagttgaggaggtttctgcatagagtctttatgtccataagctacgggtaggtctattttcagagcatgatacaaattccacagccttctgttcgctggaggatactccagccaccagttcggagggcagacagctgtatcctaaaagcaaccactgagaggccagcagtgaggctgcccatctccaaaacgaaacaacagatcaactggtatcagtctagaaggaccagctttggggtgctttgatcactatgaaaatgttcactggtttctgtcaatcatttggtcaaagttagttcctgtgattttttttttttttttttgagatggagttttgctcgtcaccaggctgaagtgcagtggcgtgatcttggctcactgcaacctctgcctcctgagtagctggaattacaggtgcccgccaccatacccagctagtttttttgtatttttagtagagacagggtttcaccatgttggccaggctggtctcgaactcctgaccactgatccacccacctcggcctcccaaagtgctgggattacaggcatgagccaatgtgcctggccattcctgtgattttttagaatttttcacttttcatataaagttgcattttatcatgaggaaaatgttttggctgaaaaacatatgccccaaaaaaaaaaaaatcagttttcactatttttccagcttgcctagggaaacgtcctcccctgagcaaagtgggatgtgcatggctcttttttgtgattaagcaggcatcaaatgggcagttttcattttcactgacacagaaacatgtggctgaagcaggaataaaatcctgcctactgacttctgtctccattcttgctccaggtaaaatcagagaacctccccttctctgagaattcccccaggcagaggcggctccagctcctgttaagggccccagttttactcatgctacctgaccttagttttagtactttcaaatgtgatttgggtaaaaactattttgcaggcaaaagtgttaattttttataaatatgtataataaaaaagctataaaagtttttccttttcttgtatttttcaaatactccccaagacacaatccttgaaggtgaactaggtggcacttgattatgctaattgtgggagctactgaactaaactatactgattaaattaaatgcttgcaggttcctgggtaattttcctttgtgaataacctggcgctacctgaatttttctctaacaaacatctccaatgagggtaaacaatgatcttgattctaatttatatgaggttaaaaaccttcagatttcgtattttgaattgttctccctagtttcctcagtggttacccccttttagtcagtaaccatctctgttcagaattcagtctttggcttttgaagaaatgggcacagagccaaaggacccatttcacagttcccttggaatatatttcccattgttggactgaggcaaacaaaaccaactgtgcaaatcacaagcaaaagagacttctgtccgtagttgcgagtgccatcagtgtgagcttaccagctacaaaaatctgtcatggactggggaacagtatgattccttattgaaactttcatcctcatcggctggcttgtcagcgttctgaagttaatatccatgctgcctgaaacaaatgttatgtttaactagcacttaacttttaaaattgcttaattctcctttcagatgcatgcactaagtcttctctgagcctgcagcaatattttagagggacctcttctaagtcagagccttgacattctactccaaaaggaagtccaaattagagcccataggctttttcttaaaagctgttaaggagtagtaaagaaagttaccactctaaggaaaacatgaaactatctgaaagtcttctggttcctaactggatacagattagattattttaaatgagaaaaaagtgcaccgtagttacccgatcaagattggactgcctgtgtccctggcatgaattaaagaacctccatagttgcttgttcccttctgaaggtgtttcctatggcccacgagaattataaagcaatcactttttaagtctatcagtcaaccttaatagctctcaagagtttcgattatcaagctttaaagtgataacatatcaagatgactattaaaaaataaacatctctgaaagtgtcctttcctccataaggctttaaacaatttgcaaattcttaattgggagtatgtcccaatcattctattaaactatttacagctctacctacttctagattcagcaaacagagctactagttagagtattttgagagccaaaatagtaagagacttctgtaatggttgagatttctgcactgaccttaattagggtaccgccatagggctaccaaagtttttagtgagggctggggaggtggagcataagtaacattttttttctgcagaaggtgatggctttgtagaacactataaaatttttcaggaaaacatacagcaaattttcttatccagtgggaacagcctatttgacaaggaatgatatacaagtttgattcacctttgagcactcttatagagtttacagaagaggcgtaactggttacaaaacaaaagttacgccttcactatccagttcttaaagtttatccacatcctacaaatcttatgttcatgtaggtcaggttaaagtaagctccaaacttgtggccttcagaagcatctcctgtttaacacacctgaaattactctaacttaatacatttgtattctctaagaaataatgctgactgctgtcaccacagcatcactgatctctcagtggctgttaaaatataaacaagtggaaaaaaagtatacaagttgatagcagctgttcatgtattcttgttttgctaatacctgtgtagagaaagacagtttcacatgcagatcaccatacatttttgcttaaaggttacactgggtaaactgtttgtttatcacattacatctgggtgagattttgcatgtgaccaagaggaagaaatcattcagtcccggaaatagcaactgctatgtaaaaccacatccttgactagtacttcatctttccacagtcatccatctgctaatcaggtgaaatatcagctcagcagaacaaagcaagttatacacaaatttcccccacattcacactgatgccgtacttagtaattctggttctaccattcccttttgcactttttgcaagtcaaattcatgtggaaaaatgttctgtttgtagaactcatagtattcacttatagtgctcatgtcaggaatggcaagtgagtaagagcccctgataatctgcttttgttagaacgtaatgcaaagataataaaacatgtccacttcttttctagttctaatcagtttttagacatcaagatttatttactttgcatgagatttgtttcctattatttgaatatgtgctatacacttgaattagaaaaacctgcttgaatgtattgtcagttattaaagcacatgtgactaagtttgcatttgtcagtattgttctactgtttgtactgaaagtctcattttaaaattgctacttaacactgtactataccttgtaattttttagattctccacttgtattctttaaatgtttccagatgcctttagttttagctgctgtaaaatagctactttgcgttatttgatatagaattgttttttaaaaactccatttatttatacagagacatttataatattttacaaacattcttatattctgaataaatatttctaattccacagtgta

SEQ ID NO: 127969 - DNA, 2490 bp, Artificial Sequence
  derived and/or modified sequence
atgaactcaggcgtggcgatgaaatatggcaacgactctagcgccgagctaagcgagttgcatagtgcagcactcgcatcacttaagggagacattgtggagttaaacaaaaggttacagcaaactgaaagggaacgagatctgctggagaaaaagctggcaaaggcccaatgcgaacaaagtcacctgatgagagaacacgaagatgtccaggagcggacaacactgagatatgaagaaagaatcactgaacttcactccgtcattgcagagctgaacaaaaagatagatcgactgcagggcactaccatccgtgaagaggacgaatattcagaactacgatctgagctgtcacagtcccagcatgaagtgaatgaagattccagaagcatggatcaagatcagactagcgtgtctattccggagaatcaatctaccatggtgactgcagatatggacaattgttctgatctgaacagtgaactgcagcgcgtactcaccggactagagaatgtggtgtgtgggaggaagaagtcctcttgttccttaagcgttgctgaggttgacaaacacatcgaacaattgactaccgccagcgagcactgcgatctcgctattaagaccgtagaggagattgaaggcgtattgggacgcgatttgtacccaaatctggcagaggagaggtcgaggtgggaaaaggagttggctgggttgagggaggagaacgaaagcctcaccgccatgctttgctcaaaggaggaggaactaaaccgtaccaaggccaccatgaatgctataagagaagagagagatcgtctccgacgacgcgtgcgagaactgcaaacccgtttacagagcgtacaggcgacaggaccctctagccctgggagacttacatccacaaaccgccctatcaacccgagtaccggggaattgtccactagttcaagctcaaacgacatccctatcgcgaaaatcgcggaacgcgtgaaactgtcgaagacccgctccgagtcttcctcctcagacaggcctgtgctgggcagcgaaatttcatccattggagtgtctagctcggtcgccgagcatcttgcacactccctgcaggactgttcgaacatccaggaaatctttcaaactctatatagccacggatctgctatatctgaatctaaaatacgagagtttgaagtggagactgaaaggctgaactcacgcatcgaacatttgaaatctcagaacgatctgctgaccattacactggaagaatgcaagtcaaacgctgaacgcatgagtatgttggtgggcaaatatgaatccaatgctacagctctgcggctggccttgcaatattcagaacagtgcattgaggcttatgagctcctgctagcactcgcagagtccgaacagtcccttatcctcgggcagtttcgtgccgctggggttggaagctcacctggtgaccaatcaggcgacgagaatatcacccaaatgctgaagagagcccacgactgccggaaaacagccgagaatgctgccaaagctcttctgatgaaactggacgggtcctgcggtggcgcatttgccgtggccggttgctccgtccagccttgggaaagtctgtccagcaactctcatacctcaacaacaagttccacagcctcgtcttgcgatactgaattcaccaaagaagacgagcagcgtcttaaagattatatccaacagctcaagaatgacagggccgctgtgaagctgacgatgctggagcttgaaagcattcacattgacccactatcctatgatgtgaaaccacgaggtgattctcagcgcttagaccttgaaaacgccgtgctgatgcaggagttaatggccatgaaagaagagatggctgaactaaaggctcagctgtacttgttggagaaggagaagaaggcactggaacttaaacttagtactcgcgaggcccaggagcaggcttacctcgtgcatattgaacacctgaagtctgaggtcgaggaacaaaaggaacagcggatgcgctcgctaagttcaacaagctccggaagtaaggacaagcccggtaaggaatgtgcagatgctgctagtcctgcactcagcttggccgagttacgcactacatgttccgagaatgagcttgcagctgagtttaccaatgcaatacgccgagagaagaaattgaaggcccgagtgcaagagctggtctccgccttagagcgattgactaaaagtagcgagatcagacaccagcagtccgccgaattcgtgaacgatcttaagcgcgcaaatagcaaccttgtggccgcttatgagaaagcaaaaaagaagcaccagaataagctcaagaagctggagagtcagatgatggcaatggttgagcgccacgagacccaggtgagaatgctgaagcaacgcatcgccctcctggaagaagagaattcaagaccccataccaatgagacatcactctag

SEQ ID NO: 127970 - protein, 808 aa, Artificial Sequence
  derived and/or modified sequence
MAGTVVLDDVELREAQRDYLDFLDDEEDQGIYQSKVRELISDNQYRLIVNVNDLRRKNEKRANRLLNNAFEELVAFQRALKDFVASIDATYAKQYEEFYVGLEGSFGSKHVSPRTLTSCFLSCVVCVEGIVTKCSLVRPKVVRSVHYCPATKKTIERRYSDLTTLVAFPSSSVYPTKDEENNPLETEYGLSVYKDHQTITIQEMPEKAPAGQLPRSVDVILDDDLVDKAKPGDRVQVVGTYRCLPGKKGGYTSGTFRTVLIACNVKQMSKDAQPSFSAEDIAKIKKFSKTRSKDIFDQLAKSLAPSIHGHDYVKKAILCLLLGGVERDLENGSHIRGDINILLIGDPSVAKSQLLRYVLCTAPRAIPTTGRGSSGVGLTAAVTTDQETGERRLEAGAMVLADRGVVCIDEFDKMSDMDRTAIHEVMEQGRVTIAKAGIHARLNARCSVLAAANPVYGRYDQYKTPMENIGLQDSLLSRFDLLFIMLDQMDPEQDREISDHVLRMHRYRAPGEQDGDAMPLGSAVDILATDDPNFSQEDQQDTQIYEKHDNLLHGTKKKKEKMVSAAFMKKYIHVAKIIKPVLTQESATYIAEEYSRLRSQDSMSSDTARTSPVTARTLETLIRLATAHAKARMSKTVDLQDAEEAVELVQYAYFKKVLEKEKKRKKRSEDESETEDEEEKSQEDQEQKRKRRKTRQPDAKDGDSYDPYDFSDTEEEMPQVHTPKTADSQETKESQKVELSESRLKAFKVALLDVFREAHAQSIGMNRLTESINRDSEEPFSSVEIQAALSKMQDDNQVMVSEGIIFLI

SEQ ID NO: 127971 - protein, 330 aa, Artificial Sequence
  derived and/or modified sequence
MHRYRAPGEQDGDAMPLGSAVDILATDDPNFSQEDQQDTQIYEKHDNLLHGTKKKKEKMVSAAFMKKYIHVAKIIKPVLTQESATYIAEEYSRLRSQDSMSSDTARTSPVTARTLETLIRLATAHAKARMSKTVDLQDAEEAVELVQYAYFKKVLEKEKKRKKRSEDESETEDEEEKSQEDQEQKRKRRKTRQPDAKDGDSYDPYDFSDTEEEMPQVHTPKTADSQETKESQKVELSESRDGISPCCPGWSWTPGLKQSFYLSLPKGWDYRHKPLCLFDLILFNDCRVSMVEGIQGGPLGCVPGSSCAVNRHESPHRIHQPGQRRALLFS

SEQ ID NO: 127972 - protein, 328 aa, Artificial Sequence
  derived and/or modified sequence
RYRAPGEQDGDAMPLGSAVDILATDDPNFSQEDQQDTQIYEKHDNLLHGTKKKKEKMVSAAFMKKYIHVAKIIKPVLTQESATYIAEEYSRLRSQDSMSSDTARTSPVTARTLETLIRLATAHAKARMSKTVDLQDAEEAVELVQYAYFKKVLEKEKKRKKRSEDESETEDEEEKSQEDQEQKRKRRKTRQPDAKDGDSYDPYDFSDTEEEMPQVHTPKTADSQETKESQKVELSESRDGISPCCPGWSWTPGLKQSFYLSLPKGWDYRHKPLCLFDLILFNDCRVSMVEGIQGGPLGCVPGSSCAVNRHESPHRIHQPGQRRALLFS

SEQ ID NO: 127973 - protein, 853 aa, Artificial Sequence
  derived and/or modified sequence
MLPRSPPLPRGNLWWREEFGSFRAGVESSWEPPRDFGGGSSLAAGMAGTVVLDDVELREAQRDYLDFLDDEEDQGIYQSKVRELISDNQYRLIVNVNDLRRKNEKRANRLLNNAFEELVAFQRALKDFVASIDATYAKQYEEFYVGLEGSFGSKHVSPRTLTSCFLSCVVCVEGIVTKCSLVRPKVVRSVHYCPATKKTIERRYSDLTTLVAFPSSSVYPTKDEENNPLETEYGLSVYKDHQTITIQEMPEKAPAGQLPRSVDVILDDDLVDKAKPGDRVQVVGTYRCLPGKKGGYTSGTFRTVLIACNVKQMSKDAQPSFSAEDIAKIKKFSKTRSKDIFDQLAKSLAPSIHGHDYVKKAILCLLLGGVERDLENGSHIRGDINILLIGDPSVAKSQLLRYVLCTAPRAIPTTGRGSSGVGLTAAVTTDQETGERRLEAGAMVLADRGVVCIDEFDKMSDMDRTAIHEVMEQGRVTIAKAGIHARLNARCSVLAAANPVYGRYDQYKTPMENIGLQDSLLSRFDLLFIMLDQMDPEQDREISDHVLRMHRYRAPGEQDGDAMPLGSAVDILATDDPNFSQEDQQDTQIYEKHDNLLHGTKKKKEKMVSAAFMKKYIHVAKIIKPVLTQESATYIAEEYSRLRSQDSMSSDTARTSPVTARTLETLIRLATAHAKARMSKTVDLQDAEEAVELVQYAYFKKVLEKEKKRKKRSEDESETEDEEEKSQEDQEQKRKRRKTRQPDAKDGDSYDPYDFSDTEEEMPQVHTPKTADSQETKESQKVELSESRLKAFKVALLDVFREAHAQSIGMNRLTESINRDSEEPFSSVEIQAALSKMQDDNQVMVSEGIIFLI

SEQ ID NO: 127974 - DNA, 2427 bp, Artificial Sequence
  derived and/or modified sequence
atggccggcaccgtggtgctggacgacgtggagctgagagaggcccagagagactacctggacttcctggacgacgaggaggaccagggcatctaccagagcaaggtgagagagctgatcagcgacaaccagtacagactgatcgtgaacgtgaacgacctgagaagaaagaacgagaagagagccaacagactgctgaacaacgccttcgaggagctggtggccttccagagagccctgaaggacttcgtggccagcatcgacgccacctacgccaagcagtacgaggagttctacgtgggcctggagggcagcttcggcagcaagcacgtgagccccagaaccctgaccagctgcttcctgagctgcgtggtgtgcgtggagggcatcgtgaccaagtgcagcctggtgagacccaaggtggtgagaagcgtgcactactgccccgccaccaagaagaccatcgagagaagatacagcgacctgaccaccctggtggccttccccagcagcagcgtgtaccccaccaaggacgaggagaacaaccccctggagaccgagtacggcctgagcgtgtacaaggaccaccagaccatcaccatccaggagatgcccgagaaggcccccgccggccagctgcccagaagcgtggacgtgatcctggacgacgacctggtggacaaggccaagcccggcgacagagtgcaggtggtgggcacctacagatgcctgcccggcaagaagggcggctacaccagcggcaccttcagaaccgtgctgatcgcctgcaacgtgaagcagatgagcaaggacgcccagcccagcttcagcgccgaggacatcgccaagatcaagaagttcagcaagaccagaagcaaggacatcttcgaccagctggccaagagcctggcccccagcatccacggccacgactacgtgaagaaggccatcctgtgcctgctgctgggcggcgtggagagagacctggagaacggcagccacatcagaggcgacatcaacatcctgctgatcggcgaccccagcgtggccaagagccagctgctgagatacgtgctgtgcaccgcccccagagccatccccaccaccggcagaggcagcagcggcgtgggcctgaccgccgccgtgaccaccgaccaggagaccggcgagagaagactggaggccggcgccatggtgctggccgacagaggcgtggtgtgcatcgacgagttcgacaagatgagcgacatggacagaaccgccatccacgaggtgatggagcagggcagagtgaccatcgccaaggccggcatccacgccagactgaacgccagatgcagcgtgctggccgccgccaaccccgtgtacggcagatacgaccagtacaagacccccatggagaacatcggcctgcaggacagcctgctgagcagattcgacctgctgttcatcatgctggaccagatggaccccgagcaggacagagagatcagcgaccacgtgctgagaatgcacagatacagagcccccggcgagcaggacggcgacgccatgcccctgggcagcgccgtggacatcctggccaccgacgaccccaacttcagccaggaggaccagcaggacacccagatctacgagaagcacgacaacctgctgcacggcaccaagaagaagaaggagaagatggtgagcgccgccttcatgaagaagtacatccacgtggccaagatcatcaagcccgtgctgacccaggagagcgccacctacatcgccgaggagtacagcagactgagaagccaggacagcatgagcagcgacaccgccagaaccagccccgtgaccgccagaaccctggagaccctgatcagactggccaccgcccacgccaaggccagaatgagcaagaccgtggacctgcaggacgccgaggaggccgtggagctggtgcagtacgcctacttcaagaaggtgctggagaaggagaagaagagaaagaagagaagcgaggacgagagcgagaccgaggacgaggaggagaagagccaggaggaccaggagcagaagagaaagagaagaaagaccagacagcccgacgccaaggacggcgacagctacgacccctacgacttcagcgacaccgaggaggagatgccccaggtgcacacccccaagaccgccgacagccaggagaccaaggagagccagaaggtggagctgagcgagagcagactgaaggccttcaaggtggccctgctggacgtgttcagagaggcccacgcccagagcatcggcatgaacagactgaccgagagcatcaacagagacagcgaggagcccttcagcagcgtggagatccaggccgccctgagcaagatgcaggacgacaaccaggtgatggtgagcgagggcatcatcttcctgatctag

SEQ ID NO: 127975 - DNA, 2427 bp, Artificial Sequence
  derived and/or modified sequence
atggcggggacggtcgttctggatgatgttgagctacgtgaagctcagagggattaccttgattttctggatgacgaggaagaccagggcatttaccagtccaaggtgcgagaactcattagtgacaaccagtatcggctgatcgtcaatgtgaatgatctgcgccggaagaatgaaaagcgagccaaccggctgttgaacaatgcgtttgaggagctggtcgcttttcagcgtgccctgaaggactttgttgcctcaattgacgcaacttacgccaaacagtatgaagagttctatgtaggactggaaggaagctttgggtccaagcatgtcagccctcgcactctgacttcttgcttcctcagttgcgttgtatgtgtggagggtatcgtcactaagtgtagcctggttaggcctaaagtggtgagatcagtccactattgccctgctaccaaaaagaccattgaaaggaggtatagcgacctgaccaccctcgtagcgttcccatcatcctctgtatatcccaccaaggatgaagagaataatccactcgagactgagtatgggctttctgtttataaggatcaccagaccattactatacaggaaatgcccgagaaggctcccgcaggccagctgccacgttccgttgacgtgatcttagacgacgacttagttgacaaagcaaaaccgggtgatagggttcaggtggtgggcacataccgatgccttcctgggaaaaagggcggatacaccagtggaacatttcgcacagtgttaatcgcctgcaatgtgaaacagatgtcgaaagatgcacaaccctcgttctccgcagaggacatcgccaagatcaaaaaattttccaagactagatccaaggatatctttgatcaattggcgaagagtctagctccctcaattcacggacacgactacgtgaagaaggctattttatgtctgttactggggggagtggagcgggacctggagaatggctcccacattcgaggtgacatcaatatccttcttataggtgatccttccgtggctaaatcccagcttttgcgttatgtcctctgcacagccccccgtgccataccgaccacagggcgtgggtcatcaggtgttggactcacggctgctgtcactacggatcaagagaccggggagaggcgcctggaggctggcgctatggtgctggctgacagaggggtcgtctgcatcgacgagtttgataaaatgagtgatatggataggaccgccatccatgaagtgatggaacagggacgagtgacaatcgcgaaggcaggcatccacgcacgcctaaatgctagatgctccgtgcttgctgccgcaaacccggtttatggacgatatgatcaatacaaaactcctatggagaacatcgggctgcaagattcgctgctgtcccggtttgacctgcttttcattatgctcgatcagatggatcccgagcaggatcgggaaatctccgatcatgtgcttcgcatgcatcgctaccgggcacccggagaacaagacggggacgctatgcccttagggagtgccgtcgacattcttgcaaccgacgaccccaacttcagtcaggaagaccagcaggacactcaaatctatgaaaagcacgataatctgctacatggtaccaagaaaaaaaaggaaaaaatggtctctgcagcctttatgaaaaaatatatccacgtggctaagataataaagcccgtgttgacccaggaatcggcgacatatattgctgaagagtacagtaggctgcgttcccaggacagcatgagctcggacactgcccggacttcccccgtcacggcacgcaccttggaaactcttatcagactcgccacagcgcacgcgaaagctcggatgtccaagactgtcgaccttcaggatgccgaagaagccgtcgagttggtacagtacgcctatttcaagaaagtactcgagaaagagaagaaaagaaaaaagcggagtgaggacgaatccgagaccgaggatgaggaggagaagagtcaagaagaccaggagcagaaacgtaaaaggcgaaaaaccagacagccagatgctaaggacggggattcatacgacccttatgacttcagcgatacagaagaggaaatgccccaggtgcacactcctaaaaccgcggactctcaggagaccaaagaatcccagaaagtcgagcttagcgagtctcgcctgaaggccttcaaggttgccctgctggacgtgtttagagaagcgcatgcacagtctatcggcatgaacagactcacagagagcataaatagagactcggaggagcccttctcgtccgtcgaaatccaagctgccttgtccaaaatgcaggacgataaccaggtaatggtatctgaaggcatcatctttctaatatag

SEQ ID NO: 127976 - DNA, 2427 bp, Artificial Sequence
  derived and/or modified sequence
atggccggcaccgtggtgctggatgatgtggagctgcgggaggcccagagggactacctggacttcctggatgatgaggaggaccagggcatctaccagagcaaggtgcgggagctgatcagtgacaaccagtaccgcctcatcgtgaatgtgaatgacctgcggaggaagaatgagaagagggccaaccggctgctgaacaatgcctttgaggagctggtggccttccagagggccctgaaggactttgtggccagcattgatgccacctacgccaagcagtatgaggagttctacgtgggcctggagggcagctttggcagcaagcacgtgagccccaggaccctgaccagctgcttcctgagctgtgtggtgtgtgtggagggcatcgtgaccaagtgcagcctggtgcggcccaaggtggtgcgctctgtgcactactgcccagccaccaagaagaccattgaaagacgctacagcgacctgaccaccctggtggccttccccagcagctctgtgtaccccaccaaggatgaggagaacaaccccctggagacagaatatggcctgtctgtgtacaaggaccaccagaccatcaccatccaggagatgcctgagaaggccccagctggccagctgcccaggtctgtggatgtgatcctggatgatgacctggtggacaaggccaagccaggggacagagtgcaggtggtgggcacctaccgctgcctgcccgggaagaagggcggctacaccagcggcaccttcagaacagtgctgattgcctgcaatgtgaagcagatgagcaaggatgcccagcccagcttcagcgcagaagatattgccaagatcaagaagttcagcaagaccaggagcaaggacatctttgaccagctggccaagagcctggcccccagcatccacggccatgactatgtgaagaaggccatcctgtgcctgctgctgggcggcgtggagcgggacctggagaatggcagccacatccggggggacatcaacatcctgctgattggagaccccagcgtggccaagagccagctgctgcgctacgtgctgtgcacagccccccgggccatccccaccaccggccggggcagcagcggcgtgggcctgacagctgctgtgaccacagaccaggagaccggggagcggcggctggaggccggggccatggtgctggccgaccggggcgtggtgtgcattgatgaatttgacaagatgtctgacatggacagaacagccatccacgaggtgatggagcagggccgggtgaccatcgccaaggccggcatccacgcccggctgaatgcccgctgcagcgtgctggccgccgccaaccctgtgtatggccgctatgaccagtacaagacccccatggagaacatcggcctgcaggacagcctgctgagcagatttgacctgctcttcatcatgctggaccagatggaccctgagcaggaccgggagatcagtgaccacgtgctgaggatgcaccgctaccgggcccctggagagcaggatggagatgccatgcccctgggcagcgctgtggacatcctggccacagatgaccccaacttcagccaggaggaccagcaggacacccagatctatgagaagcatgacaacctgctgcacggcaccaagaagaagaaggagaagatggtgtctgctgccttcatgaagaagtacatccacgtggccaagatcatcaagcctgtgctgacccaggagagcgccacctacatcgccgaggagtacagccggctgcggagccaggacagcatgagcagtgacacagcccggaccagccctgtgacagcccggaccctggagaccctcatccggctggccacagcccacgccaaggccaggatgagcaagacagtggacctgcaggatgctgaggaggccgtggagctggtgcagtatgcctacttcaagaaggtgctggagaaggagaagaagaggaagaagagaagtgaagatgagagcgagacagaagatgaggaggagaagagccaggaggaccaggagcagaagaggaagaggaggaagacccggcagccagatgccaaggatggagacagctatgacccctatgacttcagtgacacagaggaggagatgccccaggtgcacacccccaagacagctgacagccaggagaccaaggagagccagaaggtggagctgtctgagagccggctgaaggccttcaaggtggccctgctggatgtgttccgggaggcccacgcccagagcatcggcatgaaccggctgacagagagcatcaacagagacagcgaggagcccttcagctctgtggagatccaggccgccctgagcaagatgcaggatgacaaccaggtgatggtgtctgagggcatcatcttcctgatctag

SEQ ID NO: 127977 - DNA, 2427 bp, Artificial Sequence
  derived and/or modified sequence
atggccggcaccgtggtgctggacgacgtggagctgcgggaggcccagcgtgactatctggacttcctggatgatgaagaagatcagggaatttaccagagtaaagtgcgcgagctgatatcggacaaccagtaccgcctgatagtgaacgtgaatgatttgaggaggaagaacgaaaagagagccaataggctgctgaataacgcctttgaagagctggtcgcatttcagagagccttgaaagacttcgtggccagtattgacgccacctatgctaaacagtacgaggagttctacgtgggactggaaggatcttttgggtccaaacacgtgagccctcgtacccttactagttgctttttgagttgtgtggtctgcgttgagggaatcgtcaccaagtgttccctggttcggccaaaagtggtccggagcgtgcattactgcccagcaaccaagaaaaccatcgaaaggaggtacagcgacctgacaactctcgtggctttcccctccagcagtgtttacccgaccaaggatgaagagaacaaccctcttgagacagaatacggtctttccgtgtacaaagaccatcagacgatcacaatacaagaaatgcctgagaaagccccggcgggccagctgcctcgcagcgtagatgtcatcctggatgatgatctggtcgataaagcaaagcctggcgaccgggttcaagtggtgggaacatatcgatgtctgcccggaaagaagggaggatataccagcggaacctttagaactgtcctaatagcttgtaatgtcaagcagatgagcaaagatgctcagccgagctttagcgcagaagatatcgccaaaatcaaaaaattcagtaagactagaagcaaagacatcttcgatcagctggccaagtccttagctccatctatacacgggcatgattatgtgaagaaggcgatcttgtgtttgctgttgggaggagtcgagagggacctcgagaatgggagtcatataaggggagacatcaatatcctgcttataggggatccgagtgtagccaagagtcagctgctacgctatgttctatgtaccgccccccgagccatccctacgaccggacgagggtctagcggcgtgggtctgacagccgccgtgacaaccgaccaggaaactggtgagcgtcgcctggaggcgggcgccatggtgctagccgatcgcggcgtggtgtgtatagacgagtttgataagatgtccgacatggaccgcactgccattcacgaggtgatggagcagggccgggtgacgattgcaaaggcggggatacatgccagactaaacgcccgatgctcagtgctggccgccgccaatcccgtgtatggcagatacgaccagtataagacacctatggagaacatcggattgcaagattcactgctgtcacgcttcgacctcctgttcataatgcttgatcagatggatcctgaacaggaccgggagatcagcgaccacgtgctaaggatgcaccggtaccgtgctccgggagaacaggacggtgatgccatgccactgggcagcgccgtagatatactagccacagatgatccgaatttttcccaggaggaccagcaagatacgcagatttacgagaagcacgataacctactgcacggtactaagaaaaaaaaagagaagatggtgtccgctgccttcatgaaaaagtacattcacgtggcaaagattattaagcctgtgctcacacaagagtccgcaacttatatcgccgaggagtattcacgcctacgatctcaggactcaatgtccagcgacactgctcgaacctctccagtgaccgctcgcaccctggaaactctcatccggctggccaccgcacacgctaaagcaagaatgtccaagaccgtcgatctccaagacgctgaagaggccgtggagctggttcagtacgcatactttaaaaaggtccttgaaaaagagaagaagaggaagaagcggtcagaagacgagtcagagacggaagacgaggaagaaaagagccaggaggatcaggaacaaaaacggaagagaaggaaaaccaggcagcccgacgcaaaagacggcgatagctatgatccctacgatttcagtgacaccgaagaagagatgcctcaagtccacacacctaagaccgcggactctcaagaaacaaaagagtcccagaaggtggaactgtctgagtcccgactgaaagccttcaaagtagccctgctggacgtattccgcgaggcgcatgcacaaagcatcgggatgaatagactgacggaatcaattaatagggactcggaggaaccctttagttctgtcgaaattcaggccgccctctctaaaatgcaggacgataaccaggtgatggtttccgaaggtattatcttccttatttag

SEQ ID NO: 127978 - DNA, 2427 bp, Artificial Sequence
  derived and/or modified sequence
atggccggaaccgttgtgctggatgacgttgagctgcgtgaggctcagagggactacctggatttcctagacgacgaagaagatcagggcatctatcagtcaaaggtacgcgagctcataagtgacaaccagtaccgcctaatcgtgaacgttaacgacttgcgacgtaaaaacgaaaagcgtgccaatcgcctcttgaacaacgcctttgaagagctcgttgctttccagcgtgcactgaaggactttgtcgctagtatagatgcgacttacgctaaacagtatgaggagttttacgtaggcctggaggggtcttttggctctaagcacgttagcccaagaaccctgactagctgttttctgtcttgtgtggtgtgtgtagagggaatagtcactaaatgttcattggtccggcctaaagtggtgcgctccgtccactattgcccagcgacaaaaaaaacaattgagaggcgctacagtgatctcactacactggtggcatttccttcaagctctgtatatccaacgaaggacgaagaaaataacccactggagaccgagtacggcctgtcagtttacaaggaccaccaaacaatcacgatccaagaaatgcccgaaaaggcccctgcgggtcagctccccagatctgtggatgtcatcctggatgacgacctggttgacaaagctaaaccaggagacagggtccaggttgttgggacttaccgatgcctgcctggtaaaaaagggggttatacttccggcacgttccggacggtcctaattgcctgtaatgtgaagcaaatgtccaaggacgcacagccctctttcagtgccgaagatatcgctaaaattaagaaattctcaaaaaccagatcaaaggatatcttcgatcaactggccaaaagtctagccccatcgatacacggacacgactacgtgaagaaggcaatcctttgtctcctcttgggaggggtagaaagggatctcgaaaatggtagtcacatccgcggagacatcaacattcttctcattggcgacccttctgtggctaaatcccagttgcttaggtacgtgctgtgcaccgcccctagagcaatccctacaaccggtcgcggatcttcgggggtgggattgaccgcagccgtgaccaccgaccaggagacaggggagcgccgactggaagctggggcaatggtgttggccgaccggggtgtggtatgcatcgatgaatttgacaaaatgtccgatatggacagaacagcgatccatgaggtgatggagcaaggcagagtcaccattgctaaagcaggcatccacgctcgtctgaatgcgcgatgctcagtactcgccgctgccaatcctgtgtacgggaggtacgatcagtacaaaactcctatggaaaatatagggttacaggatagcctgttatctagattcgatcttctcttcattatgctagatcagatggatccagaacaggaccgggaaatttccgatcacgttcttagaatgcatagatatcgcgctcccggagagcaggacggggacgctatgccattgggtagtgccgtggacatcctagccaccgacgaccccaactttagccaagaggaccagcaggatactcagatatacgaaaagcatgacaatctactccatggaaccaagaagaagaaagagaaaatggtctccgctgcctttatgaaaaagtacatccacgtggcaaaaattatcaaacctgtactcacacaggagagcgccacatacattgccgaagaatactccagattgcgaagtcaggactcaatgagctccgatactgccagaactagtccagtaaccgcaagaactctggagaccttgattagattggcgacagcccacgctaaggccagaatgtctaagacagtggacttgcaggacgccgaagaagctgtagaattggttcagtacgcatattttaagaaagtcctggaaaaggagaaaaaacgaaagaagaggtccgaggatgaaagtgagaccgaggacgaggaggagaagagccaagaggatcaggagcagaagcgtaagaggcggaagacccgccaacccgatgccaaggacggtgacagttacgacccttacgatttcagtgatacggaagaagagatgccccaagtgcacacacctaagacagcagattcccaggaaacgaaggagtcacaaaaagttgagcttagtgagtctaggttaaaagctttcaaagtagctctgctggatgtcttcagggaagcacatgctcaaagcatcggtatgaaccgcctgacagagtccatcaacagggactccgaggaaccgttctctagcgtcgaaattcaggcagcattgagcaaaatgcaggacgataatcaggtcatggtgtccgagggaattatcttcttaatttag

SEQ ID NO: 127979 - DNA, 2562 bp, Artificial Sequence
  derived and/or modified sequence
atgctgcccagaagcccccccctgcccagaggcaacctgtggtggagagaggagttcggcagcttcagagccggcgtggagagcagctgggagccccccagagacttcggcggcggcagcagcctggccgccggcatggccggcaccgtggtgctggacgacgtggagctgagagaggcccagagagactacctggacttcctggacgacgaggaggaccagggcatctaccagagcaaggtgagagagctgatcagcgacaaccagtacagactgatcgtgaacgtgaacgacctgagaagaaagaacgagaagagagccaacagactgctgaacaacgccttcgaggagctggtggccttccagagagccctgaaggacttcgtggccagcatcgacgccacctacgccaagcagtacgaggagttctacgtgggcctggagggcagcttcggcagcaagcacgtgagccccagaaccctgaccagctgcttcctgagctgcgtggtgtgcgtggagggcatcgtgaccaagtgcagcctggtgagacccaaggtggtgagaagcgtgcactactgccccgccaccaagaagaccatcgagagaagatacagcgacctgaccaccctggtggccttccccagcagcagcgtgtaccccaccaaggacgaggagaacaaccccctggagaccgagtacggcctgagcgtgtacaaggaccaccagaccatcaccatccaggagatgcccgagaaggcccccgccggccagctgcccagaagcgtggacgtgatcctggacgacgacctggtggacaaggccaagcccggcgacagagtgcaggtggtgggcacctacagatgcctgcccggcaagaagggcggctacaccagcggcaccttcagaaccgtgctgatcgcctgcaacgtgaagcagatgagcaaggacgcccagcccagcttcagcgccgaggacatcgccaagatcaagaagttcagcaagaccagaagcaaggacatcttcgaccagctggccaagagcctggcccccagcatccacggccacgactacgtgaagaaggccatcctgtgcctgctgctgggcggcgtggagagagacctggagaacggcagccacatcagaggcgacatcaacatcctgctgatcggcgaccccagcgtggccaagagccagctgctgagatacgtgctgtgcaccgcccccagagccatccccaccaccggcagaggcagcagcggcgtgggcctgaccgccgccgtgaccaccgaccaggagaccggcgagagaagactggaggccggcgccatggtgctggccgacagaggcgtggtgtgcatcgacgagttcgacaagatgagcgacatggacagaaccgccatccacgaggtgatggagcagggcagagtgaccatcgccaaggccggcatccacgccagactgaacgccagatgcagcgtgctggccgccgccaaccccgtgtacggcagatacgaccagtacaagacccccatggagaacatcggcctgcaggacagcctgctgagcagattcgacctgctgttcatcatgctggaccagatggaccccgagcaggacagagagatcagcgaccacgtgctgagaatgcacagatacagagcccccggcgagcaggacggcgacgccatgcccctgggcagcgccgtggacatcctggccaccgacgaccccaacttcagccaggaggaccagcaggacacccagatctacgagaagcacgacaacctgctgcacggcaccaagaagaagaaggagaagatggtgagcgccgccttcatgaagaagtacatccacgtggccaagatcatcaagcccgtgctgacccaggagagcgccacctacatcgccgaggagtacagcagactgagaagccaggacagcatgagcagcgacaccgccagaaccagccccgtgaccgccagaaccctggagaccctgatcagactggccaccgcccacgccaaggccagaatgagcaagaccgtggacctgcaggacgccgaggaggccgtggagctggtgcagtacgcctacttcaagaaggtgctggagaaggagaagaagagaaagaagagaagcgaggacgagagcgagaccgaggacgaggaggagaagagccaggaggaccaggagcagaagagaaagagaagaaagaccagacagcccgacgccaaggacggcgacagctacgacccctacgacttcagcgacaccgaggaggagatgccccaggtgcacacccccaagaccgccgacagccaggagaccaaggagagccagaaggtggagctgagcgagagcagactgaaggccttcaaggtggccctgctggacgtgttcagagaggcccacgcccagagcatcggcatgaacagactgaccgagagcatcaacagagacagcgaggagcccttcagcagcgtggagatccaggccgccctgagcaagatgcaggacgacaaccaggtgatggtgagcgagggcatcatcttcctgatctag

SEQ ID NO: 127980 - DNA, 2562 bp, Artificial Sequence
  derived and/or modified sequence
atgctgccaagaagccctccgttgcccagaggtaatctgtggtggcgcgaagaattcggttcattcagggccggagtggaatcgtcatgggaaccacctcgggactttggagggggtagtagtttagctgctggaatggccggcaccgtagtgcttgacgatgtggaactgagagaagcgcagcgcgactacctggactttctcgatgacgaagaagatcagggtatttatcagtcaaaggttagagaactgatttcagataatcagtacaggctgattgtcaatgtcaatgacctccggaggaaaaatgagaaaagggcgaacaggctgctgaacaacgctttcgaggagcttgtcgccttccagcgtgctctaaaagattttgtggcttccattgatgcaacatatgcaaagcaatacgaggaattctatgtaggtcttgaaggctcctttggaagcaagcacgtgagcccccgcacccttacctcttgcttcctgtcctgcgtcgtgtgtgtggagggcatagtgaccaagtgctcgctcgttcgtcctaaggttgtgagatcagtgcactactgtccagccactaagaagactatcgagcggcggtactcagatctcaccactcttgttgcctttccttcctcttcagtataccccaccaaagacgaggagaacaatccactggaaacagaatacggtttgtccgtgtataaggaccatcagaccattacaatccaagagatgcccgagaaggccccggccgggcagctgcctcgctcagtggacgtcatcctggatgacgatctggtggacaaggcgaagccaggcgatcgcgtccaggttgtggggacgtatcgatgtttgccgggaaaaaaaggggggtatacaagtggcaccttccgaactgtcctgatagcatgcaacgtgaagcagatgagtaaagacgctcaaccgtccttttcagctgaagatatagccaagataaaaaagttttctaagacccgctctaaagacatcttcgaccagctggccaagagcttagcccctagcatccacggacacgattacgttaaaaaggcaatcctgtgtctgctgctgggcggggtggagagagacctcgaaaacgggtcacatatacgtggtgacataaacatattgttgataggcgacccctcagtcgccaaatctcagttattgcgctacgtcttatgcacagctccccgggctattcccactaccgggcgcgggagttcgggggtggggctcacagccgctgttacaaccgatcaggagaccggagaaagacgcctcgaagccggagctatggtcctggccgacaggggcgtggtgtgcatcgacgagtttgataaaatgagcgatatggatcgcaccgccatacatgaggtaatggagcagggacgcgtgaccatcgctaaagccggcatccacgcccgattgaacgcacgttgcagcgtattggctgctgccaaccctgtgtacggccgctacgatcagtacaaaacacccatggaaaatatcggtctgcaggacagccttctcagcagattcgatctccttttcattatgctggaccagatggaccccgagcaggaccgggaaatatctgatcacgttttaaggatgcatcgttaccgggccccaggtgaacaggatggagatgctatgcccctgggatctgctgttgacattttagctacagatgatccaaatttctctcaggaggatcaacaggacacgcagatctacgaaaagcacgacaacctgttacacggaacaaagaagaagaaagaaaagatggttagtgccgcatttatgaaaaagtatattcacgtagccaaaatcataaagcctgtactgactcaagagtccgcaacctacatcgccgaagaatattcacggctgcggagccaggacagcatgtcgtcggacactgctcgcactagtcccgtaacggctagaaccctcgaaaccctgataaggttggcaactgctcacgccaaggcacggatgtctaaaactgtggatctgcaagacgccgaagaagcagtcgagctagtccagtacgcttattttaaaaaagtcctggaaaaagagaaaaagagaaagaaacggtccgaagatgagtccgagacagaagacgaagaggagaaatcgcaggaggatcaggagcaaaaacgcaagagacggaagacgaggcagccagatgctaaggatggagattcttacgacccgtatgatttctctgacacggaagaggagatgcctcaggtgcacactcccaaaaccgccgattcccaagagaccaaggagtcccaaaaagtcgagctgagtgagtctaggcttaaagcgttcaaagtcgccttgcttgacgtgtttcgcgaggcccacgctcagtcaatcggcatgaatcgcctgacagaatctattaaccgagactcagaagagcccttctcaagcgtagagatccaggccgccctgtcaaaaatgcaggacgataaccaagtcatggtgagcgagggtataattttcctgatctag

SEQ ID NO: 127981 - DNA, 2562 bp, Artificial Sequence
  derived and/or modified sequence
atgctgcccaggagcccccccctgccccggggcaacctgtggtggagggaggagtttggcagcttccgggccggcgtggagagctcctgggagcccccccgggactttggaggcggcagcagcctggccgccggcatggccggcaccgtggtgctggatgatgtggagctgcgggaggcccagagggactacctggacttcctggatgatgaggaggaccagggcatctaccagagcaaggtgcgggagctgatcagtgacaaccagtaccgcctgattgtgaatgtgaatgacctgcggaggaagaatgagaagagggccaaccggctgctgaacaatgcctttgaggagctggtggccttccagagggccctgaaggactttgtggccagcattgatgccacctacgccaagcagtatgaggagttctacgtgggcctggagggcagctttggcagcaagcacgtgagccccaggaccctgaccagctgcttcctgagctgtgtggtgtgtgtggagggcatcgtgaccaagtgcagcctggtgcggcccaaggtggtgcgctctgtgcactactgcccagccaccaagaagaccatcgagcggcgctacagcgacctgaccaccctggtggccttccccagcagctctgtgtaccccaccaaggatgaggagaacaaccccctggagacagaatatggcctgtctgtgtacaaggaccaccagaccatcaccatccaggagatgcctgagaaggccccagctggccagctgcccaggtctgtggatgtgatcctggatgatgacctggtggacaaggccaagccaggggacagagtgcaggtggtgggcacctaccgctgcctgcccgggaagaagggcggctacaccagcggcaccttcagaacagtgctgattgcctgcaatgtgaagcagatgagcaaggatgcccagcccagcttctctgctgaggacatcgccaagatcaagaagttcagcaagaccaggagcaaggacatctttgaccagctggccaagagcctggcccccagcatccacggccatgactatgtgaagaaggccatcctgtgcctgctgctgggcggcgtggagcgggacctggagaatggcagccacatccggggggacatcaacatcctgctgattggagaccccagcgtggccaagagccagctgctgcgctacgtgctgtgcacagccccccgggccatccccaccaccggccggggcagcagtggagtgggcctgacagctgctgtgaccacagaccaggagactggagagcggcggctggaggccggggccatggtgctggccgacagaggagtggtgtgcattgatgaatttgacaagatgtctgacatggacagaacagccatccacgaggtgatggagcagggccgggtgaccatcgccaaggccggcatccacgcccggctgaatgcccgctgcagcgtgctggccgccgccaaccctgtgtatggccgctatgaccagtacaagacccccatggagaacatcggcctgcaggacagcctgctgagcagatttgacctgctcttcatcatgctggaccagatggaccctgagcaggaccgggagatcagtgaccacgtgctgaggatgcaccgctaccgggcccctggagagcaggatggagatgccatgcccctgggcagcgctgtggacatcctggccacagatgaccccaacttcagccaggaggaccagcaggacacccagatctatgagaagcatgacaacctgctgcacggcaccaagaagaagaaggagaagatggtgtctgctgccttcatgaagaagtacatccacgtggccaagatcatcaagcctgtgctgacccaggagagcgccacctacatcgccgaggagtacagccggctgcggagccaggacagcatgagcagtgacacagcccggaccagccctgtgacagcccggaccctggagaccctcatccggctggccacagcccacgccaaggccaggatgagcaagacagtggacctgcaggatgctgaggaggccgtggagctggtgcagtatgcctacttcaagaaggtgctggagaaggagaagaagaggaagaagagaagtgaagatgaaagtgaaacagaagatgaggaggagaagagccaggaggaccaggagcagaagaggaagaggaggaagacccggcagccagatgccaaggatggagacagctatgacccctatgacttcagtgacacagaggaggagatgccccaggtgcacacccccaagacagctgacagccaggagaccaaggagagccagaaggtggagctgtctgagagccggctgaaggccttcaaggtggccctgctggatgtgttccgggaggcccacgcccagagcatcggcatgaaccggctgacagagagcatcaacagagattctgaggagcccttcagctctgtggagatccaggccgccctgagcaagatgcaggatgacaaccaggtgatggtgtctgagggcatcatcttcctgatctag

SEQ ID NO: 127982 - DNA, 3116 bp, Artificial Sequence
  derived and/or modified sequence
ctcgaggtaacctttggtggcgggaagagttcggaagttttcgcgccggggtggagtcatcctgggaacctccacgcgactttggtggaggtagttctttggcagcgggcatggcgggtaccgtggtgctggacgatgtggagctgcgggaggctcagagagattacctggacttcctggacgacgaggaagaccagggaatttatcagagcaaagttcgggagctgatcagtgacaaccaataccggctgattgtcaatgtgaatgacctgcgcaggaaaaacgagaagagggctaaccggcttctgaacaatgcctttgaggagctggttgccttccagcgggccttaaaggattttgtggcctccattgatgctacctatgccaagcagtatgaggagttctacgtaggactggaaggcagctttggctccaagcacgtctccccgcggactcttacctcctgcttcctcagctgtgtggtctgtgtggagggcattgtcactaaatgttctctagttcgtcccaaagtcgtccgcagtgtccactactgtcctgctactaagaagaccatagagcgacgttattctgatctcaccaccctggtggcctttccctccagctctgtctatcctaccaaggatgaggagaacaatccccttgagacagaatatggcctttctgtctacaaggatcaccagaccatcaccatccaggagatgccggagaaggccccagccggccagctcccccgctctgtggacgtcattctggatgatgacttggtggataaagcgaagcctggtgaccgggttcaggtggtgggaacctaccgttgccttcctggaaagaagggaggctacacctctgggaccttcaggactgtcctgattgcctgtaatgttaagcagatgagcaaggatgctcagccctctttctctgctgaggatatagccaagatcaagaagttcagtaaaacccgatccaaggatatctttgaccagctggccaagtcattggccccaagtatccatgggcatgactatgtcaagaaagcaatcctctgcttgctcttgggaggggtggaacgagacctagaaaatggcagccacatccgtggggacatcaatattcttctaataggagacccatccgttgccaagtctcagcttctgcggtatgtgctttgcactgcaccccgagctatccccaccactggccggggctcctctggagtgggtctgacggctgctgtcaccacagaccaggaaacaggagagcgccgtctggaagcaggggccatggtcctggctgaccgaggcgtggtttgcattgatgaatttgacaaaatgtctgacatggatcgcacagccatccatgaagtgatggagcagggtcgagtgaccattgccaaggctggcatccatgctcggctgaatgcccgctgcagtgttttggcagctgccaaccctgtctacggcaggtatgaccagtataagactccaatggagaacattgggctacaggactcactgctgtcacgatttgacttgctcttcatcatgctggatcagatggatcctgagcaggatcgggagatctcagaccatgtccttcggatgcaccgttacagagcacctggggagcaggatggcgatgctatgcccttgggtagtgctgtggatatcctggccacagatgatcccaactttagccaggaagatcagcaggacacccagatttatgagaagcatgacaaccttctacatgggaccaagaagaaaaaggagaagatggtgagtgcagcattcatgaagaagtacatccatgtggccaaaatcatcaagcctgtcctgacacaggagtcggccacctacattgcagaagagtattcacgcctgcgcagccaggatagcatgagctcagacaccgccaggacatctccagttacagcccgaacactggaaactctgattcgactggccacagcccatgcgaaggcccgcatgagcaagactgtggacctgcaggatgcagaggaagctgtggagttggtccagtatgcttactttaagaaggttctggagaaggagaagaaacgtaagaagcgaagtgaggatgaatcagagacagaagatgaagaggagaaaagccaagaggaccaggagcagaagaggaagagaaggaagactcgccagccagatgccaaagatggggattcatacgacccctatgacttcagtgacacagaggaggaaatgcctcaagtacacactccaaagacggcagactcacaggagaccaaggaatcccagaaagtggagttgagtgaatccaggttgaaggcattcaaggtggccctcttggatgtgttccgggaagctcatgcgcagtcaatcggcatgaatcgcctcacagaatccatcaaccgggacagcgaagagcccttctcttcagttgagatccaggctgctctgagcaagatgcaggatgacaatcaggtcatggtgtctgagggcatcatcttcctcatctgaggaggcctcgtctctgaacttgggttgtgccgagagagtttgttctgtgtttcccaccctctccctgacccaagtctttgcctctactcccttaacagtgttgaattcaactgaaggcgaggaatgttggtgatgaagctgagttcaggactcggtggaccctttgggaatgggtcatgaaagctgccatggggtgaggaaagaggagacagtgggagaggacaatgactattgcatcttcattgcaaaagcactggctcatccgccctacttcccatcccacacaaacccaattgtaaataacatatgacttctgagtacttttgggggcacaactgttttctgtttgctgtttttttgttttgttttttttctccagagcactttggtctagactaggctttgggtggttccaattggtggagagaagctctgaggcacgtcatgcaggtcaagaaagctttctttgcagtagcaccagttaaggtgaatatgtattgtatcacaaaacaaacccaatatccagatgaatatccgagatgttgaataaacttagccatttcgtacacatggtcttaa

SEQ ID NO: 127983 - DNA, 3262 bp, Artificial Sequence
  derived and/or modified sequence
ctcgaggtaacctttggtggcgggaagagttcggaagttttcgcgccggggtggagtcatcctgggaacctccacgcgactttggtggaggtagttctttggcagcgggcatggcgggtaccgtggtgctggacgatgtggagctgcgggaggctcagagagattacctggacttcctggacgacgaggaagaccagggaatttatcagagcaaagttcgggagctgatcagtgacaaccaataccggctgattgtcaatgtgaatgacctgcgcaggaaaaacgagaagagggctaaccggcttctgaacaatgcctttgaggagctggttgccttccagcgggccttaaaggattttgtggcctccattgatgctacctatgccaagcagtatgaggagttctacgtaggactggaaggcagctttggctccaagcacgtctccccgcggactcttacctcctgcttcctcagctgtgtggtctgtgtggagggcattgtcactaaatgttctctagttcgtcccaaagtcgtccgcagtgtccactactgtcctgctactaagaagaccatagagcgacgttattctgatctcaccaccctggtggcctttccctccagctctgtctatcctaccaaggatgaggagaacaatccccttgagacagaatatggcctttctgtctacaaggatcaccagaccatcaccatccaggagatgccggagaaggccccagccggccagctcccccgctctgtggacgtcattctggatgatgacttggtggataaagcgaagcctggtgaccgggttcaggtggtgggaacctaccgttgccttcctggaaagaagggaggctacacctctgggaccttcaggactgtcctgattgcctgtaatgttaagcagatgagcaaggatgctcagccctctttctctgctgaggatatagccaagatcaagaagttcagtaaaacccgatccaaggatatctttgaccagctggccaagtcattggccccaagtatccatgggcatgactatgtcaagaaagcaatcctctgcttgctcttgggaggggtggaacgagacctagaaaatggcagccacatccgtggggacatcaatattcttctaataggagacccatccgttgccaagtctcagcttctgcggtatgtgctttgcactgcaccccgagctatccccaccactggccggggctcctctggagtgggtctgacggctgctgtcaccacagaccaggaaacaggagagcgccgtctggaagcaggggccatggtcctggctgaccgaggcgtggtttgcattgatgaatttgacaaaatgtctgacatggatcgcacagccatccatgaagtgatggagcagggtcgagtgaccattgccaaggctggcatccatgctcggctgaatgcccgctgcagtgttttggcagctgccaaccctgtctacggcaggtatgaccagtataagactccaatggagaacattgggctacaggactcactgctgtcacgatttgacttgctcttcatcatgctggatcagatggatcctgagcaggatcgggagatctcagaccatgtccttcggatgcaccgttacagagcacctggggagcaggatggcgatgctatgcccttgggtagtgctgtggatatcctggccacagatgatcccaactttagccaggaagatcagcaggacacccagatttatgagaagcatgacaaccttctacatgggaccaagaagaaaaaggagaagatggtgagtgcagcattcatgaagaagtacatccatgtggccaaaatcatcaagcctgtcctgacacaggagtcggccacctacattgcagaagagtattcacgcctgcgcagccaggatagcatgagctcagacaccgccaggacatctccagttacagcccgaacactggaaactctgattcgactggccacagcccatgcgaaggcccgcatgagcaagactgtggacctgcaggatgcagaggaagctgtggagttggtccagtatgcttactttaagaaggttctggagaaggagaagaaacgtaagaagcgaagtgaggatgaatcagagacagaagatgaagaggagaaaagccaagaggaccaggagcagaagaggaagagaaggaagactcgccagccagatgccaaagatggggattcatacgacccctatgacttcagtgacacagaggaggaaatgcctcaagtacacactccaaagacggcagactcacaggagaccaaggaatcccagaaagtggagttgagtgaatccagagacgggatctcaccatgttgcccaggctggtcttggactcctggcctcaagcagtccttctacctgagcctcccaaaaggctgggattacaggcataagccactgtgcttgtttgatctcattctttttaatgactgcagggtttccatggttgaaggcattcaaggtggccctcttggatgtgttccgggaagctcatgcgcagtcaatcggcatgaatcgcctcacagaatccatcaaccgggacagcgaagagcccttctcttcagttgagatccaggctgctctgagcaagatgcaggatgacaatcaggtcatggtgtctgagggcatcatcttcctcatctgaggaggcctcgtctctgaacttgggttgtgccgagagagtttgttctgtgtttcccaccctctccctgacccaagtctttgcctctactcccttaacagtgttgaattcaactgaaggcgaggaatgttggtgatgaagctgagttcaggactcggtggaccctttgggaatgggtcatgaaagctgccatggggtgaggaaagaggagacagtgggagaggacaatgactattgcatcttcattgcaaaagcactggctcatccgccctacttcccatcccacacaaacccaattgtaaataacatatgacttctgagtacttttgggggcacaactgttttctgtttgctgtttttttgttttgttttttttctccagagcactttggtctagactaggctttgggtggttccaattggtggagagaagctctgaggcacgtcatgcaggtcaagaaagctttctttgcagtagcaccagttaaggtgaatatgtattgtatcacaaaacaaacccaatatccagatgaatatccgagatgttgaataaacttagccatttcgtacacatggt

SEQ ID NO: 127984 - DNA, 3169 bp, Artificial Sequence
  derived and/or modified sequence
agagaactcagccaatcataatgcttatatgctcccaaggtccccgcctcttcctcgaggtaacctttggtggcgggaagagttcggaagttttcgcgccggggtggagtcatcctgggaacctccacgcgactttggtggaggtagttctttggcagcgggcatggcgggtaccgtggtgctggacgatgtggagctgcgggaggctcagagagattacctggacttcctggacgacgaggaagaccagggaatttatcagagcaaagttcgggagctgatcagtgacaaccaataccggctgattgtcaatgtgaatgacctgcgcaggaaaaacgagaagagggctaaccggcttctgaacaatgcctttgaggagctggttgccttccagcgggccttaaaggattttgtggcctccattgatgctacctatgccaagcagtatgaggagttctacgtaggactggaaggcagctttggctccaagcacgtctccccgcggactcttacctcctgcttcctcagctgtgtggtctgtgtggagggcattgtcactaaatgttctctagttcgtcccaaagtcgtccgcagtgtccactactgtcctgctactaagaagaccatagagcgacgttattctgatctcaccaccctggtggcctttccctccagctctgtctatcctaccaaggatgaggagaacaatccccttgagacagaatatggcctttctgtctacaaggatcaccagaccatcaccatccaggagatgccggagaaggccccagccggccagctcccccgctctgtggacgtcattctggatgatgacttggtggataaagcgaagcctggtgaccgggttcaggtggtgggaacctaccgttgccttcctggaaagaagggaggctacacctctgggaccttcaggactgtcctgattgcctgtaatgttaagcagatgagcaaggatgctcagccctctttctctgctgaggatatagccaagatcaagaagttcagtaaaacccgatccaaggatatctttgaccagctggccaagtcattggccccaagtatccatgggcatgactatgtcaagaaagcaatcctctgcttgctcttgggaggggtggaacgagacctagaaaatggcagccacatccgtggggacatcaatattcttctaataggagacccatccgttgccaagtctcagcttctgcggtatgtgctttgcactgcaccccgagctatccccaccactggccggggctcctctggagtgggtctgacggctgctgtcaccacagaccaggaaacaggagagcgccgtctggaagcaggggccatggtcctggctgaccgaggcgtggtttgcattgatgaatttgacaaaatgtctgacatggatcgcacagccatccatgaagtgatggagcagggtcgagtgaccattgccaaggctggcatccatgctcggctgaatgcccgctgcagtgttttggcagctgccaaccctgtctacggcaggtatgaccagtataagactccaatggagaacattgggctacaggactcactgctgtcacgatttgacttgctcttcatcatgctggatcagatggatcctgagcaggatcgggagatctcagaccatgtccttcggatgcaccgttacagagcacctggggagcaggatggcgatgctatgcccttgggtagtgctgtggatatcctggccacagatgatcccaactttagccaggaagatcagcaggacacccagatttatgagaagcatgacaaccttctacatgggaccaagaagaaaaaggagaagatggtgagtgcagcattcatgaagaagtacatccatgtggccaaaatcatcaagcctgtcctgacacaggagtcggccacctacattgcagaagagtattcacgcctgcgcagccaggatagcatgagctcagacaccgccaggacatctccagttacagcccgaacactggaaactctgattcgactggccacagcccatgcgaaggcccgcatgagcaagactgtggacctgcaggatgcagaggaagctgtggagttggtccagtatgcttactttaagaaggttctggagaaggagaagaaacgtaagaagcgaagtgaggatgaatcagagacagaagatgaagaggagaaaagccaagaggaccaggagcagaagaggaagagaaggaagactcgccagccagatgccaaagatggggattcatacgacccctatgacttcagtgacacagaggaggaaatgcctcaagtacacactccaaagacggcagactcacaggagaccaaggaatcccagaaagtggagttgagtgaatccaggttgaaggcattcaaggtggccctcttggatgtgttccgggaagctcatgcgcagtcaatcggcatgaatcgcctcacagaatccatcaaccgggacagcgaagagcccttctcttcagttgagatccaggctgctctgagcaagatgcaggatgacaatcaggtcatggtgtctgagggcatcatcttcctcatctgaggaggcctcgtctctgaacttgggttgtgccgagagagtttgttctgtgtttcccaccctctccctgacccaagtctttgcctctactcccttaacagtgttgaattcaactgaaggcgaggaatgttggtgatgaagctgagttcaggactcggtggaccctttgggaatgggtcatgaaagctgccatggggtgaggaaagaggagacagtgggagaggacaatgactattgcatcttcattgcaaaagcactggctcatccgccctacttcccatcccacacaaacccaattgtaaataacatatgacttctgagtacttttgggggcacaactgttttctgtttgctgtttttttgttttgttttttttctccagagcactttggtctagactaggctttgggtggttccaattggtggagagaagctctgaggcacgtcatgcaggtcaagaaagctttctttgcagtagcaccagttaaggtgaatatgtattgtatcacaaaacaaacccaatatccagatgaatatccgagatgttgaataaacttagccatttcgtacacatggtcttaa

SEQ ID NO: 127985 - DNA, 2562 bp, Artificial Sequence
  derived and/or modified sequence
atgctgccccggagcccccccctgccccggggcaacctgtggtggagggaggagtttggaagtttcagagctggcgtcgagtcaagttgggagcctcccagagacttcggcggagggagcagcctggctgcggggatggccggaactgtggttttggacgacgttgagttaagagaggcacagagagactatctggatttccttgatgacgaagaagatcaggggatctaccagtccaaagtaagggagttgatttcagataaccagtacaggctcatcgttaacgttaacgacttaagacgcaagaacgaaaagagggcaaacaggctcctaaacaacgccttcgaagagctggtggcttttcaaagagccctgaaagacttcgttgcttccatcgacgcaacatatgcaaagcagtatgaggaattctacgtgggcttggaagggagttttgggtctaaacatgtgtctcccagaactctgacctcgtgcttcttgtcctgtgtggtctgcgtggaggggatcgtcacaaagtgttcccttgtccgtcctaaggtagttcgctctgttcactattgccccgctacaaagaagactattgaaaggcgttattccgatctgacaacccttgtggcatttcccagttcctccgtgtaccctacgaaggacgaagagaacaatccgctcgagacagagtatggattaagcgtgtacaaggaccaccaaactatcacaattcaggagatgcccgagaaagcaccagccgggcagctcccgaggagtgtcgacgtcatcctcgacgacgatcttgtcgataaggcaaaacccggggatagggttcaggtagtgggaacttataggtgtttgcccggtaagaagggaggctacacctccggcacattcaggacggtgttgatagcatgcaacgtcaagcagatgagtaaggacgcccaaccctcctttagcgcggaggatatcgccaaaattaaaaagttctctaaaacacgttctaaggatatctttgaccaactggctaaatccctggctcctagcatacatggacacgactacgtgaagaaagccattctttgcctgctcctgggcggcgtggaacgcgatctggagaatggctcccatatacgtggtgacattaacatcctgctgattggtgatcccagtgtggctaaatctcaacttctgcgctatgtgctgtgcactgccccaagagctatacctaccacaggacgcggtagtagcggggtgggcttaacagctgccgtgactacggatcaggaaaccggtgagagacgcctcgaagccggagcaatggtgttggctgatagaggagtggtttgtatcgatgagtttgataagatgagcgacatggaccggaccgccatacacgaggtgatggagcagggaagagttacaatagccaaagcaggcatccatgcgcgcttaaacgctagatgcagtgtgctggcggccgcaaatcctgtgtatggccgatacgaccagtacaagaccccaatggaaaatatcggcctccaagattcactcctaagtcgttttgatctgctgttcataatgctggaccaaatggatcccgagcaggatcgtgaaatatcggaccatgtgctaaggatgcaccggtacagggcgccaggggaacaggatggggacgcaatgcctcttggatcagccgtggacattctagctaccgatgaccccaacttttctcaagaggaccagcaggacactcagatctacgagaaacacgataacctcctgcacggcacaaagaagaaaaaagagaagatggtgtcggccgcgttcatgaagaagtatattcatgtggctaaaataataaagccggtgttaacacaggaaagcgccacgtacattgcggaggagtactccaggctccggtcccaggattcaatgagtagtgatactgccaggactagtcccgtcactgcacgcaccctggaaactcttatccggctggccactgcacacgcaaaggccaggatgtcaaaaactgtggatctgcaggatgctgaggaggctgtcgagctggtgcagtatgcatacttcaaaaaagttctggagaaagagaagaagcgaaaaaaacgaagcgaggatgaaagcgagaccgaggatgaagaagagaaatctcaggaggaccaagaacaaaaacgaaagcgacgcaagacccggcaaccagatgccaaagatggtgacagctacgacccttatgatttctccgacacagaagaggagatgcctcaggtgcacacacctaaaaccgcagattcccaggagaccaaggagagtcagaaggtggagctgagcgagagccgactgaaagctttcaaagtggccctcctggacgttttccgtgaggctcatgcccagtcaataggcatgaatcgcctcacagaaagtattaatcgcgactctgaggagccattcagcagcgttgaaattcaagctgccctatctaaaatgcaggatgataaccaggtgatggtatcagagggcattatatttctgatttag

SEQ ID NO: 127986 - DNA, 2562 bp, Artificial Sequence
  derived and/or modified sequence
atgctgcccagatcacctcctttgcctcgcggaaatctctggtggcgcgaagaatttgggtcattcagagcaggcgttgagtcaagctgggagcctcctagagacttcggtgggggatcttcactcgcagctggcatggcagggacagtggtacttgatgacgttgagctccgggaagcccaaagagactacctggacttcctggatgacgaggaggaccaagggatttatcagtccaaagtgcgggagctaataagcgacaatcagtaccgcctcatcgtgaacgtcaatgacctgcgacgtaaaaacgagaagcgggctaaccggctgctgaacaacgccttcgaagagctagtcgcctttcagcgggcactgaaggacttcgtggcctccatcgacgccacatacgccaagcagtacgaagagttttatgtcggactggaaggttctttcggatccaaacacgttagtccgcgtactctcacgtcatgtttcttgagctgcgtagtgtgcgtcgaaggcattgtcaccaagtgctccctcgtgaggcccaaagtcgtgcgctccgtacattattgtcccgctaccaagaaaaccatcgaacgtcgctatagcgatttgacaacactggttgcattcccctcgagctccgtttatcccaccaaggacgaggagaataatcctctcgagacggaatacgggttgagcgtttacaaagaccatcagacaataactattcaggagatgcctgaaaaagccccagccggacagttgccacgatccgtcgacgtaatattggatgacgacctggtcgataaggccaaacccggtgatcgcgtgcaggtggtaggtacataccgatgcctccccggtaagaagggaggatacacatctggtacattccgcactgtccttatcgcctgtaacgtgaagcagatgtctaaagatgcccagcccagcttctcagccgaggatatcgccaagatcaaaaagttcagtaaaacgaggagcaaagacattttcgaccaacttgcaaaatcactggcccctagcatccacgggcatgactacgtcaaaaaagctatcttgtgtttactgctgggcggagtcgaaagagacctggaaaacgggtcccacattcgcggagatatcaacattctgttgatcggcgacccttctgtggccaagagccaattgctgaggtatgtgctttgtacagctcctcgggcaatacccaccacagggaggggaagctctggcgtgggtcttacggccgctgtaacaaccgaccaggagactggtgaaaggcgcttggaggccggtgcaatggtgcttgcagaccggggtgttgtgtgtattgatgaatttgacaaaatgagtgacatggacaggaccgcgatacatgaagtaatggaacaaggcagagtgaccattgccaaagctggtatccatgcaaggcttaatgcgcgatgttcagttctcgcggctgccaacccagtgtatggacggtacgatcagtataagaccccgatggaaaacattgggctccaagactccctcctgtcacgattcgatctgctttttattatgctcgaccagatggatcccgaacaggacagagaaatctctgatcacgtacttcgaatgcatcggtaccgcgcacccggtgagcaggatggtgatgctatgccgcttggatccgccgtggatattctcgccacagatgatccgaatttctctcaggaggatcagcaggatactcagatctatgagaagcacgacaatttactccatgggacaaagaagaaaaaggagaagatggtgtctgctgcatttatgaagaaatatattcatgttgcaaaaattatcaagcctgtacttacacaggagagtgccacctacattgctgaggagtatagtaggttgcggtctcaagactcgatgtcctcggataccgcgagaacttcgccagtcaccgccaggacattagagacgcttatacgactggctactgctcacgcgaaggctagaatgagcaaaaccgtggacctccaggatgcagaggaggcagtcgaactggtgcaatatgcctactttaaaaaggtgcttgagaaagaaaaaaaaagaaaaaagagatccgaggacgagtcggagaccgaagacgaggaagagaagagccaggaggatcaggagcagaagaggaagaggagaaagacccggcaaccagacgctaaagatggagactcctacgacccttacgacttttccgacactgaagaggagatgccacaagtgcacaccccgaaaacagccgacagccaggagacgaaagaaagccagaaagttgagctctctgaaagcagactgaaggccttcaaagtggctctgttggatgtcttcagagaggcgcatgcgcaaagtatcggcatgaatcggctcacagaaagcattaacagagatagcgaagaacccttcagttctgtggaaatccaggcagctctgtccaagatgcaagatgataaccaggtaatggtgtccgaaggaattatttttctgatctag

SEQ ID NO: 127987 - protein, 392 aa, Artificial Sequence [sequence omitted]

SEQ ID NO: 127988 - DNA, 1179 bp, Artificial Sequence
  derived and/or modified sequence
atggagccgcccggacggcgagaatgcccctttcccagctggcggttccctggtttactgctggccgctatggtactcttgctatacagtttcagcgacgcatgtgaggagcccccaactttcgaggccatggaacttatcggcaagccaaagccctactatgagataggggagcgggtagactacaagtgcaaaaagggctacttttatattcccccattagccacgcatacaatctgcgatcgtaaccacacttggttacccgtgagtgacgatgcctgttaccgtgaaacatgcccctacattagagaccccctgaacgggcaagccgttcccgccaacggcacatacgaattcgggtaccagatgcacttcatctgcaatgaaggttattacttgataggcgaggaaatcctgtattgtgagctcaaaggctcggttgccatttggtctgggaagcccccaatctgtgagaaagtgctgtgtacccctccccccaagattaagaatggcaaacacacctttagcgaggtggaagttttcgaatacctggacgccgttacatactcctgtgatcctgccccaggaccagaccccttttctctgattggagaaagcaccatctattgcggcgataatagcgtgtggtcaagagccgctcccgaatgtaaagtggtaaaatgtcgctttccagtggtcgaaaacggaaaacaaatatcgggctttggcaaaaagttctactataaagctaccgtgatgttcgagtgtgacaaaggtttttatctcgatgggtctgacacaatcgtctgtgatagcaactccacttgggatccaccagtgcccaagtgcctgaaggttctgcccccgtcatcaacaaaaccccctgctctatctcatagcgtcagcacctctagcaccactaaatctccggctagctcggcatcagggccgaggccaacatacaagcccccagtgtcaaactaccccggatatcctaaacccgaagaaggtatactggacagcctggatgtgtgggtgatcgctgttattgtgatcgctatcgtagtgggggtagcagtgatctgtgtggtcccctataggtatctacagcgccgtaaaaaaaaggggacctatctcacagatgagactcatcgcgaggtcaagttcacaagcctgtag

SEQ ID NO: 127989 - DNA, 1179 bp, Artificial Sequence
  derived and/or modified sequence
atggagcccccaggccggcgggagtgccccttccccagctggaggtttcctggcctgctgctggccgccatggtgctgctgctgtacagcttcagtgatgcctgtgaggagccccccacctttgaggccatggagctgattggcaagcccaagccctactatgagatcggggagcgggtggactacaagtgcaagaagggctacttctacatcccccccctggccacccacaccatctgtgacaggaaccacacctggctgcctgtgtctgatgatgcctgctaccgggagacctgcccctacatccgggaccccctgaatggccaggccgtgcctgccaacggcacctatgaatttggctaccagatgcacttcatctgcaatgaaggctactacctgattggagaggagatcctgtactgtgagctgaagggctctgtggccatctggagcggcaagccacccatctgtgagaaggtgctgtgcaccccaccacccaagatcaagaatggcaagcacaccttcagcgaggtggaggtgtttgagtacctggatgctgtgacctacagctgtgaccctgcccctggccctgaccccttcagcctgattggagagagcaccatctactgtggggacaacagcgtgtggagcagagctgcccctgagtgcaaggtggtgaagtgccgcttccctgtggtggagaatggcaagcagatcagcggctttgggaagaagttctactacaaggccaccgtgatgtttgaatgtgacaagggcttctacctggatggcagtgacaccatcgtgtgtgacagcaacagcacctgggacccccctgtgcccaagtgcctgaaggtgctgccccccagcagcaccaagcccccagccctgagccacagcgtgtccaccagcagcaccaccaagagccctgccagcagcgccagcggcccccggcccacctacaagccccctgtgagcaactacccaggctaccccaagccagaggagggcatcctggacagcctggatgtgtgggtgattgctgtgattgtcatcgccatcgtggtgggcgtggccgtcatctgtgtggtgccctaccgctacctgcagaggaggaagaagaagggcacctacctgacagatgagacccaccgggaggtgaagttcaccagcctgtag

SEQ ID NO: 127990 - DNA, 1179 bp, Artificial Sequence
  derived and/or modified sequence
atggagccccccggccggcgggagtgccccttccccagctggcggtttcccggactgctgctggcagcaatggtgttactcttgtacagcttttcagatgcgtgtgaagagccccccacctttgaggccatggaactaattgggaaacctaagccatactatgagattggcgaacgcgtggactataaatgcaaaaaaggctatttctacatcccgccgttagccacccacacgatctgcgatcgtaatcacacttggttaccagtctctgatgacgcctgctaccgcgaaacttgcccatacatcagagaccccttgaacgggcaggcggtccccgccaacgggacctacgagtttggctatcaaatgcacttcatatgtaatgagggatactatttaattggggaggagatcctgtactgcgaattgaaggggagcgtcgcgatctggagcggcaaaccgccaatctgtgagaaagttctctgtacccccccgcccaaaataaagaatggcaaacacaccttttcagaggtcgaggtgttcgaatacctcgacgctgtgacctatagctgcgaccccgcccctggccctgatcctttttcactcattggagagtccaccatctattgcggagataactcggtgtggtctagagccgctccggaatgcaaggtcgtcaagtgcagattcccagtggttgagaacggcaagcagatctccgggttcggtaagaagttttactacaaggcaactgtcatgttcgagtgcgataagggcttctaccttgatggatccgatactatagtttgcgattcaaacagcacctgggaccctccagtgccaaagtgtcttaaagtgctccctccctcaagcaccaagcccccagccctctcccacagtgtgtccacctcctcaactacgaagagtccagcatccagcgcctctggccctcgtccaacgtataagcctccagttagcaactaccccggttatcccaagcctgaggagggaatcctcgacagcttagacgtttgggtaattgccgtgatagtcatcgcaattgttgttggagtggccgttatttgcgttgttccttatcggtatctccagcgcaggaaaaagaaggggacatacctgactgacgagacccatcgagaggtcaaattcacaagcctctag

SEQ ID NO: 127991 - DNA, 1179 bp, Artificial Sequence
  derived and/or modified sequence
atggagcctcctggcagaagagaatgccccttccctagctggagatttcccggactgctgcttgctgcgatggtgttgcttctgtacagcttttccgacgcttgcgaagagccccctacattcgaggcaatggaactgatcggcaagccaaaaccctactacgagattggagaacgggtagactacaaatgtaaaaaggggtacttttacataccaccacttgccacacacacaatttgcgatagaaaccacacttggctgcccgtctccgacgacgcttgctaccgcgaaacctgtccatacattcgggaccctcttaatggacaagctgtgcccgctaatggaacatacgaatttggctaccagatgcacttcatctgcaacgaaggctattacctcataggcgaagagatactctactgtgagctgaaggggtctgtcgctatctggtccggtaaacctcccatttgcgaaaaagtgctgtgcactcctccacccaaaattaagaacggaaagcatacattttccgaggtcgaagtctttgaatacttggacgccgtcacgtattcctgcgaccctgctcctgggcctgacccttttagcttaattggtgaatcgaccatttactgcggtgataactccgtttggtcacgggctgcgcctgagtgcaaggtcgtgaaatgccgtttccctgtagtcgaaaatggcaaacagatatccgggtttggcaagaaattctattataaggccactgtgatgttcgagtgtgataaaggcttttacctggacggatctgataccatcgtctgcgatagcaactctacctgggatccgccagtgccaaaatgccttaaggtgttgcctccctcctccaccaaaccacccgctctctcgcactccgtctctacgtcttcaaccacaaagagccccgcttcctccgctagcggcccaagacctacatataagcctcccgtgtctaactatccgggatacccgaagcctgaggaaggaattctggatagcctggatgtttgggtgatcgccgtcatcgtgattgccatagtggtcggggttgctgtcatttgtgtggttccgtaccggtaccttcagcgacggaaaaaaaaagggacctatctgaccgatgagacacatcgagaggtgaagtttacttctctgtag

SEQ ID NO: 127992 - DNA, 3371 bp, Artificial Sequence
  derived and/or modified sequence
gctcgggccacgcccacctgtcctgcagcactggatgctttgtgagttggggattgttgcgtcccatatctggacccagaagggacttccctgctcggctggctctcggtttctctgctttcctccggagaaataacagcgtcttccgcgccgcgcatggagcctcccggccgccgcgagtgtccctttccttcctggcgctttcctgggttgcttctggcggccatggtgttgctgctgtactccttctccgatgcctgtgaggagccaccaacatttgaagctatggagctcattggtaaaccaaaaccctactatgagattggtgaacgagtagattataagtgtaaaaaaggatacttctatatacctcctcttgccacccatactatttgtgatcggaatcatacatggctacctgtctcagatgacgcctgttatagagaaacatgtccatatatacgggatcctttaaatggccaagcagtccctgcaaatgggacttacgagtttggttatcagatgcactttatttgtaatgagggttattacttaattggtgaagaaattctatattgtgaacttaaaggatcagtagcaatttggagcggtaagcccccaatatgtgaaaaggttttgtgtacaccacctccaaaaataaaaaatggaaaacacacctttagtgaagtagaagtatttgagtatcttgatgcagtaacttatagttgtgatcctgcacctggaccagatccattttcacttattggagagagcacgatttattgtggtgacaattcagtgtggagtcgtgctgctccagagtgtaaagtggtcaaatgtcgatttccagtagtcgaaaatggaaaacagatatcaggatttggaaaaaaattttactacaaagcaacagttatgtttgaatgcgataagggtttttacctcgatggcagcgacacaattgtctgtgacagtaacagtacttgggatcccccagttccaaagtgtcttaaagtgctgcctccatctagtacaaaacctccagctttgagtcattcagtgtcgacttcttccactacaaaatctccagcgtccagtgcctcaggtcctaggcctacttacaagcctccagtctcaaattatccaggatatcctaaacctgaggaaggaatacttgacagtttggatgtttgggtcattgctgtgattgttattgccatagttgttggagttgcagtaatttgtgttgtcccgtacagatatcttcaaaggaggaagaagaaaggcacatacctaactgatgagacccacagagaagtaaaatttacttctctctgagaaggagagatgagagaaaggtttgcttttatcattaaaaggaaagcagatggtggagctgaatatgccacttaccagactaaatcaaccactccagcagagcagagaggctgaatagattccacaacctggtttgccagttcatcttttgactctattaaaatcttcaatagttgttattctgtagtttcactctcatgagtgcaactgtggcttagctaatattgcaatgtggcttgaatgtaggtagcatcctttgatgcttctttgaaacttgtatgaatttgggtatgaacagattgcctgctttcccttaaataacacttagatttattggaccagtcagcacagcatgcctggttgtattaaagcagggatatgctgtattttataaaattggcaaaattagagaaatatagttcacaatgaaattatattttctttgtaaagaaagtggcttgaaatcttttttgttcaaagattaatgccaactcttaagattattctttcaccaactatagaatgtattttatatatcgttcattgtaaaaagcccttaaaaatatgtgtatactactttggctcttgtgcataaaaacaagaacactgaaaattgggaatatgcacaaacttggcttctttaaccaagaatattattggaaaattctctaaaagttaatagggtaaattctctattttttgtaatgtgttcggtgatttcagaaagctagaaagtgtatgtgtggcatttgttttcactttttaaaacatccctaactgatcgaatatatcagtaatttcagaatcagatgcatcctttcataagaagtgagaggactctgacagccataacaggagtgccacttcatggtgcgaagtgaacactgtagtcttgttgttttcccaaagagaactccgtatgttctcttaggttgagtaacccactctgaattctggttacatgtgtttttctctccctccttaaataaagagaggggttaaacatgccctctaaaagtaggtggttttgaagagaataaattcatcagataacctcaagtcacatgagaatcttagtccatttacattgccttggctagtaaaagccatctatgtatatgtcttacctcatctcctaaaaggcagagtacaaagtaagccatgtatctcaggaaggtaacttcattttgtctatttgctgttgattgtaccaagggatggaagaagtaaatatagctcaggtagcactttatactcaggcagatctcagccctctactgagtcccttagccaagcagtttctttcaaagaagccagcaggcgaaaagcagggactgccactgcatttcatatcacactgttaaaagttgtgttttgaaattttatgtttagttgcacaaattgggccaaagaaacattgccttgaggaagatatgattggaaaatcaagagtgtagaagaataaatactgttttactgtccaaagacatgtttatagtgctctgtaaatgttcctttcctttgtagtctctggcaagatgctttaggaagataaaagtttgaggagaacaaacaggaattctgaattaagcacagagttgaagtttatacccgtttcacatgcttttcaagaatgtcgcaattactaagaagcagataatggtgttttttagaaacctaattgaagtatattcaaccaaatactttaatgtataaaataaatattatacaatatacttgtatagcagtttctgcttcacatttgattttttcaaatttaatatttatattagagatctatatatgtataaatatgtattttgtcaaatttgttacttaaatatatagagaccagttttctctggaagtttgtttaaatgacagaagcgtatatgaattcaagaaaatttaagctgcaaaaatgtatttgctataaaatgagaagtctcactgatagaggttctttattgctcattttttaaaaaatggactcttgaaatctgttaaaataaaattgtacatttggagatgtttca

SEQ ID NO: 127993 - DNA, 1179 bp, Artificial Sequence
  derived and/or modified sequence
atggagccccccggcagaagagagtgccccttccccagctggagattccccggcctgctgctggccgccatggtgctgctgctgtacagcttcagcgacgcctgcgaggagccccccaccttcgaggccatggagctgatcggcaagcccaagccctactacgagatcggcgagagagtggactacaagtgcaagaagggctacttctacatcccccccctggccacccacaccatctgcgacagaaaccacacctggctgcccgtgagcgacgacgcctgctacagagagacctgcccctacatcagagaccccctgaacggccaggccgtgcccgccaacggcacctacgagttcggctaccagatgcacttcatctgcaacgagggctactacctgatcggcgaggagatcctgtactgcgagctgaagggcagcgtggccatctggagcggcaagccccccatctgcgagaaggtgctgtgcacccccccccccaagatcaagaacggcaagcacaccttcagcgaggtggaggtgttcgagtacctggacgccgtgacctacagctgcgaccccgcccccggccccgaccccttcagcctgatcggcgagagcaccatctactgcggcgacaacagcgtgtggagcagagccgcccccgagtgcaaggtggtgaagtgcagattccccgtggtggagaacggcaagcagatcagcggcttcggcaagaagttctactacaaggccaccgtgatgttcgagtgcgacaagggcttctacctggacggcagcgacaccatcgtgtgcgacagcaacagcacctgggacccccccgtgcccaagtgcctgaaggtgctgccccccagcagcaccaagccccccgccctgagccacagcgtgagcaccagcagcaccaccaagagccccgccagcagcgccagcggccccagacccacctacaagccccccgtgagcaactaccccggctaccccaagcccgaggagggcatcctggacagcctggacgtgtgggtgatcgccgtgatcgtgatcgccatcgtggtgggcgtggccgtgatctgcgtggtgccctacagatacctgcagagaagaaagaagaagggcacctacctgaccgacgagacccacagagaggtgaagttcaccagcctgtag

SEQ ID NO: 127994 - protein, 769 aa, Artificial Sequence
  derived and/or modified sequence
MRLLRRWAFAALLLSLLPTPGLGTQGPAGALRWGGLPQLGGPGAPEVTEPSRLVRESSGGEVRKQQLDTRVRQEPPGGPPVHLAQVSFVIPAFNSNFTLDLELNHHLLSSQYVERHFSREGTTQHSTGAGDHCYYQGKLRGNPHSFAALSTCQGLHGVFSDGNLTYIVEPQEVAGPWGAPQGPLPHLIYRTPLLPDPLGCREPGCLFAVPAQSAPPNRPRLRRKRQVRRGHPTVHSETKYVELIVINDHQLFEQMRQSVVLTSNFAKSVVNLADVIYKEQLNTRIVLVAMETWADGDKIQVQDDLLETLARLMVYRREGLPEPSDATHLFSGRTFQSTSSGAAYVGGICSLSHGGGVNEYGNMGAMAVTLAQTLGQNLGMMWNKHRSSAGDCKCPDIWLGCIMEDTGFYLPRKFSRCSIDEYNQFLQEGGGSCLFNKPLKLLDPPECGNGFVEAGEECDCGSVQECSRAGGNCCKKCTLTHDAMCSDGLCCRRCKYEPRGVSCREAVNECDIAETCTGDSSQCPPNLHKLDGYYCDHEQGRCYGGRCKTRDRQCQVLWGHAAADRFCYEKLNVEGTERGSCGRKGSGWVQCSKQDVLCGFLLCVNISGAPRLGDLVGDISSVTFYHQGKELDCRGGHVQLADGSDLSYVEDGTACGPNMLCLDHRCLPASAFNFSTCPGSGERRICSHHGVCSNEGKCICQPDWTGKDCSIHNPLPTSPPTGETERYKGPSGTNIIIGSIAGAVLVAAIVLGGTGWGFKNIRRGRSGGA

SEQ ID NO: 127995 - DNA, 2310 bp, Artificial Sequence
  derived and/or modified sequence
atgaggctcttgcggaggtgggctttcgctgctctcttactgtctttattgccaaccccaggactagggacccaggggcctgccggcgccttgcgatggggcggcctgccacagcttggcggtcccggcgctccagaggtgaccgaaccctctagattagttagggagtcttcgggaggtgaggtgagaaaacagcagctggataccagagtgcggcaggagcccccaggaggcccccctgtgcacttggctcaggtgtcttttgtgatccccgcatttaactcaaatttcacattggatctcgagctcaaccatcacttgctttcaagccaatacgtcgagcgtcatttcagccgcgagggaactactcagcactcaacaggcgcaggagaccactgctactatcagggcaaactgaggggcaatccacattcgtttgccgccctgtccacttgccaaggcctgcatggggtcttcagtgatggcaacctgacctacatcgtagagccgcaggaggttgcgggaccatggggtgcccctcagggccctttgccgcacttgatctaccgcactcctctgctccccgatcccttgggctgcagagagcccggctgcttattcgctgtgcccgctcaatcagcgccgcctaataggccccggctcagaagaaaaagacaagtacgacgcggtcaccctaccgtgcacagcgaaactaaatacgtagagcttattgtgattaatgatcaccagctgttcgaacaaatgaggcaatcggtggtgctgacatcgaacttcgcgaagtcagtggtgaacctggcagacgtgatttacaaggagcagctgaacactcgtatcgtgctggttgccatggaaacatgggctgatggagacaagatccaggttcaagacgatcttctagagacactggcacgactcatggtgtacagaagagaaggcctgccagagccatctgatgcgacccacctgttttcagggaggaccttccagagtactagctccggcgccgcgtatgtcggcggcatttgcagtctgagtcatggcgggggcgtcaatgagtacggtaatatgggagctatggctgtgaccttggcacaaacgctgggccagaatctgggtatgatgtggaacaagcacaggtcaagcgccggagattgtaaatgccctgatatttggcttggttgcatcatggaggacacgggtttctatctgcctcgtaagtttagtcggtgcagtatcgatgagtacaaccaatttctgcaggaaggtggcggttcttgtctatttaataaacccctgaagctactggatccccccgaatgtggaaatggatttgtagaagcaggagaggagtgcgactgtggcagtgtgcaggagtgctcccgcgccggaggtaactgctgtaaaaagtgtacactgacacatgacgccatgtgcagtgacgggctgtgctgccgacgatgcaaatatgaaccaagaggcgtgtcctgtcgcgaggccgtgaacgagtgcgatatcgccgagacatgtacgggcgattcatcccagtgtccccctaatcttcacaagctcgacggctattactgtgaccacgagcaaggacgctgttacggaggaagatgtaagacgagagacagacagtgccaggtgctgtggggccacgctgctgccgaccggttctgttatgaaaagcttaacgttgaagggactgaacgcggttcctgcgggcgcaaaggctcagggtgggtgcagtgcagtaagcaagacgtgctgtgcggcttcctgctctgtgtgaatatctccggcgccccaagactgggggaccttgtgggggatatctccagcgttacattctatcatcagggcaaagagcttgactgtcgggggggccacgtacagctggccgacgggtccgacctgagttacgtggaagatggcacggcttgtggccccaacatgctctgtctggatcacaggtgcttaccagccagtgccttcaactttagcacctgtcccggttcaggcgagagaagaatttgtagccaccatggcgtatgctcaaatgagggaaaatgtatctgccagccagattggaccgggaaagactgcagcatccataaccccctgcccacttcacccccaaccggtgagacagagcgctataaaggcccctctggaacaaacatcattatcggctctatcgccggggccgttctggtggctgcgatcgtcctgggcggcacgggttgggggtttaagaacatccggagaggaaggagtggaggggcctag

SEQ ID NO: 127996 - DNA, 2310 bp, Artificial Sequence
  derived and/or modified sequence
atgaggctgctgcggcgctgggcctttgctgccctgctgctgagcctgctgcccaccccaggcctgggcacccagggccctgctggggccctgcgctggggcggcctgccccagctgggcggccctggggcccctgaggtgacagagcccagccggctggtgcgggagagcagcggcggggaggtgaggaagcagcagctggacaccagggtgcggcaggagcccccaggcggcccccctgtgcacctggcccaggtgtcctttgtgatcccagccttcaacagcaacttcaccctggacctggagctgaaccaccacctgctgagcagccagtatgtggagcggcacttcagccgggagggcaccacccagcacagcactggagctggggaccactgctactaccagggcaagctgcggggcaacccccacagctttgctgccctgagcacctgccagggcctgcacggcgtcttcagtgatggcaacctgacctacatcgtggagccccaggaggtggccggcccctggggcgccccccagggccccctgccccacctgatctaccgcacccccctgctgcctgaccccctgggctgccgggagcccggctgcctgtttgctgtgcctgcccagagcgccccacccaaccggccccggctgcggaggaagaggcaggtgcggcggggccaccccaccgtgcacagcgagaccaagtatgtggagctgattgtcatcaatgaccaccagctgtttgagcagatgaggcagagcgtggtgctgaccagcaactttgccaagtctgtggtgaacctggctgatgtgatctacaaggagcagctgaacaccagaattgtgctggtggccatggagacctgggcagatggagacaagatccaggtgcaggatgacctgctggagaccctggcccggctgatggtgtaccgccgggagggcctgcctgagcccagtgatgccacccacctgttcagcggccgcaccttccagagcaccagcagcggggccgcctacgtgggcggcatctgcagcctgagccatggaggcggcgtgaatgaatatggcaacatgggcgccatggctgtgaccctggcccagaccctgggccagaacctgggcatgatgtggaacaagcacaggagcagcgctggggactgcaagtgcccagacatctggctgggctgcatcatggaggacaccggcttctacctgcccaggaagttcagccgctgcagcattgatgagtacaaccagttcctgcaggagggcggcggcagctgcctcttcaacaagcccctgaagctgctggaccccccagaatgtggaaatggatttgtggaggccggggaggagtgtgactgtggctctgtgcaggagtgcagcagagctgggggcaactgctgcaagaagtgcaccctgacccatgatgccatgtgcagtgatggcctgtgctgccgccgctgcaagtatgagccccggggcgtgtcctgccgggaggccgtgaatgaatgtgacattgctgagacctgcacaggagacagcagccagtgcccccccaacctgcacaagctggatggctactactgtgaccacgagcagggccgctgctatggaggccgctgcaagacccgggaccggcagtgccaggtgctgtggggccatgctgctgctgaccgcttctgctatgagaagctgaatgtggagggcacagagcggggcagctgtggcaggaagggcagcggctgggtgcagtgcagcaagcaggatgtgctgtgtggcttcctgctgtgtgtgaacatcagcggggccccccggctgggggacctggtgggggacatcagctctgtgaccttctaccaccagggcaaggagctggactgccggggcggccacgtgcagctggctgatggcagtgacctgtcctatgtggaggatggaacagcctgtggccccaacatgctgtgcctggaccaccgctgcctgcctgccagcgccttcaacttcagcacctgccccggcagcggggagcggcgcatctgcagccaccacggcgtgtgcagcaatgaaggcaagtgcatctgccagcctgactggacaggcaaggactgcagcatccacaaccccctgcccaccagccccccaactggagaaacagagcgctacaagggccccagcggcaccaacatcatcatcggcagcattgctggagctgtgctggtggccgccatcgtgctgggcggcaccggctggggcttcaagaacatccggcggggccgcagcggcggggcctag

SEQ ID NO: 127997 - DNA, 2310 bp, Artificial Sequence
  derived and/or modified sequence
atgcggctgctgcggcggtgggccttcgccgccctgctgctgagccttctgcctacacccggattgggcacgcaaggtccagctggagcactgcgctggggaggcctgcctcagctcgggggcccaggtgctcccgaggtcacggagccatcacggctcgtgcgcgaaagtagcggcggagaggtgcggaaacagcagctcgatactagagtgcgccaggagcctcccggcgggcctcccgtccacttggctcaagtgtcctttgtcattcctgcattcaatagcaattttaccctggacctggaactgaaccaccacctccttagtagccagtatgtagaaagacatttctcaagggagggaactacccagcacagcactggggccggagatcattgttattaccagggaaaattgcggggcaatccacacagttttgccgccttaagcacgtgtcagggcttgcatggagtgttcagcgatggcaatcttacctacattgttgagccccaggaggtcgccggtccttggggtgccccacaagggcccctaccgcatttgatctatcgcacacctctgcttcccgaccccctggggtgtcgggaaccgggatgcttgtttgcggtcccagcccaatcagccccacccaatcggcccaggctgcggagaaaacgccaggtaagacgggggcaccctaccgttcattcagagactaagtacgtggagttgatcgtcatcaacgaccatcagctgtttgaacagatgaggcagtccgtcgttctgacaagcaactttgccaaaagcgtggtcaatctcgcagacgtgatctacaaagagcagctgaacaccaggatcgtgctagtagccatggagacgtgggccgacggtgacaaaattcaggttcaggacgacctgttagaaaccttagctaggcttatggtctacaggcgggaaggcctacctgaaccttccgatgccacccacctcttctctgggcggacattccagagcactagctccggggcagcctatgtgggcggtatctgcagcctctcccacgggggcggggttaacgagtacggtaacatgggggccatggctgttacattggcccaaacactaggacagaatctgggtatgatgtggaacaagcaccgctcttcggcgggcgattgcaagtgcccagatatatggctcggatgtatcatggaagataccggattctacttgccacggaaatttagcagatgctcgattgatgaatacaatcagtttctccaggaaggtggcggaagctgcctgtttaacaagcccctgaaactgctggacccccccgaatgtggtaatggcttcgtggaagccggagaggagtgtgattgcggcagcgtacaggaatgttcgcgtgcaggcggtaactgttgtaagaagtgtactctgacgcatgacgcaatgtgctcagacgggctctgctgccgtaggtgcaagtatgaacctaggggcgtctcatgtcgcgaggccgtgaatgaatgcgacatcgcagagacatgtaccggtgacagttctcagtgcccacccaatctgcacaagctcgatggctattactgcgatcacgagcaggggcggtgttacgggggtcggtgcaaaacacgggacaggcagtgccaggtcctgtggggtcacgctgccgcagacaggttctgttacgagaagttgaacgttgagggtactgaacgaggcagctgcggtcggaaggggagtggttgggtccagtgttccaagcaggacgtgctgtgtggtttcctgctctgcgttaacatctctggcgccccccggctgggggatctggtaggagatatatcttcagttactttttatcatcaggggaaggagcttgactgtagaggaggacatgtccagttggcagacggttctgatctgtcctacgtagaggatgggactgcttgcggtccaaatatgctttgtctggatcaccgctgcctgccagccagcgcattcaattttagcacctgtcctggatccggtgaacggagaatctgcagtcatcatggggtatgcagcaatgaaggcaaatgtatttgtcagccggactggaccggaaaagactgcagcatccataaccctctccctacatctcccccgaccggtgagacggagcgctacaagggtccctcggggactaatattattatcggctcaattgccggggccgtgcttgtcgcagcaatcgtgctagggggcactgggtgggggtttaaaaacattcggaggggcagaagcggcggcgcgtag

SEQ ID NO: 127998 - DNA, 2310 bp, Artificial Sequence
  derived and/or modified sequence
atgaggcttctgagacgatgggctttcgccgcactcttactctccctgctgccaactccaggtctgggtactcagggtccagctggagccctcagatgggggggtctgcctcaactggggggtcccggtgccccagaggtaaccgaaccctcccggcttgtgagagagagttcaggtggtgaagttcgcaaacaacaactggacacccgagtgcgtcaggaacccccaggaggtcctcccgtacacctcgctcaggtttctttcgtgatccccgcattcaatagcaacttcaccttagatcttgagctcaaccaccatttactctccagccaatatgtagagaggcatttcagccgcgaaggcacaacacaacacagcacgggcgctggcgaccattgctactaccaaggcaagttaagagggaacccacactcattcgccgcactcagcacgtgtcaaggactgcatggtgtgtttagtgatggtaatctcacgtacattgtggagcctcaagaggtcgctgggccatggggagcaccacagggacccttgccacacctgatataccgcacaccactgctgccagatcctttaggttgcagagaacccggttgtctgtttgcagtgccggcacagagcgcaccgccaaatcgcccaagactcagacgcaagagacaggtccggagaggacacccaacagtgcactcggaaacgaaatacgtcgaactgatagtgatcaacgaccaccagctgttcgagcaaatgaggcagagtgtggttctgacatccaacttcgccaaatcagtggtcaatctcgccgacgtgatctataaggaacagctgaatacgcggattgtcctggtcgctatggaaacctgggccgacggggataaaattcaggtccaagacgatctccttgagaccctcgcgcgacttatggtctatcgaagagagggtctgcccgaacctagcgacgccacccacctgttttccgggcgaactttccagtctaccagttcgggagcagcgtatgtgggaggtatctgcagtctatcccatggaggtggtgttaatgaatacggcaatatgggggcaatggccgtcaccctcgcccagaccctgggtcaaaatctcggtatgatgtggaataagcatagatctagtgcaggagattgcaaatgtccagacatttggctgggctgcatcatggaagataccggattttacctgccacgaaaattttctaggtgttctatcgatgagtacaatcagtttctccaagagggaggaggatcttgtttgtttaacaagcccctgaagctgctcgaccctccagaatgtggcaatggatttgtggaggccggagaggaatgcgactgtggctccgtgcaggaatgtagccgggctgggggaaactgctgcaagaagtgcaccctgacacatgatgctatgtgttcagatggactgtgctgccgcaggtgcaaatacgagcctcggggtgtttcctgtcgtgaggctgtcaacgagtgtgacatcgctgagacttgtactggagacagttcgcaatgcccccctaatctgcataagctggatgggtactactgcgaccacgagcaaggccgttgctacgggggtcgctgcaaaactcgcgaccggcagtgtcaggtgctgtgggggcacgccgctgccgatagattctgctacgagaagctgaatgtggagggcactgagcgtgggtcctgtggcagaaagggctctggatgggtgcaatgttccaagcaagacgttctttgtgggtttctgctttgtgtcaacatttccggagccccacgtttgggtgatctggttggcgatatttcctccgtcacgttttaccatcagggcaaggagctggactgccgcggagggcatgttcaactagctgacgggtccgacctgtcttacgtcgaagacgggacagcgtgcggacccaacatgttgtgcctcgaccataggtgcctccctgcttctgcattcaatttcagcacgtgcccgggaagcggagagcggaggatttgctctcaccatggcgtctgtagcaacgagggcaagtgtatttgccagcctgactggacagggaaagactgtagtatccacaatcctcttccaacgagccccccaaccggtgagacagagcggtataaaggcccttccggtacgaacattatcatcggctccattgcaggagccgtgctggtggctgcaattgttcttggagggaccggctggggttttaagaatatccgacggggaaggagtggaggagcttag

SEQ ID NO: 127999 - DNA, 2310 bp, Artificial Sequence
  derived and/or modified sequence
atgagactgctgagaagatgggccttcgccgccctgctgctgagcctgctgcccacccccggcctgggcacccagggccccgccggcgccctgagatggggcggcctgccccagctgggcggccccggcgcccccgaggtgaccgagcccagcagactggtgagagagagcagcggcggcgaggtgagaaagcagcagctggacaccagagtgagacaggagccccccggcggcccccccgtgcacctggcccaggtgagcttcgtgatccccgccttcaacagcaacttcaccctggacctggagctgaaccaccacctgctgagcagccagtacgtggagagacacttcagcagagagggcaccacccagcacagcaccggcgccggcgaccactgctactaccagggcaagctgagaggcaacccccacagcttcgccgccctgagcacctgccagggcctgcacggcgtgttcagcgacggcaacctgacctacatcgtggagccccaggaggtggccggcccctggggcgccccccagggccccctgccccacctgatctacagaacccccctgctgcccgaccccctgggctgcagagagcccggctgcctgttcgccgtgcccgcccagagcgccccccccaacagacccagactgagaagaaagagacaggtgagaagaggccaccccaccgtgcacagcgagaccaagtacgtggagctgatcgtgatcaacgaccaccagctgttcgagcagatgagacagagcgtggtgctgaccagcaacttcgccaagagcgtggtgaacctggccgacgtgatctacaaggagcagctgaacaccagaatcgtgctggtggccatggagacctgggccgacggcgacaagatccaggtgcaggacgacctgctggagaccctggccagactgatggtgtacagaagagagggcctgcccgagcccagcgacgccacccacctgttcagcggcagaaccttccagagcaccagcagcggcgccgcctacgtgggcggcatctgcagcctgagccacggcggcggcgtgaacgagtacggcaacatgggcgccatggccgtgaccctggcccagaccctgggccagaacctgggcatgatgtggaacaagcacagaagcagcgccggcgactgcaagtgccccgacatctggctgggctgcatcatggaggacaccggcttctacctgcccagaaagttcagcagatgcagcatcgacgagtacaaccagttcctgcaggagggcggcggcagctgcctgttcaacaagcccctgaagctgctggacccccccgagtgcggcaacggcttcgtggaggccggcgaggagtgcgactgcggcagcgtgcaggagtgcagcagagccggcggcaactgctgcaagaagtgcaccctgacccacgacgccatgtgcagcgacggcctgtgctgcagaagatgcaagtacgagcccagaggcgtgagctgcagagaggccgtgaacgagtgcgacatcgccgagacctgcaccggcgacagcagccagtgcccccccaacctgcacaagctggacggctactactgcgaccacgagcagggcagatgctacggcggcagatgcaagaccagagacagacagtgccaggtgctgtggggccacgccgccgccgacagattctgctacgagaagctgaacgtggagggcaccgagagaggcagctgcggcagaaagggcagcggctgggtgcagtgcagcaagcaggacgtgctgtgcggcttcctgctgtgcgtgaacatcagcggcgcccccagactgggcgacctggtgggcgacatcagcagcgtgaccttctaccaccagggcaaggagctggactgcagaggcggccacgtgcagctggccgacggcagcgacctgagctacgtggaggacggcaccgcctgcggccccaacatgctgtgcctggaccacagatgcctgcccgccagcgccttcaacttcagcacctgccccggcagcggcgagagaagaatctgcagccaccacggcgtgtgcagcaacgagggcaagtgcatctgccagcccgactggaccggcaaggactgcagcatccacaaccccctgcccaccagcccccccaccggcgagaccgagagatacaagggccccagcggcaccaacatcatcatcggcagcatcgccggcgccgtgctggtggccgccatcgtgctgggcggcaccggctggggcttcaagaacatcagaagaggcagaagcggcggcgcctag

SEQ ID NO: 128000 - DNA, 4402 bp, Artificial Sequence
  derived and/or modified sequence
atgaggctgctgcggcgctgggcgttcgcggctctgctgctgtcgctgctccccacgcccggtcttgggacccaaggtcctgctggagctctgcgatgggggggcttaccccagctgggaggcccaggagcccctgaggtcacggaacccagccgtctggttagggagagctccgggggagaggtccgaaagcagcagctggacacaagggtccgccaggagccaccagggggcccgcctgtccatctggcccaggtgagtttcgtcatcccagccttcaactcaaacttcaccctggacctggagctgaaccaccacctcctctcctcgcaatacgtggagcgccacttcagccgggaggggacaacccagcacagcaccggggctggagaccactgctactaccaggggaagctccgggggaacccgcactccttcgccgccctctccacctgccaggggctgcatggggtcttctctgatgggaacttgacttacatcgtggagccccaagaggtggctggaccttggggagcccctcagggaccccttccccacctcatttaccggacccctctcctcccagatcccctcggatgcagggaaccaggctgcctgtttgctgtgcctgcccagtcggctcctccaaaccggccgaggctgagaaggaaaaggcaggtccgccggggccaccctacagtgcacagtgaaaccaagtatgtggagctaattgtgatcaacgaccaccagctgttcgagcagatgcgacagtcggtggtcctcaccagcaactttgccaagtccgtggtgaacctggccgatgtgatatacaaggagcagctcaacactcgcatcgtcctggttgccatggaaacatgggcagatggggacaagatccaggtgcaggatgacctcctggagaccctggcccggctcatggtctaccgacgggagggtctgcctgagcccagtgatgccacccacctcttctcgggcaggaccttccagagcacgagcagcggggcagcctacgtggggggcatatgctccctgtcccacggcgggggtgtgaacgagtacggcaacatgggggcgatggccgtgacccttgcccagacgctgggacagaacctgggcatgatgtggaacaaacaccggagctcggcaggggactgcaagtgtccagacatctggctgggctgcatcatggaggacactgggttctacctgccccgcaagttctcgcgctgtagcatcgacgagtacaaccagtttctgcaggagggtggtggcagctgcctcttcaacaagcccctcaagctcctggaccccccagagtgcgggaacggcttcgtggaggcaggggaggagtgcgactgcggctcggtgcaggagtgcagccgcgcaggtggcaactgctgcaagaaatgcaccctgactcacgacgccatgtgcagcgacgggctctgctgtcgccgctgcaagtacgaaccacggggtgtgtcctgccgagaggccgtgaacgagtgcgacatcgcggagacctgcaccggggactctagccagtgcccgcctaacctgcacaagctggacggttactactgtgaccatgagcagggccgctgctacggaggtcgctgcaaaacccgggaccggcagtgccaggttctttggggccatgcggctgctgatcgcttctgctacgagaagctgaatgtggaggggacggagcgtgggagctgtgggcgcaagggatctggctgggtccagtgcagtaagcaggacgtgctgtgtggcttcctcctctgtgtcaacatctctggagctcctcggctaggggacctggtgggagacatcagtagtgtcaccttctaccaccagggcaaggagctggactgcaggggaggccacgtgcagctggcggacggctctgacctgagctatgtggaggatggcacagcctgcgggcctaacatgttgtgcctggaccatcgctgcctgccagcttctgccttcaacttcagcacctgccccggcagtggggagcgccggatttgctcccaccacggggtctgcagcaatgaagggaagtgcatctgtcagccagactggacaggcaaagactgcagtatccataaccccctgcccacgtccccacccacgggggagacggagagatataaaggtcccagcggcaccaacatcatcattggctccattgctggggctgtcctggttgcagccatcgtcctgggcggcacgggctggggatttaaaaacattcgccgaggaaggtccggaggggcctaagtgccaccctcctccctccaagcctggcacccaccgtctcggccctgaaccacgaggctgcccccatccagccacggagggaggcaccatgcaaatgtcttccaggtccaaacccttcaactcctggctccgcaggggtttgggtgggggctgtggccctgcccttggcaccaccagggtggaccaggcctggagggcacttcctccacagtcccccacccacctcctgcggctcagccttgcacacccactgccccgtgtgaatgtagcttccacctcatggattgccacagctcaactcgggggcgcctggagggatgcccccaggcagccaccagtggacctagcctggatggcccctccttgcaaccaggcagctgagaccagggtcttacctctctgggacctagggggacggggctgacatctacattttttaaaactgaatcttaatcgatgaatgtaaactcgggggtgctggggccagggcagatgtggggatgttttgacatttacaggagggcccggagaaactgaggtatggccatgccctagaccctccccaaggatgaccacacccgaagtcctgtcactgagcacagtcaggggctgggcatcccagcttgcccccgcttagccccgctgagcttggaggaagtatgagtgctgattcaaaccaaagctgcctgtgccatgcccaaggcctaggttatgggtacggcaaccacatgtcccagatcgtctccaattcgaaaacaaccgtcctgctgtccctgtcaggacacatggattttggcagggcggggggggttctagaaaatatagttcctataataaaatggcaccttccccctttcaagaagggtgattctggggccgactcagggtttaggtgccccctggtgtggcctagatgtccccacctgggccatctttctggggaggactctcccaggtagggaaggccagaggtggcccagtgcctggagggttagggtctctgcctgggatatgcaagaggaagtaggaaagggaggtctcatggatgatcctaggctgctagaagtccttaaggccccatctagtccattccactccctacccccattccagagccgagtagtaagtttacagatgtttcccccattacgtacccccacccatccctgctgcagcgagcctgagagccaggtagagccaggcacagctcctcagtcttctcacacagtcctgccggtggccttccctcatgacccttgcttgggagggtggagcactggctccttgaccctaaaaggtagctggcaggggcaagatgggggccagctacctaatggatgaaagccacaagtgaatacagttcttgtcaccagggttgccctgccctcactcggcagggagttctgacaccccagggcccgtgagctacctgcttgagcccctgtttctggggcaccttcgaggaggcgttgtggagggcatcgccccctgtttattcacaacaccctcaggggcaaacaggcctgggacccgctgacaccattttgggtagctggatgcacccgacagcagtggggtccacacactgagctccagctggcactgcccactcaagggctgagtggaggggcccctccggccagctctgctccaccagccctgcaagctgatgcagggcgggggaagggctgggtgttgcactattgctgcgctgccttaaggcatctgtcctctggtggtgcacccgtgcacacaggtacagtgcatctgggcacagcttttggatccacacctctgcacaagtgtgaatacctctgcacatatgggcgtatctgtgtgtgctcgtgtatatggggtggggaacatgagacttcctgtgaccagtccaccctggctcccagctgtctgtatcctcctgccccgccctggcgagtgcctaccctggcagaacccagggaggagtggaggctgcctctgcctgggcctccacacagcatcctgtacatacgccacctgggctgggggtggggaggcagggccaggagcatcgattaaagatcacatcctggggcttccagggagctcacaccaa

SEQ ID NO: 128001 - protein, 452 aa, Artificial Sequence
  derived and/or modified sequence
MVRSRQMCNTNMSVPTDGAVTTSQIPASEQETLVRPKPLLLKLLKSVGAQKDTYTMKEKIYTMIYRNLVVVNQQESSDSGTSVSENRCHLEGGSDQKDLVQELQEEKPSSSHLVSRPSTSSRRRAISETEENSDELSGERQRKRHKSDSISLSFDESLALCVIREICCERSSSSESTGTPSNPDLDAGVSEHSGDWLDQDSVSDQFSVEFEVESLDSEDYSLSEEGQELSDEDDEVYQVTVYQAGESDTDSFEEDPEISLADYWKCTSCNEMNPPLPSHCNRCWALRENWLPEDKGKDKGEISEKAKLENSTQAEEGFDVPDCKKTIVNDSRESCVEENDDKITQASQSQESEDYSQPSTSSSIIYSSQEDVKEFEREETQDKEESVESSLPLNAIEPCVICQGRPKNGCIVHGKTGHLMACFTCAKKLKKRNKPCPVCRQPIQMIVLTYFP

SEQ ID NO: 128002 - protein, 466 aa, Artificial Sequence
  derived and/or modified sequence
MCNTNMSVPTDGAVTTSQIPASEQETLVLFYLGQYIMTKRLYDEKQQHIVYCSNDLLGDLFGVPSFSVKEHRKIYTMIYRNLVVVNQQESSDSGTSVSENRCHLEGGSDQKDLVQELQEEKPSSSHLVSRPSTSSRRRAISETEENSDELSGERQRKRHKSDSISLSFDESLALCVIREICCERSSSSESTGTPSNPDLDAGVSEHSGDWLDQDSVSDQFSVEFEVESLDSEDYSLSEEGQELSDEDDEVYQVTVYQAGESDTDSFEEDPEISLADYWKCTSCNEMNPPLPSHCNRCWALRENWLPEDKGKDKGEISEKAKLENSTQAEEGFDVPDCKKTIVNDSRESCVEENDDKITQASQSQESEDYSQPSTSSSIIYSSQEDVKEFEREETQDKEESVESSLPLNAIEPCVICQGRPKNGCIVHGKTGHLMACFTCAKKLKKRNKPCPVCRQPIQMIVLTYFP

SEQ ID NO: 128003 - protein, 497 aa, Artificial Sequence
  derived and/or modified sequence
MVRSRQMCNTNMSVPTDGAVTTSQIPASEQETLVRPKPLLLKLLKSVGAQKDTYTMKEVLFYLGQYIMTKRLYDEKQQHIVYCSNDLLGDLFGVPSFSVKEHRKIYTMIYRNLVVVNQQESSDSGTSVSENRCHLEGGSDQKDLVQELQEEKPSSSHLVSRPSTSSRRRAISETEENSDELSGERQRKRHKSDSISLSFDESLALCVIREICCERSSSSESTGTPSNPDLDAGVSEHSGDWLDQDSVSDQFSVEFEVESLDSEDYSLSEEGQELSDEDDEVYQVTVYQAGESDTDSFEEDPEISLADYWKCTSCNEMNPPLPSHCNRCWALRENWLPEDKGKDKGEISEKAKLENSTQAEEGFDVPDCKKTIVNDSRESCVEENDDKITQASQSQESEDYSQPSTSSSIIYSSQEDVKEFEREETQDKEESVESSLPLNAIEPCVICQGRPKNGCIVHGKTGHLMACFTCAKKLKKRNKPCPVCRQPIQMIVLTYFP

SEQ ID NO: 128004 - protein, 257 aa, Artificial Sequence
  derived and/or modified sequence
MCNTNMSVPTDGAVTTSQIPASEQETLVRPKPLLLKLLKSVGAQKDTYTMKEVLFYLGQYIMTKRLYDEKQQHIVYCSNDLLGDLFGVPSFSVKEHRKIYTMIYRNLVVVNQQESSDSGTSVSENRCHLEGGSDQKDLVQELQEEKPSSSHLVSRPSTSSRRRAISETEENSDELSGERQRKRHKSDSISLSFDESLALCVIREICCERSSSSESTGTPSNPDLDAGVSEHSGDWLDQDSVSDQFSVEFEVESLDSE

SEQ ID NO: 128005 - protein, 446 aa, Artificial Sequence
  derived and/or modified sequence
MCNTNMSVPTDGAVTTSQIPASEQETLVRPKPLLLKLLKSVGAQKDTYTMKEKIYTMIYRNLVVVNQQESSDSGTSVSENRCHLEGGSDQKDLVQELQEEKPSSSHLVSRPSTSSRRRAISETEENSDELSGERQRKRHKSDSISLSFDESLALCVIREICCERSSSSESTGTPSNPDLDAGVSEHSGDWLDQDSVSDQFSVEFEVESLDSEDYSLSEEGQELSDEDDEVYQVTVYQAGESDTDSFEEDPEISLADYWKCTSCNEMNPPLPSHCNRCWALRENWLPEDKGKDKGEISEKAKLENSTQAEEGFDVPDCKKTIVNDSRESCVEENDDKITQASQSQESEDYSQPSTSSSIIYSSQEDVKEFEREETQDKEESVESSLPLNAIEPCVICQGRPKNGCIVHGKTGHLMACFTCAKKLKKRNKPCPVCRQPIQMIVLTYFP

SEQ ID NO: 128006 - DNA, 1359 bp, Artificial Sequence
  derived and/or modified sequence
atggtgagaagcagacagatgtgcaacaccaacatgagcgtgcccaccgacggcgccgtgaccaccagccagatccccgccagcgagcaggagaccctggtgagacccaagcccctgctgctgaagctgctgaagagcgtgggcgcccagaaggacacctacaccatgaaggagaagatctacaccatgatctacagaaacctggtggtggtgaaccagcaggagagcagcgacagcggcaccagcgtgagcgagaacagatgccacctggagggcggcagcgaccagaaggacctggtgcaggagctgcaggaggagaagcccagcagcagccacctggtgagcagacccagcaccagcagcagaagaagagccatcagcgagaccgaggagaacagcgacgagctgagcggcgagagacagagaaagagacacaagagcgacagcatcagcctgagcttcgacgagagcctggccctgtgcgtgatcagagagatctgctgcgagagaagcagcagcagcgagagcaccggcacccccagcaaccccgacctggacgccggcgtgagcgagcacagcggcgactggctggaccaggacagcgtgagcgaccagttcagcgtggagttcgaggtggagagcctggacagcgaggactacagcctgagcgaggagggccaggagctgagcgacgaggacgacgaggtgtaccaggtgaccgtgtaccaggccggcgagagcgacaccgacagcttcgaggaggaccccgagatcagcctggccgactactggaagtgcaccagctgcaacgagatgaacccccccctgcccagccactgcaacagatgctgggccctgagagagaactggctgcccgaggacaagggcaaggacaagggcgagatcagcgagaaggccaagctggagaacagcacccaggccgaggagggcttcgacgtgcccgactgcaagaagaccatcgtgaacgacagcagagagagctgcgtggaggagaacgacgacaagatcacccaggccagccagagccaggagagcgaggactacagccagcccagcaccagcagcagcatcatctacagcagccaggaggacgtgaaggagttcgagagagaggagacccaggacaaggaggagagcgtggagagcagcctgcccctgaacgccatcgagccctgcgtgatctgccagggcagacccaagaacggctgcatcgtgcacggcaagaccggccacctgatggcctgcttcacctgcgccaagaagctgaagaagagaaacaagccctgccccgtgtgcagacagcccatccagatgatcgtgctgacctacttcccctag

SEQ ID NO: 128007 - DNA, 1494 bp, Artificial Sequence
  derived and/or modified sequence
atggtgagaagcagacagatgtgcaacaccaacatgagcgtgcccaccgacggcgccgtgaccaccagccagatccccgccagcgagcaggagaccctggtgagacccaagcccctgctgctgaagctgctgaagagcgtgggcgcccagaaggacacctacaccatgaaggaggtgctgttctacctgggccagtacatcatgaccaagagactgtacgacgagaagcagcagcacatcgtgtactgcagcaacgacctgctgggcgacctgttcggcgtgcccagcttcagcgtgaaggagcacagaaagatctacaccatgatctacagaaacctggtggtggtgaaccagcaggagagcagcgacagcggcaccagcgtgagcgagaacagatgccacctggagggcggcagcgaccagaaggacctggtgcaggagctgcaggaggagaagcccagcagcagccacctggtgagcagacccagcaccagcagcagaagaagagccatcagcgagaccgaggagaacagcgacgagctgagcggcgagagacagagaaagagacacaagagcgacagcatcagcctgagcttcgacgagagcctggccctgtgcgtgatcagagagatctgctgcgagagaagcagcagcagcgagagcaccggcacccccagcaaccccgacctggacgccggcgtgagcgagcacagcggcgactggctggaccaggacagcgtgagcgaccagttcagcgtggagttcgaggtggagagcctggacagcgaggactacagcctgagcgaggagggccaggagctgagcgacgaggacgacgaggtgtaccaggtgaccgtgtaccaggccggcgagagcgacaccgacagcttcgaggaggaccccgagatcagcctggccgactactggaagtgcaccagctgcaacgagatgaacccccccctgcccagccactgcaacagatgctgggccctgagagagaactggctgcccgaggacaagggcaaggacaagggcgagatcagcgagaaggccaagctggagaacagcacccaggccgaggagggcttcgacgtgcccgactgcaagaagaccatcgtgaacgacagcagagagagctgcgtggaggagaacgacgacaagatcacccaggccagccagagccaggagagcgaggactacagccagcccagcaccagcagcagcatcatctacagcagccaggaggacgtgaaggagttcgagagagaggagacccaggacaaggaggagagcgtggagagcagcctgcccctgaacgccatcgagccctgcgtgatctgccagggcagacccaagaacggctgcatcgtgcacggcaagaccggccacctgatggcctgcttcacctgcgccaagaagctgaagaagagaaacaagccctgccccgtgtgcagacagcccatccagatgatcgtgctgacctacttcccctag

SEQ ID NO: 128008 - DNA, 1359 bp, Artificial Sequence
  derived and/or modified sequence
atggttcgaagtagacagatgtgcaataccaatatgtctgtcccgactgatggggcagtaactacgtcccagatacccgctagtgagcaggagactctggttcggccgaaacccctgttgttgaagctgttgaaatcagtcggagcccaaaaggacacatatacaatgaaggaaaaaatctataccatgatttataggaatttggtggttgttaatcagcaagaatcttccgactccggtacttccgtgagtgagaaccggtgccacctcgaggggggctccgatcagaaggatttggtccaagagctacaagaggaaaaaccctcctcctcccacctcgtttcgcgaccttctacctcgagccgaagaagagctatctcggagactgaggagaactcagatgaactgtccggtgagagacagcggaagaggcacaaatcggattcaatttctctcagtttcgacgagtcactagctctgtgcgtcattcgggaaatatgttgtgaaagatcttcttctagtgagtctaccggcacgccttccaacccagaccttgatgctggagtgtccgaacacagtggggactggctggaccaggattcagtaagcgaccagtttagtgtggagtttgaagtcgaatcactggattctgaagattattctttaagcgaagaaggtcaggagctctctgatgaagacgatgaagtgtatcaggtcactgtgtaccaggctggtgaaagtgatacagacagctttgaagaggaccccgagatcagtctggccgactattggaaatgtacaagctgcaacgagatgaatccccctttaccttcgcactgtaatcggtgctgggcactgcgcgaaaattggctcccagaggataaagggaaggacaaaggagagatctcagagaaggctaagcttgagaacagcacacaagctgaagagggctttgatgtgcctgactgcaagaagaccatagtgaacgattcgcgcgagtcatgcgtcgaagagaacgacgacaaaatcacccaggcgtcacaaagccaggaatctgaggattacagccagcccagcacatctagtagcattatctattcctcccaggaagatgtgaaagagtttgagagggaagaaacccaggacaaggaagagagtgtcgagtctagcctccctctgaatgccatcgagccatgcgtgatctgtcagggcaggcctaaaaatggatgtattgtgcatggtaaaactggccaccttatggcctgtttcacctgtgctaagaagctgaagaaaagaaataagccttgccctgtgtgtcgccagccaattcagatgatagtgttaacatactttccttag

SEQ ID NO: 128009 - DNA, 1494 bp, Artificial Sequence
  derived and/or modified sequence
atggtgaggtcccggcagatgtgcaacacaaatatgtctgtccctacagacggagccgttaccacatctcaaatccccgccagtgagcaagagacgctggtccgtccaaagccactgttgctcaagctcctgaagagtgtgggagctcaaaaggatacctataccatgaaagaggttttattttacctcggacaatacattatgaccaaacgtctgtatgacgagaagcagcagcacatagtctattgcagcaacgatttattgggcgacctgttcggagtgccctctttttcagttaaggagcaccgaaaaatatacacaatgatttacagaaacctggtggttgttaaccagcaggagagttctgactccggaacaagcgtgtccgagaaccgctgtcacctggaggggggaagcgatcagaaggaccttgtccaagagctccaggaagaaaaacccagcagttcccatctggtgagtaggccgtcgacatcctctcgaagacgagccatctcagaaacagaagagaatagtgatgaactgtccggcgagcgccagaggaagcgccacaaatcagacagtatttcactcagttttgatgaatccctggcactgtgcgttattagagagatctgctgtgaacggagttcatcgtccgagtccacagggaccccaagcaaccctgacctggacgcgggcgtgtccgagcacagcggggattggttggatcaagattccgtgagcgaccagttctccgtagaatttgaggtcgagtcccttgactccgaggattattcgctgtctgaggagggccaggaactgtctgatgaggacgacgaagtttatcaggtcaccgtgtaccaggcaggggaaagtgataccgacagctttgaggaggaccccgagataagcctggccgattattggaagtgcacaagctgcaacgagatgaatccaccgctaccatcacactgcaacaggtgctgggctcttcgcgagaactggttacccgaagacaagggcaaagacaagggcgagatttcagagaaggctaagctggagaactccacccaggcagaggaaggatttgatgtgccagactgcaagaagacaatcgtaaacgactctagggagtcatgcgttgaggaaaatgacgacaagataacccaagcctcacagtctcaggagtcagaggattacagccagccatcaactagtagctcaatcatatatagcagccaggaagacgtcaaagagttcgagcgggaagaaacccaagataaagaggagtctgttgaaagttctctccctctcaacgcgattgaaccctgcgtgatttgccaggggagaccaaaaaatggatgtattgtccacggtaagaccgggcatctaatggcctgctttacctgtgctaagaaactcaagaaacggaataagccatgccccgtatgtcggcagcctatacagatgattgtgctgacatatttcccttag

SEQ ID NO: 128010 - DNA, 1359 bp, Artificial Sequence
  derived and/or modified sequence
atggtgcgcagccggcagatgtgcaacaccaacatgtctgtgcccacagatggagctgtgaccaccagccagatcccagccagcgagcaggagaccctggtgcggcccaagcccctgctgctgaagctgctgaagtctgtgggcgcccagaaggacacctacaccatgaaggagaagatctacaccatgatctacagaaacctggtggtggtgaaccagcaggagagcagtgacagcggcacctctgtgtctgaaaatcgctgccacctggagggcggcagtgaccagaaggacctggtgcaggagctgcaggaggagaagcccagcagcagccacctggtgtcccggcccagcaccagcagcagaagaagagccatcagcgagacagaagaaaattctgatgagctgtctggagagcggcagaggaagaggcacaagagtgacagcatcagcctgagctttgatgagagcctggccctgtgtgtgatccgggagatctgctgtgagaggagcagcagcagcgagagcacaggcacccccagcaacccagacctggatgctggggtgtctgagcacagcggggactggctggaccaggacagcgtgtctgaccagttctctgtggagtttgaggtggagagcctggacagcgaggactacagcctgtctgaggagggccaggagctgagtgatgaagatgatgaggtgtaccaggtgacagtgtaccaggccggggagagtgacacagacagctttgaggaggaccctgagatcagcctggccgactactggaagtgcaccagctgcaatgagatgaacccccccctgcccagccactgcaaccgctgctgggccctgcgggagaactggctgcctgaagataaaggcaaggacaagggggagatcagcgagaaggccaagctggagaacagcacccaggccgaggagggctttgatgtgcctgactgcaagaagaccatcgtgaatgacagccgggagagctgtgtggaggagaatgatgacaagatcacccaggccagccagagccaggagagcgaggactacagccagcccagcaccagcagcagcatcatctacagcagccaggaggatgtgaaggagtttgagcgggaggagacccaggacaaggaggagagcgtggagagcagcctgcccctgaatgccatcgagccctgtgtgatctgccagggccggcccaagaatggctgcatcgtgcacggcaagacaggccacctgatggcctgcttcacctgtgccaagaagctgaagaagaggaacaagccctgccctgtgtgccggcagcccatccagatgattgtgctgacctacttcccctag

SEQ ID NO: 128011 - DNA, 1494 bp, Artificial Sequence
  derived and/or modified sequence
atggtgcgcagccggcagatgtgcaacaccaacatgtctgtgcccacagatggagctgtgaccaccagccagatcccagccagcgagcaggagaccctggtgcggcccaagcccctgctgctgaagctgctgaagtctgtgggcgcccagaaggacacctacaccatgaaggaggtgctcttctacctgggccagtacatcatgaccaagaggctgtatgatgagaagcagcagcacatcgtgtactgcagcaatgacctgctgggggacctgtttggagtgcccagcttctctgtgaaggagcacaggaagatctacaccatgatctacagaaacctggtggtggtgaaccagcaggagagcagtgacagcggcacctctgtgtctgagaaccgctgccacctggagggcggcagtgaccagaaggacctggtgcaggagctgcaggaggagaagcccagcagcagccacctggtgtcccggcccagcaccagcagcagaagaagagccatcagcgagacagaggagaacagtgatgagctgagcggggagcggcagaggaagaggcacaagagtgacagcatcagcctgagctttgatgagagcctggccctgtgtgtgatccgggagatctgctgtgagaggagcagcagcagcgagagcacaggcacccccagcaacccagacctggatgctggggtgtctgagcacagcggggactggctggaccaggacagcgtgtctgaccagttctctgtggagtttgaggtggagagcctggacagcgaggactacagcctgtctgaggagggccaggagctgagtgatgaagatgatgaggtgtaccaggtgacagtgtaccaggccggggagagtgacacagacagctttgaagaagatcctgagatcagcctggccgactactggaagtgcaccagctgcaatgagatgaacccccccctgcccagccactgcaaccgctgctgggccctgcgggagaactggctgcctgaggacaagggcaaggacaagggggagatcagcgagaaggccaagctggagaacagcacccaggccgaggagggctttgatgtgcctgactgcaagaagaccatcgtgaatgacagccgggagagctgtgtggaggagaatgatgacaagatcacccaggccagccagagccaggagagcgaggactacagccagcccagcaccagcagcagcatcatctacagcagccaggaggatgtgaaggagtttgagcgggaggagacccaggacaaggaggagagcgtggagagcagcctgcccctgaatgccatcgagccctgcgtcatctgccagggccggcccaagaatggctgcatcgtgcacggcaagacaggccacctgatggcctgcttcacctgtgccaagaagctgaagaagaggaacaagccctgccctgtgtgccggcagcccatccagatgattgtgctgacctacttcccctag

SEQ ID NO: 128012 - DNA, 1582 bp, Artificial Sequence
  derived and/or modified sequence
gcggccgcgacccctctgaccgagatcctgctgctttcgcagccaggagcaccgtccctccccggattagtgcgtacgagcgcccagtgccctggcccggagagtggaatgatccccgaggcccagggcgtcgtgcttccgcgcgccccgtgaaggaaactggggagtcttgagggacccccgactccaagcgcgaaaaccccggatggtgaggagcaggcaaatgtgcaataccaacatgtctgtacctactgatggtgctgtaaccacctcacagattccagcttcggaacaagagaccctggttagaccaaagccattgcttttgaagttattaaagtctgttggtgcacaaaaagacacttatactatgaaagagaaaatatataccatgatctacaggaacttggtagtagtcaatcagcaggaatcatcggactcaggtacatctgtgagtgagaacaggtgtcaccttgaaggtgggagtgatcaaaaggaccttgtacaagagcttcaggaagagaaaccttcatcttcacatttggtttctagaccatctacctcatctagaaggagagcaattagtgagacagaagaaaattcagatgaattatctggtgaacgacaaagaaaacgccacaaatctgatagtatttccctttcctttgatgaaagcctggctctgtgtgtaataagggagatatgttgtgaaagaagcagtagcagtgaatctacagggacgccatcgaatccggatcttgatgctggtgtaagtgaacattcaggtgattggttggatcaggattcagtttcagatcagtttagtgtagaatttgaagttgaatctctcgactcagaagattatagccttagtgaagaaggacaagaactctcagatgaagatgatgaggtatatcaagttactgtgtatcaggcaggggagagtgatacagattcatttgaagaagatcctgaaatttccttagctgactattggaaatgcacttcatgcaatgaaatgaatcccccccttccatcacattgcaacagatgttgggcccttcgtgagaattggcttcctgaagataaagggaaagataaaggggaaatctctgagaaagccaaactggaaaactcaacacaagctgaagagggctttgatgttcctgattgtaaaaaaactatagtgaatgattccagagagtcatgtgttgaggaaaatgatgataaaattacacaagcttcacaatcacaagaaagtgaagactattctcagccatcaacttctagtagcattatttatagcagccaagaagatgtgaaagagtttgaaagggaagaaacccaagacaaagaagagagtgtggaatctagtttgccccttaatgccattgaaccttgtgtgatttgtcaaggtcgacctaaaaatggttgcattgtccatggcaaaacaggacatcttatggcctgctttacatgtgcaaagaagctaaagaaaaggaataagccctgcccagtatgtagacaaccaattcaaatgattgtgctaacttatttcccctagttgacctgtctataagag

SEQ ID NO: 128013 - DNA, 7381 bp, Artificial Sequence
  derived and/or modified sequence
ggggcgcgcaccgaggcaccgcggcgagcttggctgcttctggggcctgtgtggccctgtgtgtcggaaagatggagcaagaagccgagcccgaggggcggccgcgacccctctgaccgagatcctgctgctttcgcagccaggagcaccgtccctccccggattagtgcgtacgagcgcccagtgccctggcccggagagtggaatgatccccgaggcccagggcgtcgtgcttccgcgcgccccgtgaaggaaactggggagtcttgagggacccccgactccaagcgcgaaaaccccggatggtgaggagcaggcaaatgtgcaataccaacatgtctgtacctactgatggtgctgtaaccacctcacagattccagcttcggaacaagagaccctggttagaccaaagccattgcttttgaagttattaaagtctgttggtgcacaaaaagacacttatactatgaaagaggttcttttttatcttggccagtatattatgactaaacgattatatgatgagaagcaacaacatattgtatattgttcaaatgatcttctaggagatttgtttggcgtgccaagcttctctgtgaaagagcacaggaaaatatataccatgatctacaggaacttggtagtagtcaatcagcaggaatcatcggactcaggtacatctgtgagtgagaacaggtgtcaccttgaaggtgggagtgatcaaaaggaccttgtacaagagcttcaggaagagaaaccttcatcttcacatttggtttctagaccatctacctcatctagaaggagagcaattagtgagacagaagaaaattcagatgaattatctggtgaacgacaaagaaaacgccacaaatctgatagtatttccctttcctttgatgaaagcctggctctgtgtgtaataagggagatatgttgtgaaagaagcagtagcagtgaatctacagggacgccatcgaatccggatcttgatgctggtgtaagtgaacattcaggtgattggttggatcaggattcagtttcagatcagtttagtgtagaatttgaagttgaatctctcgactcagaagattatagccttagtgaagaaggacaagaactctcagatgaagatgatgaggtatatcaagttactgtgtatcaggcaggggagagtgatacagattcatttgaagaagatcctgaaatttccttagctgactattggaaatgcacttcatgcaatgaaatgaatcccccccttccatcacattgcaacagatgttgggcccttcgtgagaattggcttcctgaagataaagggaaagataaaggggaaatctctgagaaagccaaactggaaaactcaacacaagctgaagagggctttgatgttcctgattgtaaaaaaactatagtgaatgattccagagagtcatgtgttgaggaaaatgatgataaaattacacaagcttcacaatcacaagaaagtgaagactattctcagccatcaacttctagtagcattatttatagcagccaagaagatgtgaaagagtttgaaagggaagaaacccaagacaaagaagagagtgtggaatctagtttgccccttaatgccattgaaccttgtgtgatttgtcaaggtcgacctaaaaatggttgcattgtccatggcaaaacaggacatcttatggcctgctttacatgtgcaaagaagctaaagaaaaggaataagccctgcccagtatgtagacaaccaattcaaatgattgtgctaacttatttcccctagttgacctgtctataagagaattatatatttctaactatataaccctaggaatttagacaacctgaaatttattcacatatatcaaagtgagaaaatgcctcaattcacatagatttcttctctttagtataattgacctactttggtagtggaatagtgaatacttactataatttgacttgaatatgtagctcatcctttacaccaactcctaattttaaataatttctactctgtcttaaatgagaagtacttggtttttttttttcttaaatatgtatatgacatttaaatgtaacttattattttttttgagaccgagtcttgctctgttacccaggctggagtgcagtggcgtgatcttggctcactgcaagctctgcctcccgggttcgcaccattctcctgcctcagcctcccaattagcttggcctacagtcatctgccaccacacctggctaattttttgtacttttagtagagacagggtttcaccgtgttagccaggatggtctcgatctcctgacctcgtgatccgcccacctcggcctcccaaagtgctgggattacaggcatgagccaccgcgtccggcctaaatgtcacttagtacctttgatataaagagaaaatgtgtgaaagatttagttttttgtttttttgtttgtttgtttgtttgtttgttttgagatgagtctctctgtcgcccaggctggagtgcagtgtcatgatctagcagtctccgcttcccgggttcaagccattctcctggctcagcctctggagcagctgggattacaggcatgcaccaccatgcccagctaatttttgtatttttagtagagatagggtttcaccatgttggccaggctggtcacgaactcctgacctcaagtgaggtcacccgcctcggcctcccgaagtgctgggattgcagatgtgagccaccatgtccagccaagaattagtatttaaattttagatactctttttttttttttttttttttttttttgagacagagtcttgctccatcacccatgctagagtgcagtggagtgatctcggctcactgcaacttccgccttctgggttcaagctattctcctgcctcagccttccaagtaactgggattacaggcatgtaccaccataccagctgatttttttgtatttttagtaaagacagggtttcaccatgttagccaggctgatcttgaactcctaaactcaagtgatctactcacctcagcctcccaaaatgctgggattacagatgtgaggcacctggcctcagatttttgatactcttaaaccttctgatccttagtttctctctccaaaatactctttctaggttaaaaaaaaaaaggctcttatatttggtgctatgtaaatgaaaatgttttttaggttttcttgatttaacaatagagacagggtctccctgtgttgcccaggctggtctcgaactcctgggctcaagagatcctcctgtcttggcctcgcaaagtgctaagtaggattacaggcgttagccaccacacccggctgtaaaaatgtacttattctccagcctcttttgtataaaccatagtaagggatgggagtaatgatgttatctgtgaaaatagccaccatttacccgtaagacaaaacttgttaaagcctcctgagtctaacctagattacatcaggccctttttcacacacaaaaaaatcctttatgggatttaatggaatctgttgtttccccctaagttgaaaaacaactctaagacactttaaagtaccttcttggcctgggttacatggttcccagcctaggtttcagacttttgcttaaggccagttttagaaacccgtgaattcagaaaagttaattcagaaatttgataaacagaattgttatttaaaaactaactggaaagattgttaagttctttctgaattattcagaaattatgcatcattttccttcaagaatgacagggtcagcatgtggaattccaagatacctcttgacttcctctcaagctccgtgtttggtcagtggaggcccatccgagctcagcactgagaagtgttagtttctttgggacccatctaccctgaccacatcatgatgttcatctgcagctgttgcaaggtgttcagattgtataaacataaatgtcacaaaaactttaaaagaagtgcaattctcaaaaggttaggtggactaaagcattctgtaaagcaactgctaataatgagcttacagtggatttgaatttgaaaaatatagtaacaagcctgtcaaatatctgcaagaactatggaataaaactactgatgcagtgaagacagttgaaaagatcaaacaaatgccaagctatatttataatgaacaaattcaagaaaaaggactacggaaagttcaggacatcaaagaagtcaggcaaaactcatcttgacccctgttgcaggcaaaggaacgcagctggaagaaaagatgatataacagttaacaggatgcagacatggcagaggtttcctaaaaatctcattatctataaccatttctatatttacatttgaaaatctcctttggagacttagaacctctaaattattgacttattttttatataaggtcactccgatgaaaggtgattacaaaatcatctacattgctgtctacaaaacagataatatggatgtttgatcgcatctcattgttaactctttactgatatgtttgtaaatacagaagtgaaatgtggacataaaatagttacgctatttggttaatggtactagacaacatgtaattaatgacattcaaaaatttatggctagtgatatatataaagtaaaattttctttgcagtaaaatatgccctttattatagaagggaggatataaggaaccaacagtttgtatgaaaatagctcaaataatatcttttattttgattttaatatttcttattttggtttattagtgtcttagaacaaaatggccttatataatgaagcctagttatgctggactgttttgatctcttttaattgttctgacagatagttggggatgagagccgaataaggtttgcctgaaataactgacactatataatttctgctttggcaaatactaagttctaacttgtcattcctggtagaacaagctttatttttcgagcctagcaatgatctagaagcagatgttatctcagtgccttttgcaatttgttgtgtgggtttttttttttttaaagccacacaataattttggaaaacaatgtatgggtagaacatgtgtctgttaattgcacacaaaaccacttttaatgggtacagagttaaatttgaaggaataagttctagctgaagtattatgaactccaaataatgctttgaggacctccaaaggtaaaagtactaatccctttggccatttattgagagagagagagagagagagtagggtgactatagttaatgtattgaatgttcttgctacaaataaatgatatttgagctgatgggtgtgctaattacactgatttgatcaatacccattgtatgtgaaacagtacatacaccatatttacaattatgtatttaacatttaaaatttctaatataagtatctctcaaactgtggattaacttcttgatttatatttaaatatgaatcttaagcaaaacagtgaaaataaccatcttgatttagtgtttttctcccatatgtgaattgtatatacttaggtgaagacaataaaatcaactgaactgtaagcttagaataggactgaggtaattctgcacagcaactttactaatggtacattgttgcttcaaaactctctctctctctctctgtctgtctcaataaatggccaaagggattagtagtttacctgtggaggtcctccaagcattatttggagttgataatacttcagctacaaccaagcagaatctcttttttttggaggtcctcgaagcattatttggagttgataatacttcagcttcaatttggagttgataatatttcagctagaacctagtagaatctgtttttttcctttggaggtcctcaaagcattattggagttcataatactgaagctagaaccaagcagaatctgtttttttctgaggagtatcggtagcataaatgtgattataaacatagtacacttgatatatggaggcagtgacagctatttttacaaaatttaaatctgcaaatggattcaacatgtttatgggttattaaaattgtctgatttcttaggttctttatagtacacgtgttgaaaataaatgattaagaattgtttcaagaatgcaattatttgatcttaaatttttatgagttgttaaaatagaaattatttgaatatcatatatttgggtaacaaaaggcacaagtctgaatgtgtttctttttctggaatggccatgcctgcccactttagaaatacaaatatcactgggcagcttgaagcagttgggagcctccaatgagagcaacttgagagaatgatgttgcaagttagtaggagtaagaaatgctgtgttctccctgtcttctcttaggtcacatggcagcctggcctaagtgatcgtgaatggtctataagggaggtagctgggacagggaggggagtttgggctagccaccgtaccacttgtcagcgtgaaaagtaagattgtaattgcctgtttagttttctgcctcatctttgaaagttccaccaagctgggaacctcttgattgtgaggcacaaatgtaagtacatcagaaaaaaacaaaaaaactggctttaaagcaggagcttgtgggcccctaagccagacggggactagcttttggcattatataattaagattttttaaatccttaataagggttttattttatttttatttattttttgagacggagtcttgctctgtggctcaggctggagtacagtggtgcaatcttggctcactgcaacctctgcctcctggctgtgttcaagtggttctgcttcagcctcccaagtagctggggttagagcaccctgtcaccacgccccgctaatttttgtatttctagcagagatgaagtttcactatgttggccaggctgggctcaaactcctgacctcaagtgatctgcccgccttggccccccaaagtgctgtgattacaggcgtgagccgccacgcccagcctaataagggttttaaagataattagtgtgtaggtctgtaggcttatgatggtaaccacaagttgttaatggcattgtgaaaagtttttagttgcgctttatgggtggatgctgaattacattttgatttgatacttataaaaagaaaaagtatttcttcagcttaaaaaattgtttaaaagtttgtgatcatattgtctaccatgtagccagctttcaattatatgtaagagggactttttgacatttacaaataatactttgaggtagatatctgaaagcaccagcacttggaaggtgttcagaagtaacaaattataaaatgagctaacaaacgaaaggcaaaataaaaccgtaaagcaagcaga

SEQ ID NO: 128014 - DNA, 845 bp, Artificial Sequence
  derived and/or modified sequence
tgtgttcagtggcgattggagggtagacctgtgggcacggacgcacgccactttttctctgctgatccaggcaaatgtgcaataccaacatgtctgtacctactgatggtgctgtaaccacctcacagattccagcttcggaacaagagaccctggttagaccaaagccattgcttttgaagttattaaagtctgttggtgcacaaaaagacacttatactatgaaagaggttcttttttatcttggccagtatattatgactaaacgattatatgatgagaagcaacaacatattgtatattgttcaaatgatcttctaggagatttgtttggcgtgccaagcttctctgtgaaagagcacaggaaaatatataccatgatctacaggaacttggtagtagtcaatcagcaggaatcatcggactcaggtacatctgtgagtgagaacaggtgtcaccttgaaggtgggagtgatcaaaaggaccttgtacaagagcttcaggaagagaaaccttcatcttcacatttggtttctagaccatctacctcatctagaaggagagcaattagtgagacagaagaaaattcagatgaattatctggtgaacgacaaagaaaacgccacaaatctgatagtatttccctttcctttgatgaaagcctggctctgtgtgtaataagggagatatgttgtgaaagaagcagtagcagtgaatctacagggacgccatcgaatccggatcttgatgctggtgtaagtgaacattcaggtgattggttggatcaggattcagtttcagatcagtttagtgtagaatttgaagttgaatctctcgactcagaa

SEQ ID NO: 128015 - DNA, 7228 bp, Artificial Sequence
  derived and/or modified sequence
gcaccgcggcgagcttggctgcttctggggcctgtgtggccctgtgtgtcggaaagatggagcaagaagccgagcccgaggggcggccgcgacccctctgaccgagatcctgctgctttcgcagccaggagcaccgtccctccccggattagtgcgtacgagcgcccagtgccctggcccggagagtggaatgatccccgaggcccagggcgtcgtgcttccgcgcgccccgtgaaggaaactggggagtcttgagggacccccgactccaagcgcgaaaaccccggatggtgaggagcaggcaaatgtgcaataccaacatgtctgtacctactgatggtgctgtaaccacctcacagattccagcttcggaacaagagaccctggttagaccaaagccattgcttttgaagttattaaagtctgttggtgcacaaaaagacacttatactatgaaagagaaaatatataccatgatctacaggaacttggtagtagtcaatcagcaggaatcatcggactcaggtacatctgtgagtgagaacaggtgtcaccttgaaggtgggagtgatcaaaaggaccttgtacaagagcttcaggaagagaaaccttcatcttcacatttggtttctagaccatctacctcatctagaaggagagcaattagtgagacagaagaaaattcagatgaattatctggtgaacgacaaagaaaacgccacaaatctgatagtatttccctttcctttgatgaaagcctggctctgtgtgtaataagggagatatgttgtgaaagaagcagtagcagtgaatctacagggacgccatcgaatccggatcttgatgctggtgtaagtgaacattcaggtgattggttggatcaggattcagtttcagatcagtttagtgtagaatttgaagttgaatctctcgactcagaagattatagccttagtgaagaaggacaagaactctcagatgaagatgatgaggtatatcaagttactgtgtatcaggcaggggagagtgatacagattcatttgaagaagatcctgaaatttccttagctgactattggaaatgcacttcatgcaatgaaatgaatcccccccttccatcacattgcaacagatgttgggcccttcgtgagaattggcttcctgaagataaagggaaagataaaggggaaatctctgagaaagccaaactggaaaactcaacacaagctgaagagggctttgatgttcctgattgtaaaaaaactatagtgaatgattccagagagtcatgtgttgaggaaaatgatgataaaattacacaagcttcacaatcacaagaaagtgaagactattctcagccatcaacttctagtagcattatttatagcagccaagaagatgtgaaagagtttgaaagggaagaaacccaagacaaagaagagagtgtggaatctagtttgccccttaatgccattgaaccttgtgtgatttgtcaaggtcgacctaaaaatggttgcattgtccatggcaaaacaggacatcttatggcctgctttacatgtgcaaagaagctaaagaaaaggaataagccctgcccagtatgtagacaaccaattcaaatgattgtgctaacttatttcccctagttgacctgtctataagagaattatatatttctaactatataaccctaggaatttagacaacctgaaatttattcacatatatcaaagtgagaaaatgcctcaattcacatagatttcttctctttagtataattgacctactttggtagtggaatagtgaatacttactataatttgacttgaatatgtagctcatcctttacaccaactcctaattttaaataatttctactctgtcttaaatgagaagtacttggtttttttttttcttaaatatgtatatgacatttaaatgtaacttattattttttttgagaccgagtcttgctctgttacccaggctggagtgcagtggcgtgatcttggctcactgcaagctctgcctcccgggttcgcaccattctcctgcctcagcctcccaattagcttggcctacagtcatctgccaccacacctggctaattttttgtacttttagtagagacagggtttcaccgtgttagccaggatggtctcgatctcctgacctcgtgatccgcccacctcggcctcccaaagtgctgggattacaggcatgagccaccgcgtccggcctaaatgtcacttagtacctttgatataaagagaaaatgtgtgaaagatttagttttttgtttttttgtttgtttgtttgtttgtttgttttgagatgagtctctctgtcgcccaggctggagtgcagtgtcatgatctagcagtctccgcttcccgggttcaagccattctcctggctcagcctctggagcagctgggattacaggcatgcaccaccatgcccagctaatttttgtatttttagtagagatagggtttcaccatgttggccaggctggtcacgaactcctgacctcaagtgaggtcacccgcctcggcctcccgaagtgctgggattgcagatgtgagccaccatgtccagccaagaattagtatttaaattttagatactctttttttttttttttttttttttttttgagacagagtcttgctccatcacccatgctagagtgcagtggagtgatctcggctcactgcaacttccgccttctgggttcaagctattctcctgcctcagccttccaagtaactgggattacaggcatgtaccaccataccagctgatttttttgtatttttagtaaagacagggtttcaccatgttagccaggctgatcttgaactcctaaactcaagtgatctactcacctcagcctcccaaaatgctgggattacagatgtgaggcacctggcctcagatttttgatactcttaaaccttctgatccttagtttctctctccaaaatactctttctaggttaaaaaaaaaaaggctcttatatttggtgctatgtaaatgaaaatgttttttaggttttcttgatttaacaatagagacagggtctccctgtgttgcccaggctggtctcgaactcctgggctcaagagatcctcctgtcttggcctcgcaaagtgctaagtaggattacaggcgttagccaccacacccggctgtaaaaatgtacttattctccagcctcttttgtataaaccatagtaagggatgggagtaatgatgttatctgtgaaaatagccaccatttacccgtaagacaaaacttgttaaagcctcctgagtctaacctagattacatcaggccctttttcacacacaaaaaaatcctttatgggatttaatggaatctgttgtttccccctaagttgaaaaacaactctaagacactttaaagtaccttcttggcctgggttacatggttcccagcctaggtttcagacttttgcttaaggccagttttagaaacccgtgaattcagaaaagttaattcagaaatttgataaacagaattgttatttaaaaactaactggaaagattgttaagttctttctgaattattcagaaattatgcatcattttccttcaagaatgacagggtcagcatgtggaattccaagatacctcttgacttcctctcaagctccgtgtttggtcagtggaggcccatccgagctcagcactgagaagtgttagtttctttgggacccatctaccctgaccacatcatgatgttcatctgcagctgttgcaaggtgttcagattgtataaacataaatgtcacaaaaactttaaaagaagtgcaattctcaaaaggttaggtggactaaagcattctgtaaagcaactgctaataatgagcttacagtggatttgaatttgaaaaatatagtaacaagcctgtcaaatatctgcaagaactatggaataaaactactgatgcagtgaagacagttgaaaagatcaaacaaatgccaagctatatttataatgaacaaattcaagaaaaaggactacggaaagttcaggacatcaaagaagtcaggcaaaactcatcttgacccctgttgcaggcaaaggaacgcagctggaagaaaagatgatataacagttaacaggatgcagacatggcagaggtttcctaaaaatctcattatctataaccatttctatatttacatttgaaaatctcctttggagacttagaacctctaaattattgacttattttttatataaggtcactccgatgaaaggtgattacaaaatcatctacattgctgtctacaaaacagataatatggatgtttgatcgcatctcattgttaactctttactgatatgtttgtaaatacagaagtgaaatgtggacataaaatagttacgctatttggttaatggtactagacaacatgtaattaatgacattcaaaaatttatggctagtgatatatataaagtaaaattttctttgcagtaaaatatgccctttattatagaagggaggatataaggaaccaacagtttgtatgaaaatagctcaaataatatcttttattttgattttaatatttcttattttggtttattagtgtcttagaacaaaatggccttatataatgaagcctagttatgctggactgttttgatctcttttaattgttctgacagatagttggggatgagagccgaataaggtttgcctgaaataactgacactatataatttctgctttggcaaatactaagttctaacttgtcattcctggtagaacaagctttatttttcgagcctagcaatgatctagaagcagatgttatctcagtgccttttgcaatttgttgtgtgggtttttttttttttaaagccacacaataattttggaaaacaatgtatgggtagaacatgtgtctgttaattgcacacaaaaccacttttaatgggtacagagttaaatttgaaggaataagttctagctgaagtattatgaactccaaataatgctttgaggacctccaaaggtaaaagtactaatccctttggccatttattgagagagagagagagagagagtagggtgactatagttaatgtattgaatgttcttgctacaaataaatgatatttgagctgatgggtgtgctaattacactgatttgatcaatacccattgtatgtgaaacagtacatacaccatatttacaattatgtatttaacatttaaaatttctaatataagtatctctcaaactgtggattaacttcttgatttatatttaaatatgaatcttaagcaaaacagtgaaaataaccatcttgatttagtgtttttctcccatatgtgaattgtatatacttaggtgaagacaataaaatcaactgaactgtaagcttagaataggactgaggtaattctgcacagcaactttactaatggtacattgttgcttcaaaactctctctctctctctctgtctgtctcaataaatggccaaagggattagtagtttacctgtggaggtcctccaagcattatttggagttgataatacttcagctacaaccaagcagaatctcttttttttggaggtcctcgaagcattatttggagttgataatacttcagcttcaatttggagttgataatatttcagctagaacctagtagaatctgtttttttcctttggaggtcctcaaagcattattggagttcataatactgaagctagaaccaagcagaatctgtttttttctgaggagtatcggtagcataaatgtgattataaacatagtacacttgatatatggaggcagtgacagctatttttacaaaatttaaatctgcaaatggattcaacatgtttatgggttattaaaattgtctgatttcttaggttctttatagtacacgtgttgaaaataaatgattaagaattgtttcaagaatgcaattatttgatcttaaatttttatgagttgttaaaatagaaattatttgaatatcatatatttgggtaacaaaaggcacaagtctgaatgtgtttctttttctggaatggccatgcctgcccactttagaaatacaaatatcactgggcagcttgaagcagttgggagcctccaatgagagcaacttgagagaatgatgttgcaagttagtaggagtaagaaatgctgtgttctccctgtcttctcttaggtcacatggcagcctggcctaagtgatcgtgaatggtctataagggaggtagctgggacagggaggggagtttgggctagccaccgtaccacttgtcagcgtgaaaagtaagattgtaattgcctgtttagttttctgcctcatctttgaaagttccaccaagctgggaacctcttgattgtgaggcacaaatgtaagtacatcagaaaaaaacaaaaaaactggctttaaagcaggagcttgtgggcccctaagccagacggggactagcttttggcattatataattaagattttttaaatccttaataagggttttattttatttttatttattttttgagacggagtcttgctctgtggctcaggctggagtacagtggtgcaatcttggctcactgcaacctctgcctcctggctgtgttcaagtggttctgcttcagcctcccaagtagctggggttagagcaccctgtcaccacgccccgctaatttttgtatttctagcagagatgaagtttcactatgttggccaggctgggctcaaactcctgacctcaagtgatctgcccgccttggccccccaaagtgctgtgattacaggcgtgagccgccacgcccagcctaataagggttttaaagataattagtgtgtaggtctgtaggcttatgatggtaaccacaagttgttaatggcattgtgaaaagtttttagttgcgctttatgggtggatgctgaattacattttgatttgatacttataaaaagaaaaagtatttcttcagcttaaaaaattgtttaaaagtttgtgatcatattgtctaccatgtagccagctttcaattatatgtaagagggactttttgacatttacaaataatactttgaggtagatatctgaaagcaccagcacttggaaggtgttcagaagtaacaaattataaaatgagctaacaaacgaaaggcaaaataaaaccgtaaagcaagc

SEQ ID NO: 128016 - DNA, 1359 bp, Artificial Sequence
  derived and/or modified sequence
atggtgcggagccggcagatgtgcaacaccaacatgagcgtgcccactgacggtgcagtgacaacctcacagataccggccagcgagcaggaaactctggtaaggccaaaaccgctgctgctgaagcttctgaagtctgtgggagcgcagaaagacacatacaccatgaaagaaaaaatctacaccatgatctaccggaatttagtcgtggtaaaccagcaggagagtagtgattcagggacttccgtgtctgaaaaccggtgccacctggaaggcgggagtgaccaaaaggacctggtgcaggaacttcaagaggagaaaccaagttcttcccatctggtgtcacggccttctacctcatcccgtcggcgcgccatcagtgagacagaggaaaatagtgatgaattgtctggggaaagacagcggaagcgccacaaatctgactctatcagcctgtcatttgatgagagtttggcactgtgtgtgatccgggaaatatgttgtgagcgttcgtcgtcatctgaaagcacaggtacaccctcaaatccagacttagatgctggcgtatccgagcacagcggtgactggttagaccaggacagcgtgtctgatcagttcagcgtcgaattcgaggttgagagtctggacagcgaagactactcgctgagcgaggagggccaagagcttagcgatgaggatgacgaggtttatcaggtgaccgtctatcaagctggcgaaagcgacacagactcttttgaagaggatcccgagatcagcttagccgactattggaaatgtacctcctgcaacgagatgaatcctcccctgccctcacattgcaataggtgctgggccttgagagagaattggttacccgaagacaagggtaaggacaagggggaaatttccgaaaaagccaaactggagaattccacccaggccgaagaggggttcgacgtgccagattgcaaaaaaacaattgtcaacgacagccgcgaaagctgtgtcgaggaaaacgatgataagatcacacaagccagccaaagccaggaaagcgaagactatagtcaaccatctaccagcagtagtatcatatattcttctcaggaggacgtgaaagagttcgaaagggaagaaacccaagataaagaagagtctgtcgagtccagcctccctttgaatgctatcgaaccatgcgtaatttgtcagggcagacctaaaaacggctgtattgtgcatgggaaaactggacaccttatggcatgcttcacatgcgctaagaaactcaagaagaggaacaagccttgtcctgtgtgtaggcagcccatccagatgatcgttctgacctattttccctag

SEQ ID NO: 128017 - DNA, 1494 bp, Artificial Sequence
  derived and/or modified sequence
atggtgcggagccggcagatgtgcaacaccaacatgagcgtgcccacggacggtgccgtcactacgagccagatccccgcatctgagcaagaaacgctcgtgagacctaaaccattactgctcaagcttctgaagtctgtcggagctcaaaaggacacatatacaatgaaggaagtgctgttctatctgggccagtacattatgactaagagattatacgacgagaaacaacaacacattgtttactgtagcaacgacctgctgggagacttattcggagttccatccttttccgtcaaagaacaccgcaagatatacacgatgatctacaggaacctggtcgttgtcaaccagcaggaaagcagcgactcaggcacttccgtttcagagaatcgttgtcatctggaggggggcagtgatcaaaaagatctcgttcaggagctgcaagaggaaaaaccatcttcatcccatctggtgagtcgtccatccacctcaagtcgaagaagagctattagtgaaaccgaggagaatagtgatgagttgtccggtgaaagacagaggaaacggcataagtcagacagcatctcactctcctttgacgagtctctcgccctgtgcgtaataagggaaatttgctgcgagcgcagcagctcgagtgaaagtactgggaccccaagcaaccctgacctagatgccggcgttagcgagcactccggcgattggttggatcaggattccgtcagcgaccaattcagcgtagagttcgaagtggagagccttgatagcgaggattactcattgtccgaagagggccaggagttgtccgatgaagacgacgaagtttaccaggtcaccgtgtaccaggccggagagtccgatacggatagtttcgaggaggaccccgagatcagtctagctgactactggaagtgcacgtcttgcaacgaaatgaatccacccctgccgagtcattgcaaccgctgttgggccctgcgggaaaactggttgccagaagacaaggggaaagataagggcgagataagcgagaaggccaaactggagaattctacacaggccgaggagggtttcgatgtaccagactgcaagaagaccattgtcaacgatagccgggagagctgcgtggaggaaaacgacgacaagatcacccaggcatcgcagagccaggagtccgaggattactcgcagccctctacgtccagctctatcatctactcttcacaggaggatgtgaaggagtttgaaagggaagagacccaagataaagaggaaagcgtcgagagcagtctgcccttgaatgctatcgaaccttgcgtcatttgccaaggccgacctaaaaatggttgcatagttcacggcaagacgggacatctgatggcgtgcttcacctgcgcgaaaaagttgaaaaaaaggaataagccctgtcctgtgtgtagacaaccgattcagatgatcgtgctcacgtatttcccttag

SEQ ID NO: 128018 - DNA, 1359 bp, Artificial Sequence
  derived and/or modified sequence
atggtgcggtctcgacaaatgtgcaataccaacatgagcgtaccgactgacggtgcagtaacaactagccagatccctgctagcgagcaagagaccttggtgcgtcctaaacccctgttactcaagctgttgaaatctgtgggggctcaaaaggacacatatacgatgaaagaaaagatttacaccatgatctatagaaatctggtagtcgtgaatcaacaagaatcatctgacagcgggaccagcgtgagcgaaaacagatgccatctggagggcggaagcgatcagaaagatttggtgcaggaactccaagaggagaaacccagcagttcccaccttgtgtcaagaccttccacatcctctcgacgaagagctatatctgaaacggaggagaattccgacgagttatcaggcgagaggcagcggaaacgccacaaatccgacagcatctcgctgtccttcgacgaatccctggcactctgtgtcatccgggaaatctgttgtgagcgttcatcttcatccgagtcaaccgggacacccagcaatcccgacctggacgcaggtgtgtctgagcattccggggattggctggaccaggactctgtcagcgaccagttcagtgttgagttcgaagtagaatcacttgattccgaggattacagcttaagtgaagagggacaggaattatctgacgaggatgacgaagtgtatcaggtcacagtttaccaagctggcgaatcggacacggattcgtttgaagaggatcccgagatctctctggcggactattggaagtgtacgagttgcaatgaaatgaatccacctcttcctagtcattgcaatcggtgctgggcactgagagaaaattggctgcctgaggacaagggaaaggacaagggtgaaatttctgaaaaggcaaagctcgaaaacagcacacaggctgaagagggttttgatgtccccgattgcaaaaaaactatagtcaacgattcaagagaaagttgtgttgaagagaatgatgataagattacccaggcgagccagtcccaagagtccgaggattacagtcagccctcgacctctagtagcattatttattcatcccaggaggatgtgaaagagtttgagagagaggaaactcaggacaaagaggagagcgtggaatcctcactcccactcaatgccatcgagccctgcgtgatttgtcagggtcgacccaaaaatgggtgtattgttcatggcaaaaccggacatctgatggcgtgcttcacatgcgccaagaagttaaagaagcgaaacaaaccctgccccgtttgtcggcagccaattcaaatgattgtcctcacttactttccctag

SEQ ID NO: 128019 - DNA, 1494 bp, Artificial Sequence
  derived and/or modified sequence
atggttcgtagtcggcagatgtgtaacactaatatgtccgtccccactgacggtgcagtgacgacctcgcagattccggcaagtgagcaagagacattggtccggcctaagcctcttcttcttaaactcttgaagagcgttggggcacagaaagacacatacacaatgaaagaggtgctgttttacctagggcaatatatcatgaccaagcggctgtacgatgagaagcaacagcatattgtttattgctccaatgatctgctaggggacctctttggtgtgcctagtttctctgtgaaggagcacagaaaaatatacaccatgatctaccgcaatctggtagtggttaatcaacaggagtccagtgacagtggtacatccgttagcgagaatagatgtcacttggaagggggaagtgaccagaaggatctcgtccaggaactacaagaggagaagccgtcctcgagtcatcttgttagcagaccaagcaccagcagtcgcagacgtgccatcagcgagacagaagagaacagtgacgaattaagcggggagcggcaaaggaaacggcacaaaagcgactcaatcagtctgtcttttgatgaatctcttgccctgtgcgtaatcagagagatttgttgcgagcgctctagttcttcagaaagcacgggcaccccaagtaatcctgatctcgatgcaggcgttagtgagcactccggggattggctggaccaggattctgtatccgatcagttctcggtggagtttgaggtggagtccctagactccgaagattattcactatcagaggagggacaggaactcagtgatgaagacgacgaagtttaccaagtgactgtataccaagcgggtgagtccgacacagattctttcgaagaagatcccgaaatttcactggcagattattggaagtgtacttcatgtaacgaaatgaacccacccctcccctctcattgcaaccgttgttgggcactaagggagaactggttgccagaggacaagggcaaagataagggagagatctcagaaaaggctaagttagagaattccacacaggccgaggaagggttcgacgtacccgactgcaagaaaacaatcgtgaatgactctcgtgaaagctgcgttgaggagaatgacgacaagattacccaggcttcccaatcccaggagtcagaggactattctcagccctctacaagctcatccattatatatagttctcaggaagacgtgaaagaattcgagcgagaagagacacaggataaggaagagagcgtagagtcgtccctacctctgaacgccatagaaccgtgtgttatctgtcaaggacgccctaaaaatggatgtatcgtccacggaaaaacagggcacctgatggcctgtttcacctgcgcaaagaaattgaaaaagcgcaacaaaccatgccctgtgtgccggcagccaatccaaatgatcgtacttacctactttccatag

SEQ ID NO: 128020 - protein, 213 aa, Artificial Sequence
  derived and/or modified sequence
MPNFVVDWRVYTDSLFLTVDFGLCAEESSTSRKRTTEDDIPTLPTSEHKCIHSREDEDLIENLAQDETSRLDLGFEEWDVAGLPWWFLGNLRSNYTPRSNGSTDLQTNQDVGTAIVSDTTDDLWFLNESVSEQLGVGIKVEAADTEQTSEEVGKVSDKKVIEVGKNDDLEDSKSLSDDTDVEVTSEDEWQCTECKKFNSPSKRYCFRCWALRK

SEQ ID NO: 128021 - protein, 490 aa, Artificial Sequence
  derived and/or modified sequence
MTSFSTSAQCSTSDSACRISPGQINQVRPKLPLLKILHAAGAQGEMFTVKEVMHYLGQYIMVKQLYDQQEQHMVYCGGDLLGELLGRQSFSVKDPSPLYDMLRKNLVTLATATTDAAQTLALAQDHSMDIPSQDQLKQSAEESSTSRKRTTEDDIPTLPTSEHKCIHSREDEDLIENLAQDETSRLDLGFEEWDVAGLPWWFLGNLRSNYTPRSNGSTDLQTNQDVGTAIVSDTTDDLWFLNESVSEQLGVGIKVEAADTEQTSEEVGKVSDKKVIEVGKNDDLEDSKSLSDDTDVEVTSEDEWQCTECKKFNSPSKRYCFRCWALRKDWYSDCSKLTHSLSTSDITAIPEKENEGNDVPDCRRTISAPVVRPKDAYIKKENSKLFDPCNSVEFLDLAHSSESQETISSMGEQLDNLSEQRTDTENMEDCQNLLKPCSLCEKRPRDGNIIHGRTGHLVTCFHCARRLKKAGASCPICKKEIQLVIKVFIA

SEQ ID NO: 128022 - DNA, 1473 bp, Artificial Sequence
  derived and/or modified sequence
atgaccagcttcagcaccagcgcccagtgcagcaccagcgacagcgcctgcagaatcagccccggccagatcaaccaggtgagacccaagctgcccctgctgaagatcctgcacgccgccggcgcccagggcgagatgttcaccgtgaaggaggtgatgcactacctgggccagtacatcatggtgaagcagctgtacgaccagcaggagcagcacatggtgtactgcggcggcgacctgctgggcgagctgctgggcagacagagcttcagcgtgaaggaccccagccccctgtacgacatgctgagaaagaacctggtgaccctggccaccgccaccaccgacgccgcccagaccctggccctggcccaggaccacagcatggacatccccagccaggaccagctgaagcagagcgccgaggagagcagcaccagcagaaagagaaccaccgaggacgacatccccaccctgcccaccagcgagcacaagtgcatccacagcagagaggacgaggacctgatcgagaacctggcccaggacgagaccagcagactggacctgggcttcgaggagtgggacgtggccggcctgccctggtggttcctgggcaacctgagaagcaactacacccccagaagcaacggcagcaccgacctgcagaccaaccaggacgtgggcaccgccatcgtgagcgacaccaccgacgacctgtggttcctgaacgagagcgtgagcgagcagctgggcgtgggcatcaaggtggaggccgccgacaccgagcagaccagcgaggaggtgggcaaggtgagcgacaagaaggtgatcgaggtgggcaagaacgacgacctggaggacagcaagagcctgagcgacgacaccgacgtggaggtgaccagcgaggacgagtggcagtgcaccgagtgcaagaagttcaacagccccagcaagagatactgcttcagatgctgggccctgagaaaggactggtacagcgactgcagcaagctgacccacagcctgagcaccagcgacatcaccgccatccccgagaaggagaacgagggcaacgacgtgcccgactgcagaagaaccatcagcgcccccgtggtgagacccaaggacgcctacatcaagaaggagaacagcaagctgttcgacccctgcaacagcgtggagttcctggacctggcccacagcagcgagagccaggagaccatcagcagcatgggcgagcagctggacaacctgagcgagcagagaaccgacaccgagaacatggaggactgccagaacctgctgaagccctgcagcctgtgcgagaagagacccagagacggcaacatcatccacggcagaaccggccacctggtgacctgcttccactgcgccagaagactgaagaaggccggcgccagctgccccatctgcaagaaggagatccagctggtgatcaaggtgttcatcgcctag

SEQ ID NO: 128023 - DNA, 1473 bp, Artificial Sequence
  derived and/or modified sequence
atgacgtcatttagcacctccgctcagtgtagtacctcagactcagcttgccggatttcacccggccaaattaatcaagtgcgacccaagctgcccttgctgaagattttgcacgccgccggcgcccagggagagatgtttacagtcaaggaagttatgcactatttgggtcagtatatcatggtaaaacaactttacgatcagcaagaacagcacatggtgtattgcggtggggacctgctgggtgaattactgggtaggcagagtttcagcgtgaaggacccgtcccccctctatgatatgctccggaagaacctggtgacgctggcgaccgccacgacggatgctgcgcagactctggccctggctcaggatcattccatggacatccccagccaggaccagctgaaacagagcgcggaggaatcatcaacatccagaaagcggaccacagaagacgacattccaaccctccctacgtctgaacacaagtgcatccatagtcgcgaggacgaagacctaatcgaaaacctggcgcaggacgaaacgtcccggctggacctcgggttcgaggagtgggacgttgctgggctaccctggtggttcctgggtaacctacgcagcaattatactccacgttctaatggatccacagacctccaaacaaatcaagacgtgggcactgctattgtgtcggataccacagatgatctgtggtttctaaatgaatctgtatcagagcagctgggagtgggaatcaaggtggaagccgcggacacagagcagacgagcgaagaggtgggtaaagtaagcgataagaaagttatcgaagtgggcaagaacgacgacttggaagactcaaagagcttgtccgatgataccgacgtggaggttacgagcgaggatgaatggcagtgtaccgagtgcaagaaatttaacagcccttctaaacgctattgcttccggtgttgggctctccgcaaggactggtatagcgattgcagcaagctgacccactcactgagcacctccgacattaccgcaatacccgagaaagagaatgaaggcaatgacgtgcctgattgcaggaggacaatttccgctccagtggtcagacccaaagacgcttatataaaaaaggagaactctaagctatttgatccttgcaactctgtggagttcctagacttggcccattcttctgagtcccaggaaactatttcctccatgggtgagcagttggataacttgtcggagcagagaaccgataccgaaaatatggaggattgtcaaaatctactgaagccctgtagcctctgcgaaaagcgcccacgcgatggaaatattattcatggcaggacgggacacctggtgacttgttttcattgcgcgaggaggctgaagaaggctggcgcctcatgtcccatttgcaagaaggagattcagttagtaattaaggtgtttatagcttag

SEQ ID NO: 128024 - DNA, 1473 bp, Artificial Sequence
  derived and/or modified sequence
atgaccagcttcagcaccagcgcccagtgcagcaccagtgacagcgcctgccgcatcagccctggccagatcaaccaggtgcggcccaagctgcccctgctgaagatcctgcatgctgctggggcccagggcgagatgttcaccgtgaaggaggtgatgcactacctgggccagtacatcatggtgaagcagctgtatgaccagcaggagcagcacatggtgtactgcggcggggacctgctgggggagctgctgggccggcagagcttctctgtgaaggaccccagccccctgtatgacatgctgaggaagaacctggtgaccctggccacagccaccacagatgctgcccagaccctggccctggcccaggaccacagcatggacatccccagccaggaccagctgaagcagagcgctgaggagagcagcaccagcaggaagaggaccacagaagatgacatccccaccctgcccaccagcgagcacaagtgcatccacagccgggaggatgaggacctgattgagaacctggcccaggatgagaccagccggctggacctgggctttgaggagtgggatgtggccggcctgccctggtggttcctgggcaacctgcggagcaactacacccccaggagcaatggcagcacagacctgcagaccaaccaggatgtgggcacagccatcgtgtctgacaccacagatgacctgtggttcctgaatgaatctgtgtctgagcagctgggcgtgggcatcaaggtggaggccgctgacacagagcagaccagcgaggaggtgggcaaggtgtctgacaagaaggtgattgaggtgggcaagaatgatgacctggaggacagcaagagcctgagtgatgacacagatgtggaggtgaccagtgaagatgagtggcagtgcacagagtgcaagaagttcaacagccccagcaagcgctactgcttccgctgctgggccctgaggaaggactggtacagcgactgcagcaagctgacccacagcctgagcaccagtgacatcacagccatccctgagaaggaaaatgaaggaaatgatgtgcctgactgcaggaggaccatcagcgcccctgtggtgcggcccaaggatgcctacatcaagaaggagaacagcaagctgtttgacccctgcaacagcgtggagttcctggacctggcccacagcagcgagagccaggagaccatcagctccatgggagagcagctggacaacctgtctgagcagaggacagacacagagaacatggaggactgccagaacctgctgaagccctgcagcctgtgtgagaagaggcccagagatggcaacatcatccacggccgcacaggccacctggtgacctgcttccactgtgcccggcggctgaagaaggccggggccagctgccccatctgcaagaaggagatccagctggtgatcaaggtgttcatcgcctag

SEQ ID NO: 128025 - DNA, 10073 bp, Artificial Sequence
  derived and/or modified sequence
gggaggccggaagttgcggcttcattactcgccatttcaaaatgctgccgaggccctaggatctgtgactgccacccctccccccacccgggctcggcgggggagcgactcatggagctgccgtaagttttaccaacagactgcagtttcttcactaccaaaatgacatcattttccacctctgctcagtgttcaacatctgacagtgcttgcaggatctctcctggacaaatcaatcaggtacgaccaaaactgccgcttttgaagattttgcatgcagcaggtgcgcaaggtgaaatgttcactgttaaagaggtcatgcactatttaggtcagtacataatggtgaagcaactttatgatcagcaggagcagcatatggtatattgtggtggagatcttttgggagaactactgggacgtcagagcttctccgtgaaagacccaagccctctctatgatatgctaagaaagaatcttgtcactttagccactgctactacagatgctgctcagactctcgctctcgcacaggatcacagtatggatattccaagtcaagaccaactgaagcaaagtgcagaggaaagttccacttccagaaaaagaactacagaagacgatatccccacactgcctacctcagagcataaatgcatacattctagagaagatgaagacttaattgaaaatttagcccaagatgaaacatctaggctggaccttggatttgaggagtgggatgtagctggcctgccttggtggtttttaggaaacttgagaagcaactatacacctagaagtaatggctcaactgatttacagacaaatcaggatgtgggtactgccattgtttcagatactacagatgacttgtggtttttgaatgagtcagtatcagagcagttaggtgttggaataaaagttgaagctgctgatactgaacaaacaagtgaagaagtagggaaagtaagtgacaaaaaggtgattgaagtgggaaaaaatgatgacctggaggactctaagtccttaagtgatgataccgatgtagaggttacctctgaggatgagtggcagtgtactgaatgcaagaaatttaactctccaagcaagaggtactgttttcgttgttgggccttgaggaaggattggtattcagattgttcaaagttaacccattctctctccacgtctgatatcactgccatacctgaaaaggaaaatgaaggaaatgatgtccctgattgtcgaagaaccatttcggctcctgtcgttagacctaaagatgcgtatataaagaaagaaaactccaaactttttgatccctgcaactcagtggaattcttggatttggctcacagttctgaaagccaagagaccatctcaagcatgggagaacagttagataacctttctgaacagagaacagatacagaaaacatggaggattgccagaatctcttgaagccatgtagcttatgtgagaaaagaccacgagacgggaacattattcatggaaggacgggccatcttgtcacttgttttcactgtgccagaagactaaagaaggctggggcttcatgccctatttgcaagaaagagattcagctggttattaaggtttttatagcataatggtagtacgaacataaaaatgcatttattccgttcacttaccacattatttgaaaatcaatcctttatttaattttatttccaacctgtcagagaatgttcttaggcatcaaaatccaaggtagctgtaagaaaaatactggagctaacaatgaagaacagaagtaatctgattagtcaaattattaagtgccatggattactttatgcagcagtcaggtacatagttaggtgaacccaaaagaaaaactcttgaaaacaagagatttcttccatgcacatttacaatattgaggtataattaacatgataaagtgtttccttctaacgagttgtagaaatctgagtaaccacccaaaaaagcaatagaatgtttctgtcaccccaaaacactcccttctgcccctcttcagacagtccttcagctatttcatggctctcaccctagttttttttttttttgcacttttttttttccgggggtataggggaggtgtggggcgacagggtctgtcttgttctgtctcccaggctgaagtgcagtgcagtggtatgatcatggctcactgcagccttggtttcctgggcataagtggtcttcccacttcagcctcctgagtagctgagactatagactagcataaccacactggctaattttttgtggagatgaagtctcactatgttgcccaggctggtctcgaactcctgggctcaaacaatcctcccgcctcagccttccaaattgctgggattatagtcatgaggcacctagtctggcccttttgcaagactttaatctgaaatctaaatttttaaaatttaagtacttacaaaggatatactatccaacatattgcatattatatatgtgctttaaagtttttttttttttttgagagacggtctcactttgtcatccaagctggagtgcagtggtgcaaacacggcccacctcctgggctcaagtgatcctccagcctcagcttccctcacaggcattcactatcactcccagctaattaaaataatttgtagacggtgtctcgttatgttgcccaggctggtctcgaactcctgggtttaagtgattcccccgcctcagcctcccaaagtgttgggcttacagccttgagccactatgcttggctcaaagatatttttatgaaagccctgggactatagatttagctgattaaatttatagaaaaagtcctgtcatataaactggcaaagtctgttcttaatttaattagccaaatcagacttaacttccgtcagaacatgtcttggttttaattcagataaacacacaaacatacttctctggcacagccttcagaagcatcagtttttgttttgttttgttttgttttttgagacagggtcttgctctgtcgcccaggctggagtgcactggcacaatcacagttcactgcagcctcgacctcccagatccaagcaatcctcccacctaagcctcccaagtagctgggtctataggcgcgtgccaccaccatgcccagctgaattttgtattttttgtacagacagcattttgccatgttgcccaggctggtcccaaacttctagcctcaagcaaccctcctgcctcagcctctcaaagtgctaggattgcagtcctgagctactgccccctaccctctttgcgtcttaggagtcatttagattttttttgatccttttgtttagtgcctctggagctgcttacaccaaggcaatacgccttgatatactggatggttgagaggcagcctctttttttttttttttttttttttttttttggaggatagggagtatggctgttgtgaaaagggaggtaaagagaaatggtagatctgaagaggcctcatcagagcacatattttaggacaacacatatggaaattggacatctttaagttggtttccatagagctatgcatgtatccttacccccatgggaaaatgttggtgtgttctcaagggtatgcatgtgtcattttgaagaccaaggccctagaattgtcaaacttaaggatcataaaaatcatgagggttgcttgttaaaaatgtccaaacgtgcagagactgatctttgagatctggaccaggaatttgcatttgaacaagtgttcctggaatctctatgcaagttttatacagaacatacttttggaatccttgccctagacaggggtgtccaatcttttggcttccctggtccacaatggaagaagaattgtcttggaccacacataaaatacactaacactaacaatagctgatgagctaaaaaaaaaaaaaaaaaaaatcgtggaccgggcgtagtggctcacgcctgtaatcccaacactttgggagatcacctaggtcgggagtttgagaccagcctgaccgacatggagaaaccccatttttactaaaaatacaaaaaattagctgggcatggtggtgcatgcctgtagtcccagctactcaggaggctgaggcaggagaatcgcttgaacctgagagggggagattgcggtgagctgagattgcgccattgcaccccagcctgggcaacaatagcgaaactgtctcagaaaaaagaaaaaaaaaatcgcaaaaagaaaaatctcataatgtcgttgttggtttttttttttttttttgagacagtctcactctgttgcccaggctggagtgcaatggcatgatctctgctcaccgcaacctctgcctcccgggttcaggtgattctcctgcctcagcctcccagatagctgggactacaggcacataccaccatgcctggctaatttttgtatttttagtagagatgggggtttcactgtgttggccaggctggtctcgaactcctgacctcatgatccacacacctcggcctcccaaagtcctgcgattacaggcgtgagctaccgcacccagccaagttgtaatttttaataaaacttaagaagtaaacattttacttatgtttataggtatttgatcctaaatttgacacatcattgcccatgaaagaatcctcttaggctgctcagcttcactcttcctgcttgcccaccggggtttttcactgcttctgttagcactaagtacttagacgatcctaagatatgtgcttgagccgaatttcatctttacttgtaggaaactttaaactatttcttttcttttcttttttttttttttttacttgagatggagttttgctcttgtcgcccaggctggagtgcagtggagtgatctcggctcactgcaacctctgcctcccgggttcaaatgattctcctgcctcagcctcccaagtagctgggattacaggtgtgcaccaccatgtctggctaattttgtatttttagtagagatggtttcaccatgttggtcaggctggtctcgaactcctgacctcaggtcatccacccacctcagcctcgcaaagtgctgagattacaggcatgagccacagcgcccagcttaaactattttcttggtctgtttttgattttcttttttccttgccactgcggtacagattttttttactcactgccactaaactaaagcaaggcatagtttatatgtgaagtgttcagagtttactgctataaggaaacttccaaatactgacatttaccttttagctgtagttattgggaccatgtgctctggttttctggagactgccaaattgctcccatttttctgcatcccacctggtttctttctgcatgtcccctttcactttcaaacctcttcatttggatgttaaattatatggtcacctagttataggtaagccttgttcgagttgatatcttgattgtgaggaaggatctgtgtcattggagcttgtttctgctgcaacgtgctgtagactatgaataatgaaatcacaccacattaccatcagatttcttgttttagttgtcaaattaatatttatgattgttatcttgggcgaaaagttcagagcagagatgacaaatcattagaacaacgatgaatttcagtattacggctaaaaagttcttctgtctgaatattaactcactctccttccagtgtacttcacagtaattggtatgcttttttatttaatgcttaaatcaaactttataaaaatcttagaccagatctttaatatggtatgccatttccccagtctaccaatggaatagtatgggtttctaatcctaggcttgtacaatggattggagttgagccatgccagcctccacactgccactaacttctgtaatgtaagattgagtcactgccaagcatttgaaatatgcagttgtgttttaattataatttatgtatagttagatgtatgtagtgcattgtgtggtattatttggtttgtaagaatttatttttaagggtcaaggtcatttgtaacattttgtgtgtgtcaattcaatgcaatgttggctgccttttgaagtctttgatatattggtgaatattcttctgatctataatacaaagctatgtaatgttacctcttgactcgcttttgaaaggaagacaattgttaactagatatttgagttttttcccctcagaattatgtgaatttctgatatatggctttagatactgtgaatctgttttccatttagtcagttatctgcttaaattgttcagaactatatcctaacgagcaattagttctgatggttctcccagtcatgagtgtgcatgtgtgcaagcatgttttgatcctgatgctacctttgctaaaaatggccatagattaggaactagctatgtttttagaatcaaagatgaaccggtaagctgtctcatgtaccaaacgtgaaatttacagtgtttacaaatgtctggaattttgcactgccatagggaatgttaaggttacttggctggaatttatcagacttgtgagtaaacaagttgaagtttagcagatgagggggaatattgaggcccctaaggctaaacaaaataatcagtatctgagatagtggctaatgtggctccccaggcctaatttgggaacagtttttcctgattgctttgagaagtactttcttttgacagaaattttcattctgcttgccattgctatattctccctttataggagccattggatttctttccttttgtgggaaatgtcccattagcattttcagatcttttgatgtgcactaatgccattattggtaatgccgttattggtgaatacagcatagttaaataaactgttacagtaaatctacacttggatttgctgcacctctaccaatagccttttgaatgactgaaagtgttaacagagaaagaggcatgtctgcagaaagagatagctaatattttttggtactttatctgaaatccaagatgctgcttcccctgcaggttgttttccttcttacgatcctcattgaatcccctctgggagcacaggacagttagtagaactctccatttctttttttttttttttagacggagtctctctctgtcgccccggctggagtgcagtggcgcgatctcggctcactgcaacctccgcctcccgggttcaccccattctcctgcctcagcctccctagtagctgggactataggcgcccgccaccacgcctggctaatttttgtatttttattggagacggggtttcaccgtcttagccaggatggtcttgatctcctgacctcgtgatctgcccacctcagcctcccaaagtactgggattacaggcgtgagccaccgcgcccggccggaactctccatttcttaaggtaaagagggtcaaggatacctaaaaagggtcaaataatgctagaagagcaattcctctttcagagcagttgctgtaatttggcaaatgctttatcgaagattgatattaggctaggggcggtggcttacgcctgtaatcccagcactttgggaggccgaggtgggtggattgcctgagctcaggagttcgagaccagtctgaccagtatggtgaaaccctgtctctactaaaaatacaaaaattagccggtcgtggtggcgtgcacctgtagtcccagctacttggcaggttgagacaggagaatcgcttgaacctgggaggtggaggttgcagtgagccgagactgcaccactgcgctcccacctgggtgacagagactctgtctcaaaaaaaaggacatttatcattataacatcttattagagcccctaatttcttatctgaaggcactgtttttttttttaaacagttaagtactgatgtcaacagacaaatatttctgatcagatagtcccctgtcaacagtagcaaatgtggtttcataaagtgggaagaaaacagcattttaaagtaactttttgggagactgatttgagtaataataaaactctggtctcccttaagaaaaaaaaacccttccacctttactgtgtcatttatatccccttagttccaaagttaattatcttatttctggatattgcttttataccaaagacccttatcagcccttgtaactacagtatctttagataagattcctctttccagtcagtcctgggaaatgtttctgttgcagagttaggcggtagatgggaagctgtgatggcagagctactatctaataaagtaacaactcgtagttgaggcttcctttctgtgtgtgatgggggatagggagttagctcccctgttgtctcagcactaagaaattgaggtcaggccaggcgcggtggttcactcctgttattccagcactggggtggccaaagtgggcagattgcttgcgctctggagctcgagaccagcctgggcaacatggtgaaaccctgtctctaccaaaaatacaaaaaaaaagctgggcatggtgggtgcatgcttgtcccagctactgaggaggctgaggtgggaggatcgcttgagcctgggaggtggaggttgcagtgagctgagatggcaccactgcaatccaaggtgggtgacagagacgctgtctcaaagaaattgaggtcaggcttccttcttacagaattatttttttctctgtagtttgcctcattttttcactttcttttcaatgagaatcgaagtgtttcttttgggtttttttttcccccttttaaaatcaacaggaaatgtttcaaaggagggatgaaatgcttcttggcttcctcagcacttggcaaggtagacctcatagcaaccttgaatatgactttctttagtctctagctatgcactattaagtgcctcttgggtagaggtagagttaagtattgagtgccagtcttgacgtccgtatgcctcagtttttctcatatataaaaagcagtatacatacctacccttttctacctcatcatttgttgtagggattaaatccgggagagcaattctgaagcctataaatttccttgaagagatctaagaacctattatgctcttggtgtaccaagctctggggtatatattcagaatacctcatgttctggaagctgagcactagctcccctttattgcctgcctggcagagcctgtttgattactgcaggcccttttacccatgcttctagtttaggtattctttctttgatatgaggctcttgaccagaaaagagttctttctctaggtgttctgagagaagtttgtaaatttggatagtacattctatcctgataaaaccaccttgctgtggtcttgatgtacaaaaaaaaattttttttttgagacagagtcttactctgtcacccaggctggaatgcagtggcgcaatcttggttcactgcaacccccgcctcctgggttcaagcgatcctcctgcctcaacctctcaagtagctgggactacaggcgtgcaccaccacacctggctaattttgtatttttagtagagacagggtttcaccatgttggccaggctggtcttgaactcctgacctcaggcgatctgcccgccttggcctcccaaagtactgggattacaggcgtgagcaactgctcctggcccaaaacatctctttctacatacacttgagtaggtggcataaaatgcactgtcaatatatagaaaacatgaaattttccaaatatttccgatcagagaatcacaagagcagcaaatgtggtttcatcaagtgggaagaaagcagcaatttaaaataactttttgggagactgaattgagtaataataaaacttcagtctttcgctaataataataataataataataataacaacaacttattgaatgtggccagctcactagatgaggaaagaggaaggcattttctgcattcttgcctagttttccttataagcaccactaagttaatagctctgtctttttggtgtttgcactatgtaatgcttttaatactttttaattgtgcttttttatgtattaaatgtttttccttttgcca

SEQ ID NO: 128026 - DNA, 1405 bp, Artificial Sequence
  derived and/or modified sequence
atgacatcattttccacctctgctcagtgttcaacatctgacagtgcttgcaggatctctcctggacaaatcaatcaggtacgaccaaaactgccgcttttgaagattttgcatgcagcaggtgcgcaaggtgaaatgttcactgttaaagaggtcatgcactatttaggtcagtacataatggtgaagcaactttatgatcagcaggagcagcatatggtatattgtggtggagatcttttgggagaactactgggacgtcagagcttctccgtgaaagacccaagccctctctatgatatgctaagaaagaatcttgtcactttagccactgctactacagcaaagtgcagaggaaagttccacttccagaaaaagaactacagaagacgatatccccacactgcctacctcagagcataaatgcatacattctagagaagatgaagacttaattgaaaatttagcccaagatgaaacatctaggctggaccttggatttgaggagtgggatgtagctggcctgccttggtggtttttaggaaacttgagaagcaactatacacctagaagtaatggctcaactgatttacagacaaatcaggatgtgggtactgccattgtttcagatactacagatgacttgtggtttttgaatgagtcagtatcagagcagttaggtgttggaataaaagttgaagctgctgatactgaacaaacaagtgaagaagtagggaaagtaagtgacaaaaaggtgattgaagtgggaaaaaatgatgacctggaggactctaagtccttaagtgatgataccgatgtagaggttacctctgaggatgagtggcagtgtactgaatgcaagaaatttaactctccaagcaagaggtactgttttcgttgttgggccttgaggaaggattggtattcagattgttcaaagttaacccattctctctccacgtctgatatcactgccatacctgaaaaggaaaatgaaggaaatgatgtccctgattgtcgaagaaccatttcggctcctgtcgttagacctaaagatgcgtatataaagaaagaaaactccaaactttttgatccctgcaactcagtggaattcttggatttggctcacagttctgaaagccaagagaccatctcaagcatgggagaacagttagataacctttctgaacagagaacagatacagaaaacatggaggattgccagaatctcttgaagccatgtagcttatgtgagaaaagaccacgagacgggaacattattcatggaaggacgggccatcttgtcacttgttttcactgtgccagaagactaaagaaggctggggcttcatgccctatttgcaagaaagagattcagctggttattaaggtttttatagcataa

SEQ ID NO: 128027 - DNA, 5592 bp, Artificial Sequence
  derived and/or modified sequence
attactcgccatttcaaaatgctgccgaggccctaggatctgtgactgccacccctccccccacccgggctcggcgggggagcgactcatggagctgccgtaagttttaccaacagactgcagtttcttcactaccaaaatgacatcattttccacctctgctcagtgttcaacatctgacagtgcttgcaggatctctcctggacaaatcaatcaggtacgaccaaaactgccgcttttgaagattttgcatgcagcaggtgcgcaaggtgaaatgttcactgttaaagaggtcatgcactatttaggtcagtacataatggtgaagcaactttatgatcagcaggagcagcatatggtatattgtggtggagatcttttgggagaactactgggacgtcagagcttctccgtgaaagacccaagccctctctatgatatgctaagaaagaatcttgtcactttagccactgctactacaggatcacagtatggatattccaagtcaagaccaactgaagcaaagtgcagaggaaagttccacttccagaaaaagaactacagaagacgatatccccacactgcctacctcagagcataaatgcatacattctagagaagatgaagacttaattgaaaatttagcccaagatgaaacatctaggctggaccttggatttgaggagtgggatgtagctggcctgccttggtggtttttaggaaacttgagaagcaactatacacctagaagtaatggctcaactgatttacagacaaatcaggatgtgggtactgccattgtttcagatactacagatgacttgtggtttttgaatgagtcagtatcagagcagttaggtgttggaataaaagttgaagctgctgatactgaacaaacaagtgaagaagtagggaaagtaagtgacaaaaaggtgattgaagtgggaaaaaatgatgacctggaggactctaagtccttaagtgatgataccgatgtagaggttacctctgaggatgagtggcagtgtactgaatgcaagaaatttaactctccaagcaagaggtactgttttcgttgttgggccttgaggaaggattggtattcagattgttcaaagttaacccattctctctccacgtctgatatcactgccatacctgaaaaggaaaatgaaggaaatgatgtccctgattgtcgaagaaccatttcggctcctgtcgttagacctaaagatgcgtatataaagaaagaaaactccaaactttttgatccctgcaactcagtggaattcttggatttggctcacagttctgaaagccaagagaccatctcaagcatgggagaacagttagataacctttctgaacagagaacagatacagaaaacatggaggattgccagaatctcttgaagccatgtagcttatgtgagaaaagaccacgagacgggaacattattcatggaaggacgggccatcttgtcacttgttttcactgtgccagaagactaaagaaggctggggcttcatgccctatttgcaagaaagagattcagctggttattaaggtttttatagcataatggtagtacgaacataaaaatgcatttattccgttcacttaccacattatttgaaaatcaatcctttatttaattttatttccaacctgtcagagaatgttcttaggcatcaaaatccaaggtagctgtaagaaaaatactggagctaacaatgaagaacagaagtaatctgattagtcaaattattaagtgccatggattactttatgcagcagtcaggtacatagttaggtgaacccaaaagaaaaactcttgaaaacaagagatttcttccatgcacatttacaatattgaggtataattaacatgataaagtgtttccttctaacgagttgtagaaatctgagtaaccacccaaaaaagcaatagaatgtttctgtcaccccaaaacactcccttctgcccctcttcagacagtccttcagctatttcatggctctcaccctagttttttttttttttgcacttttttttttccgggggtataggggaggtgtggggcgacagggtctgtcttgttctgtctcccaggctgaagtgcagtgcagtggtatgatcatggctcactgcagccttggtttcctgggcataagtggtcttcccacttcagcctcctgagtagctgagactatagactagcataaccacactggctaattttttgtggagatgaagtctcactatgttgcccaggctggtctcgaactcctgggctcaaacaatcctcccgcctcagccttccaaattgctgggattatagtcatgaggcacctagtctggcccttttgcaagactttaatctgaaatctaaatttttaaaatttaagtacttacaaaggatatactatccaacatattgcatattatatatgtgctttaaagtttttttttttttttgagagacggtctcactttgtcatccaagctggagtgcagtggtgcaaacacggcccacctcctgggctcaagtgatcctccagcctcagcttccctcacaggcattcactatcactcccagctaattaaaataatttgtagacggtgtctcgttatgttgcccaggctggtctcgaactcctgggtttaagtgattcccccgcctcagcctcccaaagtgttgggcttacagccttgagccactatgcttggctcaaagatatttttatgaaagccctgggactatagatttagctgattaaatttatagaaaaagtcctgtcatataaactggcaaagtctgttcttaatttaattagccaaatcagacttaacttccgtcagaacatgtcttggttttaattcagataaacacacaaacatacttctctggcacagccttcagaagcatcagtttttgttttgttttgttttgttttttgagacagggtcttgctctgtcgcccaggctggagtgcactggcacaatcacagttcactgcagcctcgacctcccagatccaagcaatcctcccacctaagcctcccaagtagctgggtctataggcgcgtgccaccaccatgcccagctgaattttgtattttttgtacagacagcattttgccatgttgcccaggctggtcccaaacttctagcctcaagcaaccctcctgcctcagcctctcaaagtgctaggattgcagtcctgagctactgccccctaccctctttgcgtcttaggagtcatttagattttttttgatccttttgtttagtgcctctggagctgcttacaccaaggcaatacgccttgatatactggatggttgagaggcagcctctttttttttttttttttttttttttttttggaggatagggagtatggctgttgtgaaaagggaggtaaagagaaatggtagatctgaagaggcctcatcagagcacatattttaggacaacacatatggaaattggacatctttaagttggtttccatagagctatgcatgtatccttacccccatgggaaaatgttggtgtgttctcaagggtatgcatgtgtcattttgaagaccaaggccctagaattgtcaaacttaaggatcataaaaatcatgagggttgcttgttaaaaatgtccaaacgtgcagagactgatctttgagatctggaccaggaatttgcatttgaacaagtgttcctggaatctctatgcaagttttatacagaacatacttttggaatccttgccctagacaggggtgtccaatcttttggcttccctggtccacaatggaagaagaattgtcttggaccacacataaaatacactaacactaacaatagctgatgagctaaaaaaaaaaaaaaaaaaaatcgtggaccgggcgtagtggctcacgcctggtctcgaactcctgacctcatgatccacacacctcggcctcccaaagtcctgcgattacaggcgtgagctaccgcacccagccaagttgtaatttttaataaaacttaagaagtaaacattttacttatgtttataggtatttgatcctaaatttgacacatcattgcccatgaaagaatcctcttaggctgctcagcttcactcttcctgcttgcccaccggggtttttcactgcttctgttagcactaagtacttagacgatcctaagatatgtgcttgagccgaatttcatctttacttgtaggaaactttaaactatttcttttcttttcttttttttttttttttacttgagatggagttttgctcttgtcgcccaggctggagtgcagtggagtgatctcggctcactgcaacctctgcctcccgggttcaaatgattctcctgcctcagcctcccaagtagctgggattacaggtgtgcaccaccatgtctggctaattttgtatttttagtagagatggtttcaccatgttggtcaggctggtctcgaactcctgacctcaggtcatccacccacctcagcctcgcaaagtgctgagattacaggcatgagccacagcgcccagcttaaactattttcttggtctgtttttgattttcttttttccttgccactgcggtacagattttttttactcactgccactaaactaaagcaaggcatagtttatatgtgaagtgttcagagtttactgctataaggaaacttccaaatactgacatttaccttttagctgtagttattgggaccatgtgctctggttttctggagactgccaaattgctcccatttttctgcatcccacctggtttctttctgcatgtcccctttcactttcaaacctcttcatttggatgttaaattatatggtcacctagttataggtaagccttgttcgagttgatatcttgattgtgaggaaggatctgtgtcattggagcttgtttctgctgcaacgtgctgtagactatgaataatgaaatcacaccacattaccatcagatttcttgttttagttgtcaaattaatatttatgattgttatcttgggcgaaaagttcagagcagagatgacaaatcattagaacaacgatgaatttcagtattacggctaaaaagttcttctgtctgaatattaactcactctccttccagtgtacttcacagtaattggtatgcttttttatttaatgcttaaatcaaactttataaaaatcttagaccagatctttaatatggtatgccatttccccagtctaccaatggaatagtatgggtttctaatcctaggcttgtacaatggattggagttgagccatgccagcctccacactgccactaacttctgtaatgtaagattgagtcactgccaagcatttgaaatatgcagttgtgttttaattataatttatgtatagttagatgtatgtagtgcattgtgtggtattatttggtttgtaagaatttatttttaagggtcaaggtcatttgtaacattttgtgtgtgtcaattcaatgcaatgttggctgccttttgaagtctttgatatattggtgaatattcttctgatctataatacaaagctatgtaatgtt

SEQ ID NO: 128028 - DNA, 1473 bp, Artificial Sequence
  derived and/or modified sequence
atgaccagcttcagcaccagcgcccagtgcagcaccagcgacagcgcctgtagaatctcacctgggcagattaaccaggtccggccaaagttaccactattaaagatcctgcatgcagccggcgcccagggcgagatgtttaccgtgaaagaggttatgcattatctgggtcaatacattatggtaaaacagctctacgaccagcaggaacaacatatggtctattgcggaggggacctgctgggggagctcctgggcaggcagtcattctcagtgaaagacccaagtcccctctacgatatgctgcggaaaaatctggtgactttggcaacagccacaaccgatgcagctcagactctcgcactcgctcaagaccactcaatggatataccttcccaggatcagctgaaacagagcgcggaagaatccagcacttcccgtaaaaggacgactgaggatgacatccccacactgccaacctcagaacacaaatgcatccattccagggaagacgaggatctcatagaaaacctggcccaggacgagacttccaggttggatttgggtttcgaagaatgggacgtggcaggcctgccttggtggtttctagggaatctgcgctcaaattacacacctaggagcaacggcagcaccgaccttcagacaaaccaggatgtgggcactgccattgtgagcgatacaacagatgacctttggttcctgaacgaatcagtgtcagagcagttgggggtgggaattaaggtagaggcagcggatacagagcagacatcggaagaagttggaaaggtgtccgacaaaaaagtgattgaggtgggaaaaaacgacgatctggaggactcaaaatcattgtctgatgatacagacgtcgaagtcacatctgaggatgaatggcaatgtaccgagtgcaaaaagttcaatagtccttccaaaagatattgtttcagatgctgggctctgcgcaaggattggtacagcgactgcagtaagctaacacactcattgtcaacctccgatattactgcgattccggaaaaggaaaacgaagggaatgatgttcctgactgcagaaggacaatatcggcccctgtggtgagaccaaaggatgcgtatatcaaaaaagaaaacagcaagctcttcgacccctgcaattcagtggaatttctcgacctagcacacagctcagagtcccaggaaacaatctcttcaatgggcgaacagttggataaccttagcgagcagaggaccgacacagaaaacatggaggactgtcaaaacttgttaaagccatgttctttgtgcgaaaaacggccccgggatggaaacattatacacggtcgcacagggcatctggtcacctgctttcactgcgctagacggttaaaaaaagccggcgccagctgtcccatttgcaagaaagaaatacaattggtgataaaagtcttcattgcctag

SEQ ID NO: 128029 - DNA, 1473 bp, Artificial Sequence
  derived and/or modified sequence
atgaccagtttcagcacttctgcacagtgttctacctccgactcagcatgccggatttccccagggcagatcaatcaggtgaggcctaagctgccgctgctaaagatcttgcatgctgctggcgcacaaggcgagatgttcacggtcaaggaggtcatgcattacctcggccagtacataatggtcaagcagctctatgaccagcaggagcagcacatggtctattgtggaggagacttgctcggggaactgctgggacgacaatccttttctgttaaggatcctagtcctttatacgacatgctgcggaagaacttggtgaccctggccacggcgactaccgatgcggctcagaccctggccctcgcgcaagatcacagcatggacatacccagtcaagaccagttgaaacagtccgccgaggagtctagcacgagcagaaaacgtacaactgaagatgatattccaactctgccaacctccgaacacaagtgtattcactcccgggaagatgaggaccttatcgagaacttggcccaggatgagacctctcggttggatctgggcttcgaagaatgggacgttgccggactgccttggtggtttctgggcaacctgcgctctaattacactccccgttctaatggatcgactgacctgcagaccaatcaggacgtcggcacagccatcgtgagcgacaccacagatgatctgtggtttctaaatgagtccgtatctgagcagctcggcgtcggtatcaaggtcgaggctgccgataccgaacagacatccgaagaggttggcaaagtttccgataaaaaggtgattgaggtgggcaagaatgatgacctcgaggattctaagtcactgtctgatgacactgacgtggaagtgaccagtgaggacgagtggcaatgcacggaatgcaaaaaattcaattccccctccaagcggtattgtttccgatgctgggctctgcgaaaggattggtattccgattgttcgaaacttactcacagcctatcgacatcagatattacagctatccccgagaaagagaacgaagggaatgacgtccccgactgcaggcgaactatttccgccccagtggtccggccaaaagacgcttatattaaaaaagaaaatagcaagttgttcgatccatgcaattccgtggaatttctcgatctagcccacagctcagagagtcaagaaaccatctccagcatgggtgaacaactggacaacctgtcagagcaaagaacagatacggaaaatatggaagactgtcagaatcttctgaaaccctgcagcttatgcgaaaagaggcctagggatggcaatatcatccatggtagaacgggccacctcgttacctgctttcattgcgccagaaggcttaagaaagcgggagcctcctgtccaatatgtaaaaaagaaattcagcttgttataaaagtcttcatcgcctag

SEQ ID NO: 128030 - protein, 630 aa, Artificial Sequence
  derived and/or modified sequence
MELQPPEASIAVVSIPRQLPGSHSEAGVQGLSAGDDSELGSHCVAQTGLELLASGDPLPSASQNAEMIETGSDCVTQAGLQLLASSDPPALASKNAEVTGTMSQDTEVDMKEVELNELEPEKQPMNAASGAAMSLAGAEKNGLVKIKVAEDEAEAAAAAKFTGLSKEELLKVAGSPGWVRTRWALLLLFWLGWLGMLAGAVVIIVRAPRCRELPAQKWWHTGALYRIGDLQAFQGHGAGNLAGLKGRLDYLSSLKVKGLVLGPIHKNQKDDVAQTDLLQIDPNFGSKEDFDSLLQSAKKKSIRVILDLTPNYRGENSWFSTQVDTVATKVKDALEFWLQAGVDGFQVRDIENLKDASSFLAEWQNITKGFSEDRLLIAGTNSSDLQQILSLLESNKDLLLTSSYLSDSGSTGEHTKSLVTQYLNATGNRWCSWSLSQARLLTSFLPAQLLRLYQLMLFTLPGTPVFSYGDEIGLDAAALPGQPMEAPVMLWDESSFPDIPGAVSANMTVKGQSEDPGSLLSLFRRLSDQRSKERSLLHGDFHAFSAGPGLFSYIRHWDQNERFLVVLNFGDVGLSAGLQASDLPASASLPAKADLLLSTQPGREEGSPLELERLKLEPHEGLLLRFPYAA

SEQ ID NO: 128031 - DNA, 1893 bp, Artificial Sequence
  derived and/or modified sequence
atggagctccaaccacccgaggctagcatcgccgtggtgtcgatcccgcgtcagcttcccggctcacacagcgaagcaggcgtgcaggggctttccgccggagatgactccgagttgggaagccattgtgtcgcccagacaggattggagctgttggcctcaggtgatccacttccttccgcatcgcagaatgctgagatgatcgagactggcagcgattgtgttacccaagcaggactccaactgctcgcctcctccgacccaccggccctggcctccaaaaacgccgaggtgactggaactatgagccaggatacagaagttgatatgaaagaggtagagttaaacgagcttgagcctgagaagcagcctatgaacgctgcttctggagccgccatgtctctcgcgggggccgaaaagaatggcctcgtcaagattaaagttgctgaggatgaagctgaagctgctgcagcagccaagttcaccgggctgagcaaggaggaactgctaaaggttgccggaagtcccggctgggtgcgcacacggtgggccttattactgctcttttggttaggctggctgggaatgctggcgggcgcagtggtcatcattgtaagggcacctcgatgcagagagttacccgcccagaagtggtggcatactggcgccctttaccggatcggagatctgcaggcttttcaaggacatggcgcgggtaacctggcagggcttaaggggcgcttggactatcttagcagcctcaaggtcaagggactcgttctgggccccatccataagaaccaaaaagatgatgttgctcagacggatctgttgcagattgacccgaattttggctccaaagaagacttcgatagcctgcttcaaagcgctaaaaagaaatccatcagagtcattctcgatttgacaccgaactatcggggcgaaaattcttggttcagcacccaggtcgacactgtagccacaaaggtaaaggacgcactggaattttggcttcaggctggtgttgacgggttccaagtgcgggatatcgagaacctgaaagacgcctccagctttctggccgagtggcaaaacatcacaaaaggctttagtgaagacagattgctgattgcaggaacaaacagttccgatctacagcagattctgagtctgctggaatctaacaaggacctgctgctgacgtctagttatctttccgactccggatcaaccggggaacacactaagtccttagtgacacaatacttaaatgccacaggcaatcgctggtgtagctggtccctgtcccaagctcgcctgctcacttcatttctcccagctcagctcctgaggctgtatcaactgatgctctttactctccctggcacaccagtattcagctacggcgatgaaatcgggctcgacgcagccgcattgccaggccaacccatggaggctcctgtgatgctgtgggatgaaagctccttccctgacattccgggggccgtaagcgcgaatatgactgtgaagggccaatcagaagatcccgggtctctcttgagtttgttccggaggctgtcggatcagcgaagcaaggaaaggtctttactgcacggcgacttccatgcgttcagtgcagggcccggtctgttctcctatattcgccattgggatcagaatgagagatttctcgttgtactcaacttcggcgatgtcggcctcagcgcaggactccaggcatctgatctacctgcctcggcgtctctgcctgctaaagccgacctgctgctgtctacccagccgggtcgggaggagggctctcctttagaattagagagactcaaacttgaaccccacgagggcctgctcctgcgctttccctatgccgcttag

SEQ ID NO: 128032 - DNA, 1893 bp, Artificial Sequence
  derived and/or modified sequence
atggagctgcagcccccagaggccagcattgctgtggtgtccatcccccggcagctgcccggcagccacagcgaggccggcgtgcagggcctgtctgctggagatgattctgagctgggcagccactgtgtggcccagacaggcctggagctgctggccagcggggaccccctgcccagcgccagccagaatgctgagatgattgagaccggcagtgactgtgtgacccaggccggcctgcagctgctggccagcagtgaccccccagccctggccagcaagaatgctgaggtgacaggcaccatgagccaggacacagaggtggacatgaaggaggtggagctgaatgagctggagcctgagaagcagcccatgaatgctgccagcggggccgccatgagcctggccggggctgagaagaatggcctggtgaagatcaaggtggccgaggatgaagctgaggccgctgctgctgccaagttcaccggcctgagcaaggaggagctgctgaaggtggccggcagccctggctgggtgaggacccgctgggccctgctgctgctcttctggctgggctggctgggcatgctggccggggctgtggtgatcatcgtgcgggccccccgctgccgggagctgcctgcccagaagtggtggcacactggagccctgtacagaattggagacctgcaggccttccagggccacggggccggcaacctggccggcctgaagggccgcctggactacctgagcagcctgaaggtgaagggcctggtgctgggccccatccacaagaaccagaaggatgatgtggcccagacagacctgctgcagattgaccccaactttggcagcaaggaggactttgacagcctgctgcagagcgccaagaagaagagcatccgggtcatcctggacctgacccccaactacagaggagaaaattcctggttcagcacccaggtggacacagtggccaccaaggtgaaggatgccctggagttctggctgcaggccggcgtggatggcttccaggtgcgggacatcgagaacctgaaggatgccagcagcttcctggccgagtggcagaacatcaccaagggcttcagcgaggaccggctgctgattgctggcaccaacagcagtgacctgcagcagatcctgagcctgctggagagcaacaaggacctgctgctgaccagcagctacctgagtgacagcggcagcactggagagcacaccaagagcctggtgacccagtacctgaatgccaccggcaaccgctggtgctcctggagcctgagccaggcccggctgctgaccagcttcctgcctgcccagctgctgcggctgtaccagctgatgctgttcaccctgcccggcacccctgtgttctcctatggagatgagatcggcctggatgctgctgccctgcccggccagcccatggaggcccctgtgatgctgtgggatgagagcagcttcccagacatccctggagctgtgtctgccaacatgacagtgaagggccagagcgaggaccccggcagcctgctgagcctcttccggcggctgagtgaccagaggagcaaggagaggagcctgctgcacggggacttccacgccttctctgctggccctggcctcttctcctacatccgccactgggaccagaatgaacgcttcctggtggtgctgaactttggagatgtgggcctgtctgctggcctgcaggccagtgacctgcctgccagcgccagcctgcctgccaaggctgacctgctgctgagcacccagcccggccgggaggagggcagccccctggagctggagcggctgaagctggagccccatgagggcctgctgctgcgcttcccctatgctgcctag

SEQ ID NO: 128033 - DNA, 1893 bp, Artificial Sequence
  derived and/or modified sequence
atggagctgcagccccccgaggccagcatcgccgtggtgagcatcccccgacagctcccggggtcacactccgaagctggcgtgcagggcctcagcgctggagatgatagtgaacttggcagccactgtgtcgcacagacagggctggaactgcttgcaagcggtgacccgctaccatccgcgtcccagaatgctgaaatgattgagacaggttcagattgtgtcacccaggctggtctgcagctactggcctcctctgatccacctgcactcgccagtaaaaatgccgaggtgaccggcactatgtcacaggatacggaagtcgacatgaaagaagttgaactgaacgagttagagcctgagaaacaaccaatgaatgcagcatctggagccgcaatgagtctggctggagccgagaagaatggacttgtgaaaatcaaggtcgcagaagacgaggctgaggccgcagctgccgcaaagtttaccgggttgagtaaagaggagctgctgaaagtggcgggcagccccggctgggtccggaccaggtgggcccttctcctcctcttttggctgggatggctcggcatgctggccggggctgtggtgatcatcgtcagggctcctcggtgccgagaactgcctgctcagaagtggtggcacaccggggcactgtacagaattggcgatctccaggcctttcagggtcacggagccggaaatctcgctggcttgaagggccgattggattacttgtcaagtctgaaggtgaaagggcttgttctgggtcctatacacaagaatcaaaaggatgatgtcgcccagacagacctactgcagatcgatcccaacttcggaagcaaagaggactttgacagcctgctgcaatctgctaagaaaaagtctatacgagtcattctggacttaactcccaactaccgaggcgagaattcatggttttccacacaggtggacactgtcgccacgaaggtgaaagacgcgctcgaattctggctgcaggcaggcgtggacggatttcaggtgcgtgacatcgagaatctgaaggatgcttcaagcttcctggcagagtggcaaaacattactaaggggttctccgaggacaggctccttatcgctggcacgaacagctcagacttgcagcagatactgtcactcctagaatcaaataaggacctccttctcacctctagttatttgtccgacagcggatcaaccggggagcacacaaaatcgctggtgacgcagtacttgaacgccacggggaacaggtggtgtagctggtcactgtcacaggctcggttactgaccagcttcctgccagcccagctgctgcgcttataccaactcatgctgttcacgctgccaggcactcccgtatttagctatggagatgaaattggcctggatgctgctgctttaccaggccagccgatggaggcacccgtcatgctatgggacgagagctcctttccggatatcccgggcgcagtaagtgctaacatgaccgtgaagggacagagcgaggatccagggagcctgttaagcctgtttagacggctgagcgaccaacgatctaaggagcgtagcctgcttcacggggattttcacgccttttcagccgggcccggcctgttcagctacattaggcactgggaccaaaatgaaagattcttggtcgtgctgaatttcggtgacgttgggttgtcggctggactccaggcatccgatctacctgccagtgcctccctgcctgctaaggccgatctactgctctcaactcagcccggccgggaggagggaagtccgcttgaattggagaggttaaagttggagccccatgaggggctgcttctgcgctttccatatgcagcatag

SEQ ID NO: 128034 - DNA, 1893 bp, Artificial Sequence
  derived and/or modified sequence
atggaattgcagccccctgaagctagtattgccgtggtgtcaattcctcgccagctgcctggaagtcactcagaggccggtgttcagggactgtccgctggcgacgatagtgagctgggaagccattgtgttgcccaaactggactggagttgcttgccagcggcgacccacttccatcagctagtcagaatgccgagatgatagaaacagggtcggattgcgtcacacaggccggactccagttgttggcgtcttcggaccctcccgctctggcttctaagaatgctgaagtgacaggaaccatgagtcaggacacggaagtggatatgaaagaagtggagttgaatgaattggaacctgaaaagcaaccaatgaatgcagcctctggcgctgctatgtccctggccggagcagaaaagaacggactagttaaaatcaaggtggcagaagatgaggctgaagccgctgccgcagcaaagtttaccggcttgagtaaagaggagctgctgaaagtggctggctcacccggatgggttcgaacgagatgggcccttctccttttgttttggctggggtggttaggtatgctcgccggagcagtggtgatcatagtgagagcgcctcgatgtagggaactcccggctcagaaatggtggcatactggggcactgtacagaatcggcgacttgcaggcttttcagggtcacggagccggtaacttggcgggacttaagggacgtctcgactatcttagctctctgaaagtgaaaggtttagtcctcggccctatccataagaaccagaaggacgatgtggctcagacggacctacttcagatagaccctaacttcggcagcaaggaggactttgatagcctgctgcaaagcgctaaaaagaagtctatcagggtgattttggatctgacgcccaactaccggggtgaaaactcgtggttttctacacaggtagacactgtcgccacgaaagtgaaggatgccctcgaattttggctgcaggcaggagtggatgggtttcaggtcagggacattgagaatcttaaggatgctagctcatttctcgcagaatggcaaaatataactaaaggattcagcgaggacaggctgcttatagcgggaactaattcctctgacttgcagcagatactgtcgctcctagaatccaacaaggacttactcctaacttcaagctacctgtcagactccgggagcaccggcgagcatacaaaatcactagtcacacaatacctgaacgccaccggaaatcgctggtgttcctggagcctcagtcaagctcggctgctgacatctttcctgcctgctcagctactgaggctatatcagttgatgctgttcactctgccagggactcccgttttctcgtatggagacgagataggccttgatgctgctgctctcccagggcagccgatggaggctccggtgatgttatgggacgagtcatcattcccggatattcccggtgccgtaagtgcaaatatgaccgtaaaaggtcagtcggaggaccccggtagcctgcttagtctgttccgcaggttgagcgatcagaggtctaaggaacggagtttgttgcatggcgatttccatgccttctcagcaggccctggcctgtttagttatatccgccactgggaccagaacgagcgatttctggtagtgctcaacttcggcgatgtaggcctgagcgcaggcctgcaggcgtctgacctccctgcctctgcttcattacccgctaaggcggacttgctgctgtcaacgcaacccggacgagaagaggggagtccactcgagctcgagcgcttaaagctcgagccccacgaggggttgctgctccgttttccatacgccgcttag

SEQ ID NO: 128035 - DNA, 2161 bp, Artificial Sequence
  derived and/or modified sequence
accgaccgcattgcggcttggttttctcacccagtgcatgtggcaggagcggtgagatcactgcctcacggcgatcctggactgacggtcacgactgcctaccctctaaccctgttctgagctgccccttgcccacacaccccaaacctgtgtgcaggatccgcctccatggagctacagcctcctgaagcctcgatcgccgtcgtgtcgattccgcgccagttgcctggctcacattcggaggctggtgtccagggtctcagcgcgggggacgactcagagttggggtctcactgtgttgcccagactggtctcgaactcttggcctcaggtgatcctcttccctcagcttcccagaatgccgagatgatagagacggggtctgactgtgttacccaggctggtcttcaactcttggcctcaagtgatcctcctgccttagcttccaagaatgctgaggttacaggcaccatgagccaggacaccgaggtggatatgaaggaggtggagctgaatgagttagagcccgagaagcagccgatgaacgcggcgtctggggcggccatgtccctggcgggagccgagaagaatggtctggtgaagatcaaggtggcggaagacgaggcggaggcggcagccgcggctaagttcacgggcctgtccaaggaggagctgctgaaggtggcaggcagccccggctgggtacgcacccgctgggcactgctgctgctcttctggctcggctggctcggcatgcttgctggtgccgtggtcataatcgtgcgagcgccgcgttgtcgcgagctaccggcgcagaagtggtggcacacgggcgccctctaccgcatcggcgaccttcaggccttccagggccacggcgcgggcaacctggcgggtctgaaggggcgtctcgattacctgagctctctgaaggtgaagggccttgtgctgggtccaattcacaagaaccagaaggatgatgtcgctcagactgacttgctgcagatcgaccccaattttggctccaaggaagattttgacagtctcttgcaatcggctaaaaaaaagagcatccgtgtcattctggaccttactcccaactaccggggtgagaactcgtggttctccactcaggttgacactgtggccaccaaggtgaaggatgctctggagttttggctgcaagctggcgtggatgggttccaggttcgggacatagagaatctgaaggatgcatcctcattcttggctgagtggcaaaatatcaccaagggcttcagtgaagacaggctcttgattgcggggactaactcctccgaccttcagcagatcctgagcctactcgaatccaacaaagacttgctgttgactagctcatacctgtctgattctggttctactggggagcatacaaaatccctagtcacacagtatttgaatgccactggcaatcgctggtgcagctggagtttgtctcaggcaaggctcctgacttccttcttgccggctcaacttctccgactctaccagctgatgctcttcaccctgccagggacccctgttttcagctacggggatgagattggcctggatgcagctgcccttcctggacagcctatggaggctccagtcatgctgtgggatgagtccagcttccctgacatcccaggggctgtaagtgccaacatgactgtgaagggccagagtgaagaccctggctccctcctttccttgttccggcggctgagtgaccagcggagtaaggagcgctccctactgcatggggacttccacgcgttctccgctgggcctggactcttctcctatatccgccactgggaccagaatgagcgttttctggtagtgcttaactttggggatgtgggcctctcggctggactgcaggcctccgacctgcctgccagcgccagcctgccagccaaggctgacctcctgctcagcacccagccaggccgtgaggagggctcccctcttgagctggaacgcctgaaactggagcctcacgaagggctgctgctccgcttcccctacgcggcctgacttcagcctgacatggacccactacccttctcctttccttcccaggccctttggcttctgatttttctcttttttaaaaacaaacaaacaaactgttgca

SEQ ID NO: 128036 - DNA, 1893 bp, Artificial Sequence
  derived and/or modified sequence
atggagctgcagccccccgaggccagcatcgccgtggtgagcatccccagacagctgcccggcagccacagcgaggccggcgtgcagggcctgagcgccggcgacgacagcgagctgggcagccactgcgtggcccagaccggcctggagctgctggccagcggcgaccccctgcccagcgccagccagaacgccgagatgatcgagaccggcagcgactgcgtgacccaggccggcctgcagctgctggccagcagcgacccccccgccctggccagcaagaacgccgaggtgaccggcaccatgagccaggacaccgaggtggacatgaaggaggtggagctgaacgagctggagcccgagaagcagcccatgaacgccgccagcggcgccgccatgagcctggccggcgccgagaagaacggcctggtgaagatcaaggtggccgaggacgaggccgaggccgccgccgccgccaagttcaccggcctgagcaaggaggagctgctgaaggtggccggcagccccggctgggtgagaaccagatgggccctgctgctgctgttctggctgggctggctgggcatgctggccggcgccgtggtgatcatcgtgagagcccccagatgcagagagctgcccgcccagaagtggtggcacaccggcgccctgtacagaatcggcgacctgcaggccttccagggccacggcgccggcaacctggccggcctgaagggcagactggactacctgagcagcctgaaggtgaagggcctggtgctgggccccatccacaagaaccagaaggacgacgtggcccagaccgacctgctgcagatcgaccccaacttcggcagcaaggaggacttcgacagcctgctgcagagcgccaagaagaagagcatcagagtgatcctggacctgacccccaactacagaggcgagaacagctggttcagcacccaggtggacaccgtggccaccaaggtgaaggacgccctggagttctggctgcaggccggcgtggacggcttccaggtgagagacatcgagaacctgaaggacgccagcagcttcctggccgagtggcagaacatcaccaagggcttcagcgaggacagactgctgatcgccggcaccaacagcagcgacctgcagcagatcctgagcctgctggagagcaacaaggacctgctgctgaccagcagctacctgagcgacagcggcagcaccggcgagcacaccaagagcctggtgacccagtacctgaacgccaccggcaacagatggtgcagctggagcctgagccaggccagactgctgaccagcttcctgcccgcccagctgctgagactgtaccagctgatgctgttcaccctgcccggcacccccgtgttcagctacggcgacgagatcggcctggacgccgccgccctgcccggccagcccatggaggcccccgtgatgctgtgggacgagagcagcttccccgacatccccggcgccgtgagcgccaacatgaccgtgaagggccagagcgaggaccccggcagcctgctgagcctgttcagaagactgagcgaccagagaagcaaggagagaagcctgctgcacggcgacttccacgccttcagcgccggccccggcctgttcagctacatcagacactgggaccagaacgagagattcctggtggtgctgaacttcggcgacgtgggcctgagcgccggcctgcaggccagcgacctgcccgccagcgccagcctgcccgccaaggccgacctgctgctgagcacccagcccggcagagaggagggcagccccctggagctggagagactgaagctggagccccacgagggcctgctgctgagattcccctacgccgcctag

SEQ ID NO: 128037 - protein, 572 aa, Artificial Sequence
  derived and/or modified sequence
MEPEAPRRRHTHQRGYLLTRNPHLNKDLAFTLEERQQLNIHGLLPPSFNSQEIQVLRVVKNFEHLNSDFDRYLLLMDLQDRNEKLFYRVLTSDIEKFMPIVYTPTVGLACQQYSLVFRKPRGLFITIHDRGHIASVLNAWPEDVIKAIVVTDGERILGLGDLGCNGMGIPVGKLALYTACGGMNPQECLPVILDVGTENEELLKDPLYIGLRQRRVRGSEYDDFLDEFMEAVSSKYGMNCLIQFEDFANVNAFRLLNKYRNQYCTFNDDIQGTASVAVAGLLAALRITKNKLSDQTILFQGAGEAALGIAHLIVMALEKEGLPKEKAIKKIWLVDSKGLIVKGRASLTQEKEKFAHEHEEMKNLEAIVQEIKPTALIGVAAIGGAFSEQILKDMAAFNERPIIFALSNPTSKAECSAEQCYKITKGRAIFASGSPFDPVTLPNGQTLYPGQGNNSYVFPGVALGVVACGLRQITDNIFLTTAEVIAQQVSDKHLEEGRLYPPLNTIRDVSLKIAEKIVKDAYQEKTATVYPEPQNKEAFVRSQMYSTDYDQILPDCYSWPEEVQKIQTKVDQ

SEQ ID NO: 128038 - protein, 406 aa, Artificial Sequence [sequence omitted]

SEQ ID NO: 128039 - DNA, 1719 bp, Artificial Sequence
  derived and/or modified sequence
atggagcctgaggctcctcggcgcagacacacacaccaacgagggtaccttctgacaaggaacccacatctgaacaaagatttggcctttacattagaggagcgacagcagctgaacattcacggtctcttgcctccttctttcaacagtcaggagatccaggtgttgcgcgtcgtgaagaatttcgaacatttgaacagcgattttgatagatacctcctgctgatggacctgcaggaccgcaatgagaaactgttttatagggtcctgacctcagatatagaaaagttcatgcctattgtttacacacccaccgttggcctcgcttgccagcagtattcgttggtgttccgcaagcctaggggactcttcatcacaatacacgatcgcggacatatcgctagtgtactcaacgcatggcccgaggacgtgatcaaagccattgtggtgactgacggggaacgaatcctcggactgggggacctcggttgtaatgggatggggatccccgtgggaaagttagcactatataccgcgtgtggagggatgaatccgcaagaatgtctgcctgttatccttgacgtcggcacagagaatgaggaacttttgaaagaccctctgtacattggcctacgacagcgcagggtgcgtggatccgaatacgacgactttctcgacgaattcatggaggctgtcagcagcaaatatggcatgaattgcttaattcagttcgaagatttcgcgaacgtaaatgcattcaggctgctgaacaagtacaggaaccagtattgtacgtttaatgacgatattcaaggcacggcctctgtcgccgtcgccgggctgctggcagctctgcgcataaccaaaaacaaactcagcgatcagaccattttgtttcagggagcaggggaggcggctctgggcatcgcccacctgattgtgatggcgcttgagaaagaaggtctgcccaaagagaaagccatcaaaaagatctggctcgtcgatagcaagggtctcattgtcaaaggccgggcatcactgactcaggagaaggagaagtttgcccacgaacatgaagaaatgaagaacttggaggccatcgtgcaagaaataaaaccaaccgcactcataggggtggcggccatcgggggagctttcagtgaacagattctcaaggacatggccgcgtttaacgaaagacctattatattcgctctgtccaaccctacttccaaggccgaatgttctgccgagcagtgttataagatcactaagggccgggcaattttcgcatccggatccccttttgaccccgttacactaccaaatggccagactctctaccccggccagggtaataactcctatgtgttccccggggttgccttgggggttgtcgcatgcggcttgcggcagatcacagataatatattcttgactacggccgaagtgatcgctcagcaggtgagcgataaacatttagaggaaggtcgtctctaccccccacttaacaccatccgagatgtgtcgctaaagatcgcagaaaaaatcgtcaaggatgcttaccaagaaaagacagcaacggtctacccagagccacagaataaggaggcatttgtgaggtcccagatgtactctactgactatgatcagatactccccgactgctactcctggccagaggaagtacagaagatccaaaccaaagtcgatcagtag

SEQ ID NO: 128040 - DNA, 1719 bp, Artificial Sequence
  derived and/or modified sequence
atggagcctgaggccccccggcggcggcacacccaccagaggggctacctgctgaccaggaacccccacctgaacaaggacctggccttcaccctggaggagcggcagcagctgaacatccacggcctgctgcccccatccttcaacagccaggagatccaggtgctgcgggtggtgaagaactttgagcacctgaacagcgactttgaccgctacctgctgctgatggacctgcaggacagaaatgagaagctgttctacagagtgctgaccagtgacatcgagaagttcatgcccatcgtgtacacccccaccgtgggcctggcctgccagcagtacagcctggtgttcaggaagccccggggcctcttcatcaccatccatgaccggggccacatcgcctctgtgctgaatgcctggccagaagatgtgatcaaggccatcgtggtgacagatggagagcgcatcctgggcctgggggacctgggctgcaatggcatgggcatccctgtgggcaagctggccctgtacacagcctgtggcggcatgaacccccaggagtgcctgcccgtcatcctggatgtgggcacagaaaatgaggagctgctgaaggaccccctgtacatcggcctgcggcagaggagagtgcggggctctgaatatgatgacttcctggatgagttcatggaggccgtgagcagcaaatatggcatgaactgcctgatccagtttgaagattttgccaacgtgaatgccttccggctgctgaacaagtacagaaaccagtactgcaccttcaatgatgacatccagggcacagcctctgtggccgtggccggcctgctggccgccctgcgcatcaccaagaacaagctgagtgaccagaccatcctcttccagggcgctggggaggccgccctgggcatcgcccacctgattgtgatggccctggagaaggagggcctgcccaaggagaaggccatcaagaagatctggctggtggacagcaagggcctcatcgtgaagggccgggccagcctgacccaggagaaggagaagtttgcccacgagcacgaggagatgaagaacctggaggccatcgtgcaggagatcaagcccacagccctgattggagtggccgccatcggcggggccttcagcgagcagatcctgaaggacatggccgccttcaatgaaagacccatcatctttgccctgagcaaccccaccagcaaggccgagtgcagcgctgagcagtgctacaagatcaccaagggccgggccatctttgccagcggcagcccctttgatcctgtgaccctgcccaacggccagaccctgtacccaggccagggcaacaacagctatgtgtttcctggggtggccctgggcgtggtggcctgtggcctgcggcagatcacagacaacatcttcctgaccacagctgaggtgattgcccagcaggtgtctgacaagcacctggaggagggccgcctgtacccacccctgaacaccatcagagatgtgtccctgaagattgctgagaagatcgtgaaggatgcctaccaggagaagacagccaccgtgtacccagagccccagaacaaggaggcctttgtgcgcagccagatgtacagcacagattatgaccagatcctgcctgactgctacagctggccagaggaggtgcagaagatccagaccaaggtggaccagtag

SEQ ID NO: 128041 - DNA, 3371 bp, Artificial Sequence
  derived and/or modified sequence
agtgcggccgccgccgccacagctgcagtcagcaccgtcaccccagcagcatccgccgcctgcaccgcgcgtgcggcccgccccggcctgaccccgccgccgaacccggcgccagccatggagcccgaagccccccgtcgccgccacacccatcagcgcggctacctgctgacacggaaccctcacctcaacaaggacttggcctttaccctggaagagagacagcaattgaacattcatggattgttgccaccttccttcaacagtcaggagatccaggttcttagagtagtaaaaaatttcgagcatctgaactctgactttgacaggtatcttctcttaatggatctccaagatagaaatgaaaaactcttttatagagtgctgacatctgacattgagaaattcatgcctattgtttatactcccactgtgggtctggcttgccaacaatatagtttggtgtttcggaagccaagaggtctctttattactatccacgatcgagggcatattgcttcagttctcaatgcatggccagaagatgtcatcaaggccattgtggtgactgatggagagcgtattcttggcttgggagaccttggctgtaatggaatgggcatccctgtgggtaaattggctctatatacagcttgcggagggatgaatcctcaagaatgtctgcctgtcattctggatgtgggaaccgaaaatgaggagttacttaaagatccactctacattggactacggcagagaagagtaagaggttctgaatatgatgattttttggacgaattcatggaggcagtttcttccaagtatggcatgaattgccttattcagtttgaagattttgccaatgtgaatgcatttcgtctcctgaacaagtatcgaaaccagtattgcacattcaatgatgatattcaaggaacagcatctgttgcagttgcaggtctccttgcagctcttcgaataaccaagaacaaactgtctgatcaaacaatactattccaaggagctggagaggctgccctagggattgcacacctgattgtgatggccttggaaaaagaaggtttaccaaaagagaaagccatcaaaaagatatggctggttgattcaaaaggattaatagttaagggacgtgcttccttaacacaagagaaagagaagtttgcccatgaacatgaagaaatgaagaacctagaagccattgttcaagaaataaaaccaactgccctcataggagttgctgcaattggtggtgcattctcagaacaaattctcaaagatatggctgccttcaatgaacggcctattatttttgctttgagtaatccaactagcaaagcagaatgttctgcagagcagtgctacaaaataaccaagggacgtgcaatttttgccagtggcagtccttttgatccagtcactcttccaaatggacagaccctatatcctggccaaggcaacaattcctatgtgttccctggagttgctcttggtgttgtggcgtgtggattgaggcagatcacagataatattttcctcactactgctgaggttatagctcagcaagtgtcagataaacacttggaagagggtcggctttatcctcctttgaataccattagagatgtttctctgaaaattgcagaaaagattgtgaaagatgcataccaagaaaagacagccacagtttatcctgaaccgcaaaacaaagaagcatttgtccgctcccagatgtatagtactgattatgaccagattctacctgattgttattcttggcctgaagaggtgcagaaaatacagaccaaagttgaccagtaggataatagcaaacatttctaactctattaatgaggtctttaaacctttcataatttttaaaggttggaatcttttataatgattcataagacacttagattaagattttactttaacagtctaaaaattgatagaagaatatcgatataaattgggataaacatcacatgagacaattttgcttcactttgccttctggttatttatggtttctgtctgaattattctgcctacgttctctttaaaagctgttgtacgtactacggagaaactcatcatttttatacaggacactaatgggaagaccaaaattactaataaattgacataaccaacattaaaactcataattattttgttgaccattttgttaaaatctacttttcaaaaaaaaaaagctagaaatgaatctaggcgtaggtgaacttttgctaagcagaaataacactactttgttgcctagagaaagataacttctcaagtatttttattccagtcctagatcatatatgttcttttgtgcaacggaattctaacagttctaagagaaagatcactgctgtttacagcgccttgtgcagccttagattttaatattcttttgtcattgttacatctcatagagtaaagctcttattaccttgatcctgagtcagaaatcccacctgaaatcaccttttttcccccttgatcaaacatcccatccttcagctaccatactgttgctacagggattttgtggactgtggcccctgtcctgaggttggcaccttcagttcagcacagcctgagcagtgagaaggtctgaaaggagagtatatagttaagatccttgagaaagggctgcctgaggaactgacctcttaaagatctcaggatctttaagacaacaagttaggttcctactggagttacctgccagaatggcctcttaattaactcaggtaatgaagagctaactgtgttataatcatcttgcttttgcctgaatttggagaaagtattataattaagttcccagtatcagaaatgtccttacataagattaaaatatcttgatgactaataccattctatgagaaagagtagttatatgcccagactgtattaatttactttagaaactaatgtttgaagtaatggaaaaaattttaaattataaagctaaggtgcaataacatttgctacttatttatagaattatttgaagaattttgtttttgaagtaatgctttaaggagtataagatattcaagataaattatactataaaatgattttattgaaagttgaaggttacacaaattgttttaggtatgagcagaagaggttaaggtatttctaaaggtaacatatagtcaagagtttcctcaaaatagttatttggagaagaatcagaatgtctgtgtatttcttgtctgtttctatgttgtcttatagctctgactaaatgtgtttacctatgcaaaagatttattaaagcatagaaaaggtgaatgaataaaaatataaaataattgtcctttttcttaaaa

SEQ ID NO: 128042 - DNA, 1928 bp, Artificial Sequence
  derived and/or modified sequence
ctttcccagtgcggccgccgccgccacagctgcagtcagcaccgtcaccccagcagcatccgccgcctgcaccgcgcgtgcggcccgccccggcctgaccccgccgccgaacccggcgccagccatggagcccgaagccccccgtcgccgccacacccatcagcgcggctacctgctgacacggaaccctcacctcaacaaggtatcttctcttaatggatctccaagatagaaatgaaaaactcttttatagagtgctgacatctgacattgagaaattcatgcctattgtttatactcccactgtgggtctggcttgccaacaatatagtttggtgtttcggaagccaagaggtctctttattactatccacgatcgagggcatattgcttcagttctcaatgcatggccagaagatgtcatcaaggccattgtggtgactgatggagagcgtattcttggcttgggagaccttggctgtaatggaatgggcatccctgtgggtaaattggctctatatacagcttgcggagggatgaatcctcaagaatgtctgcctgtcattctggatgtgggaaccgaaaatgaggagttacttaaagatccactctacattggactacggcagagaagagtaagaggttctgaatatgatgattttttggacgaattcatggaggcagtttcttccaagtatggcatgaattgccttattcagtttgaagattttgccaatgtgaatgcatttcgtctcctgaacaagtatcgaaaccagtattgcacattcaatgatgatattcaaggaacagcatctgttgcagttgcaggtctccttgcagctcttcgaataaccaagaacaaactgtctgatcaaacaatactattccaaggagctggagaggctgccctagggattgcacacctgattgtgatggccttggaaaaagaaggtttaccaaaagagaaagccatcaaaaagatatggctggttgattcaaaaggattaatagttaagggacgtgcttccttaacacaagagaaagagaagtttgcccatgaacatgaagaaatgaagaacctagaagccattgttcaagaaataaaaccaactgccctcataggagttgctgcaattggtggtgcattctcagaacaaattctcaaagatatggctgccttcaatgaacggcctattatttttgctttgagtaatccaactagcaaagcagaatgttctgcagagcagtgctacaaaataaccaagggacgtgcaatttttgccagtggcagtccttttgatccagtcactcttccaaatggacagaccctatatcctggccaaggcaacaattcctatgtgttccctggagttgctcttggtgttgtggcgtgtggattgaggcagatcacagataatattttcctcactactgctgaggttatagctcagcaagtgtcagataaacacttggaagagggtcggctttatcctcctttgaataccattagagatgtttctctgaaaattgcagaaaagattgtgaaagatgcataccaagaaaagacagccacagtttatcctgaaccgcaaaacaaagaagcatttgtccgctcccagatgtatagtactgattatgaccagattctacctgattgttattcttggcctgaagaggtgcagaaaatacagaccaaagttgaccagtaggataatagcaaacatttctaactctattaatgaggtctttaaacctttcataatttttaaaggttggaatcttttataatgattcataagacacttagattaagattttactttaacagtctaaaaattgatagaagaatatcgatataaattgggataaacatcacatgagacaattttgcttcactttgccttctggttatttatggtttctgtctg

SEQ ID NO: 128043 - DNA, 1719 bp, Artificial Sequence
  derived and/or modified sequence
atggagcccgaggccccccggcggcggcacacccaccagcggggctatctcctcactcgcaacccccatcttaacaaggatttagctttcacgcttgaggagcgacagcaactcaacatccacggcctactgcccccctctttcaactctcaggaaatccaggttttaagggtggtaaaaaacttcgaacatctaaactctgattttgaccgatacctgctgctgatggatctccaagatagaaatgaaaaactgttctaccgtgtgcttacttcagacattgagaagtttatgcccatcgtctacactcctactgtcgggctggcctgccagcaatatagtctcgtatttaggaaacctaggggcctgtttattacaattcacgaccgaggacacatagcatccgtccttaatgcatggcctgaggacgtgattaaagctatcgtggttaccgatggtgaacggattctgggcctgggggaccttggctgcaatggcatgggcatccctgttggtaagttggccctttataccgcttgtggaggcatgaaccctcaagagtgtcttccagtcattctagatgtgggtacagaaaatgaggagctcctgaaggatcccctgtacatcgggctgcggcagagaagagttaggggaagcgagtatgatgatttccttgatgaattcatggaggccgtctcgtcaaagtatgggatgaattgcctcattcaattcgaggactttgccaacgtcaatgcttttcggctgctgaacaagtaccgcaatcaatactgtacttttaacgacgacatacagggcacggctagtgtcgccgtagcaggcttgctggctgccctccgcatcacaaaaaataagctgagcgatcagactatcctctttcaaggcgctggtgaggcggcactcgggatcgctcacttaattgttatggcattagaaaaagaaggactgcctaaggaaaaggccatcaagaaaatctggctggtggatagcaagggtctcatcgtgaagggacgcgcctccctgacacaggagaaggagaagttcgcacacgaacacgaggaaatgaagaacctggaggctatagttcaagaaatcaaacccacggcattgataggagtcgcagccatcggcggcgccttctccgaacagatactgaaagacatggcagctttcaatgaaagacccatcatttttgccttgtccaatcctacctccaaagcagaatgttcggctgagcagtgttacaaaattaccaagggaagagcaatttttgcctccggtagtccgtttgacccagtgaccctgcctaatggccagaccttgtatcccgggcagggtaataatagttatgtgttccccggggtcgcgctgggcgtagtagcctgtggtctgaggcagatcaccgataacattttcctgacaactgccgaagttattgctcagcaggtgagtgataagcacctggaagaggggcggctttatcctcctttaaacaccatccgggatgtctccctgaagatagccgaaaaaatcgttaaagatgcttatcaagagaagaccgcgactgtataccctgaacctcaaaacaaagaggcttttgtccgcagccagatgtattccacagactatgaccaaatccttccggattgctatagctggccagaagaggttcagaagattcagacaaaggtcgaccaatag

SEQ ID NO: 128044 - DNA, 1719 bp, Artificial Sequence
  derived and/or modified sequence
atggagcccgaggcacctcgaaggaggcatacacatcaacgcggatacctactgacacgtaacccccacctgaacaaggatctggccttcactctggaagaacggcagcagctgaatattcacggccttctgcccccatctttcaactcacaggaaatacaggttttgagagtcgtgaaaaatttcgagcacctgaattcggacttcgacaggtacctcctcctgatggatctgcaggaccgcaacgaaaaactgttctaccgggttctcacttcagacatcgaaaaattcatgccgatagtgtatacccctacagtcggcctggcctgccagcagtactcattagtgttccgtaagccgaggggcctcttcatcaccattcatgaccgtgggcacattgcttcagtgttaaatgcttggcccgaggacgttatcaaggccatcgtggtcactgacggtgagcggatcctgggattgggagacctggggtgcaatggcatggggatccccgtgggaaaactggcgctctacactgcctgcggcggaatgaacccgcaggagtgcctgcctgtgatcttggatgttggaacagaaaatgaggagctacttaaagacccactgtacattggtcttaggcagcgcagagtccgcggaagcgaatacgatgatttcctggacgagttcatggaagcagtgagtagcaaatatgggatgaattgtttaatacagttcgaagattttgccaatgttaacgcttttcggctcctgaataaatatcgcaatcaatactgcacattcaacgatgacatacagggaacagcgagcgtagccgtcgctggactgctcgctgccttacgcattacaaagaataaactgtccgatcagaccatcctgttccagggagccggagaagcagcactgggcattgctcatttaatagtgatggctctggagaaagagggcctgcccaaggaaaaagccattaaaaaaatttggctggttgactctaaggggcttatcgtgaagggtcgggcttctttaacccaggagaaagaaaagttcgcccacgagcacgaagagatgaagaaccttgaggccattgtgcaagaaataaagcctaccgctctgattggcgtggccgctatcgggggagctttctctgagcaaatcttgaaagatatggcggcattcaacgagaggccaattatatttgcgttaagtaacccaacttcaaaagccgagtgctcagccgagcaatgttacaaaatcaccaaaggacgggctatttttgccagtggttctcccttcgatcctgtgaccctgccgaatgggcagactttgtacccgggtcagggaaacaactcatatgtgttccctggcgtggctcttggcgtggtggcatgtggtctccggcagatcaccgacaatatctttttgactactgcggaggtgatcgcacagcaggttagcgataaacatttagaggaaggacgactgtatccccctctcaataccattagagatgtctcattgaagatcgccgagaagatcgtcaaagacgcctaccaggagaaaaccgcaactgtatatccggagccacagaacaaggaggcttttgtgagatcacaaatgtacagtaccgattatgatcaaattctacctgactgctactcctggcccgaggaggtacagaagatccagactaaagttgatcagtag

SEQ ID NO: 128045 - DNA, 1719 bp, Artificial Sequence
  derived and/or modified sequence
atggagcccgaggcccccagaagaagacacacccaccagagaggctacctgctgaccagaaacccccacctgaacaaggacctggccttcaccctggaggagagacagcagctgaacatccacggcctgctgccccccagcttcaacagccaggagatccaggtgctgagagtggtgaagaacttcgagcacctgaacagcgacttcgacagatacctgctgctgatggacctgcaggacagaaacgagaagctgttctacagagtgctgaccagcgacatcgagaagttcatgcccatcgtgtacacccccaccgtgggcctggcctgccagcagtacagcctggtgttcagaaagcccagaggcctgttcatcaccatccacgacagaggccacatcgccagcgtgctgaacgcctggcccgaggacgtgatcaaggccatcgtggtgaccgacggcgagagaatcctgggcctgggcgacctgggctgcaacggcatgggcatccccgtgggcaagctggccctgtacaccgcctgcggcggcatgaacccccaggagtgcctgcccgtgatcctggacgtgggcaccgagaacgaggagctgctgaaggaccccctgtacatcggcctgagacagagaagagtgagaggcagcgagtacgacgacttcctggacgagttcatggaggccgtgagcagcaagtacggcatgaactgcctgatccagttcgaggacttcgccaacgtgaacgccttcagactgctgaacaagtacagaaaccagtactgcaccttcaacgacgacatccagggcaccgccagcgtggccgtggccggcctgctggccgccctgagaatcaccaagaacaagctgagcgaccagaccatcctgttccagggcgccggcgaggccgccctgggcatcgcccacctgatcgtgatggccctggagaaggagggcctgcccaaggagaaggccatcaagaagatctggctggtggacagcaagggcctgatcgtgaagggcagagccagcctgacccaggagaaggagaagttcgcccacgagcacgaggagatgaagaacctggaggccatcgtgcaggagatcaagcccaccgccctgatcggcgtggccgccatcggcggcgccttcagcgagcagatcctgaaggacatggccgccttcaacgagagacccatcatcttcgccctgagcaaccccaccagcaaggccgagtgcagcgccgagcagtgctacaagatcaccaagggcagagccatcttcgccagcggcagccccttcgaccccgtgaccctgcccaacggccagaccctgtaccccggccagggcaacaacagctacgtgttccccggcgtggccctgggcgtggtggcctgcggcctgagacagatcaccgacaacatcttcctgaccaccgccgaggtgatcgcccagcaggtgagcgacaagcacctggaggagggcagactgtacccccccctgaacaccatcagagacgtgagcctgaagatcgccgagaagatcgtgaaggacgcctaccaggagaagaccgccaccgtgtaccccgagccccagaacaaggaggccttcgtgagaagccagatgtacagcaccgactacgaccagatcctgcccgactgctacagctggcccgaggaggtgcagaagatccagaccaaggtggaccagtag

SEQ ID NO: 128046 - protein, 584 aa, Artificial Sequence
  derived and/or modified sequence
MLSRLRVVSTTCTLACRHLHIKEKGKPLMLNPRTNKGMAFTLQERQMLGLQGLLPPKIETQDIQALRFHRNLKKMTSPLEKYIYIMGIQERNEKLFYRILQDDIESLMPIVYTPTVGLACSQYGHIFRRPKGLFISISDRGHVRSIVDNWPENHVKAVVVTDGERILGLGDLGVYGMGIPVGKLCLYTACAGIRPDRCLPVCIDVGTDNIALLKDPFYMGLYQKRDRTQQYDDLIDEFMKAITDRYGRNTLIQFEDFGNHNAFRFLRKYREKYCTFNDDIQGTAAVALAGLLAAQKVISKPISEHKILFLGAGEAALGIANLIVMSMVENGLSEQEAQKKIWMFDKYGLLVKGRKAKIDSYQEPFTHSAPESIPDTFEDAVNILKPSTIIGVAGAGRLFTPDVIRAMASINERPVIFALSNPTAQAECTAEEAYTLTEGRCLFASGSPFGPVKLTDGRVFTPGQGNNVYIFPGVALAVILCNTRHISDSVFLEAAKALTSQLTDEELAQGRLYPPLANIQEVSINIAIKVTEYLYANKMAFRYPEPEDKAKYVKERTWRSEYDSLLPDVYEWPESASSPPVITE

SEQ ID NO: 128047 - DNA, 1755 bp, Artificial Sequence
  derived and/or modified sequence
atgctaagccgattgcgagtagtgagcacgacctgtaccctggcctgtcgccatctgcacataaaggagaaaggcaaacctttaatgctgaaccccagaacaaataaagggatggcatttacgcttcaagagcgtcagatgctcggacttcagggcctgctgccgccaaagatagagactcaagacatacaagcattaagattccacagaaacctcaagaaaatgacatcacccctggagaaatacatatacatcatggggatccaggagaggaatgaaaagctattctaccgtatcctccaggacgacattgaatctctgatgcccattgtatacactcctaccgtcggcctggcctgttcccagtacggacacatctttcgcaggcccaaaggcctgtttatttctattagcgaccgcggccacgtgcgctcgatcgtggacaattggccagaaaaccatgtgaaagccgtggtcgtcactgatggtgagcggatcttgggacttggtgacctgggtgtgtacggaatgggcatccccgtgggaaagctgtgcctttatacagcgtgcgccggcatccggcctgacaggtgtctgcccgtgtgcatagatgtgggcaccgacaacatcgctcttctgaaagaccctttctacatgggtttgtatcagaaacgcgaccgaacccagcagtacgacgatctaatcgacgagttcatgaaggccataacggacaggtacgggagaaatacattgattcagttcgaggacttcggaaaccataacgcgttcaggttcctccgcaaatacagggagaagtattgtacttttaatgatgacattcaaggaactgctgccgtcgcgttagccggacttctggccgctcagaaagtgatcagcaagccaatcagtgagcacaaaattctgttcttgggcgcaggcgaagcggctcttgggatcgccaacctgattgtgatgagtatggtggagaacggtctgtcggaacaggaagcccagaaaaagatctggatgttcgataagtacggactgctggtcaaaggccggaaagctaaaattgattcatatcaggaaccattcacacactcagcaccagagagtattccggacacctttgaggatgcagtgaacattctgaagcctagcaccatcatcggtgtggccggcgctggaaggttgttcactcctgacgttattcgcgctatggctagcatcaatgaaagacctgttatctttgccctgtctaacccaactgcacaggccgagtgcacagcagaagaagcctacacactgacagaaggcagatgtcttttcgcatctggctcaccttttggccctgtgaagctgaccgatggcagggtattcacccccgggcaaggaaacaatgtctatatcttccctggtgtagccctggcggtaattttatgcaacactcggcacattagcgacagcgtcttcctagaagcagcaaaggctctcacatcccaattgaccgatgaggagcttgctcaaggacgcctgtatccaccactggccaatattcaggaagtctctattaacattgcaattaaggtcaccgagtatctctacgcaaacaaaatggcctttcgataccccgagccagaagacaaggccaaatacgtgaaagagagaacctggcgttctgagtacgattcactccttccagatgtatatgagtggcccgagagcgctagctccccgcctgttatcaccgaatag

SEQ ID NO: 128048 - DNA, 1755 bp, Artificial Sequence
  derived and/or modified sequence
atgctgagccggctgcgggtggtgtccaccacctgcaccctggcctgccgccacctgcacatcaaggagaagggcaagcccctgatgctgaaccccaggaccaacaagggcatggccttcaccctgcaggagcggcagatgctgggcctgcagggcctgctgccccccaagattgagacccaggacatccaggccctgcgcttccacaggaacctgaagaagatgaccagccccctggagaagtacatctacatcatgggcatccaggagagaaatgagaagctgttctaccgcatcctgcaggatgacatcgagagcctgatgcccatcgtgtacacccccaccgtgggcctggcctgcagccagtatggccacatcttccggcggcccaagggcctcttcatcagcatcagtgaccggggccacgtgcgcagcatcgtggacaactggccagagaaccacgtgaaggctgtggtggtgacagatggagagcgcatcctgggcctgggggacctgggcgtgtatggcatgggcatccctgtgggcaagctgtgcctgtacacagcctgtgccggcatccggccagaccgctgcctgcctgtgtgcattgatgtgggcacagacaacatcgccctgctgaaggaccccttctacatgggcctgtaccagaagagggacaggacccagcagtatgatgacctgattgatgagttcatgaaggccatcacagacagatatggcaggaacaccctcatccagtttgaagattttggaaaccacaatgccttccgcttcctgaggaagtaccgggagaagtactgcaccttcaatgatgacatccagggcacagctgctgtggccctggccggcctgctggccgcccagaaggtgatcagcaagcccatcagcgagcacaagatcctcttcctgggcgctggggaggccgccctgggcatcgccaacctgattgtgatgtccatggtggagaatggcctgtctgagcaggaggcccagaagaagatctggatgtttgacaagtatggcctgctggtgaagggcaggaaggccaagattgacagctaccaggagcccttcacccacagcgcccctgagagcatcccagacacctttgaagatgctgtgaacatcctgaagcccagcaccatcatcggcgtggccggggccggccgcctcttcaccccagatgtgatccgggccatggccagcatcaatgaaagacctgtgatctttgccctgagcaaccccacagcccaggctgaatgtacagctgaggaggcctacaccctgacagagggccgctgcctgtttgccagcggcagcccctttggacctgtgaagctgacagatggccgggtcttcaccccaggccagggcaacaacgtgtacatcttccctggggtggccctggccgtcatcctgtgcaacaccaggcacatcagtgacagcgtcttcctggaggccgccaaggccctgaccagccagctgacagatgaggagctggcccagggccgcctgtacccacccctggccaacatccaggaggtgtccatcaacatcgccatcaaggtgacagagtacctgtatgccaacaagatggccttccgctacccagagcctgaggacaaggccaagtatgtgaaggagaggacctggaggagtgaatatgacagcctgctgcctgatgtgtatgagtggccagagagcgccagcagcccccctgtgatcacagaatag

SEQ ID NO: 128049 - DNA, 3164 bp, Artificial Sequence
  derived and/or modified sequence
cccgtccgtctccaccgtgggccacgccttccgggccccgcggctggccggctcctcgcgccctcccctctctcggccgctcttcgggccgcctctgcgtgtggggccgcccgcgccagtgtgagcctgagctgacggcggctccgggaggctcgcagaaggggagggccgggcggcgcgggagctgagcatcgccagggcgggcggcagggcgcggcctctccgccgggtgtaccacctgtcgcggcgcgagacctctggtgaaagaaaagatgttgtcccggttaagagtagtttccaccacttgtactttggcatgtcgacatttgcacataaaagaaaaaggcaagccacttatgctgaacccaagaacaaacaagggaatggcatttactttacaagaacgacaaatgcttggtcttcaaggacttctacctcccaaaatagagacacaagatattcaagccttacgatttcatagaaacttgaagaaaatgactagccctttggaaaaatatatctacataatgggaatacaagaaagaaatgagaaattgttttatagaatactgcaagatgacattgagagtttaatgccaattgtatatacaccgacggttggtcttgcctgctcccagtatggacacatctttagaagacctaagggattatttatttcgatctcagacagaggtcatgttagatcaattgtggataactggccagaaaatcatgttaaggctgttgtagtgactgatggagagagaattctgggtcttggagatctgggtgtctatggaatgggaattccagtaggaaaactttgtttgtatacagcttgtgcaggaatacggcctgatagatgcctgccagtgtgtattgatgtgggaactgataatatcgcactcttaaaagacccattttacatgggcttgtaccagaaacgagatcgcacacaacagtatgatgacctgattgatgagtttatgaaagctattactgacagatatggccggaacacactcattcagttcgaagactttggaaatcataatgcattcaggttcttgagaaagtaccgagaaaaatattgtactttcaatgatgatattcaagggacagctgcagtagctctagcaggtcttcttgcagcacaaaaagttattagtaaaccaatctccgaacacaaaatcttattccttggagcaggagaggctgctcttggaattgcaaatcttatagttatgtctatggtagaaaatggcctgtcagaacaagaggcacaaaagaaaatctggatgtttgacaagtatggtttattagttaagggacggaaagcaaaaatagatagttatcaggaaccatttactcactcagccccagagagcatacctgatacttttgaagatgcagtgaatatactgaagccttcaactataattggagttgcaggtgctggccgtcttttcactcctgatgtaatcagagccatggcctctatcaatgaaaggcctgtaatatttgcattaagtaatcctacagcacaggcagagtgcacggctgaagaagcatatacacttacagagggcaggtgtttgtttgccagtggcagtccatttgggccagtgaaacttacagatgggcgagtctttacaccaggtcaaggaaacaatgtttatatttttccaggtgtggctttagctgttattctctgtaacacccggcatattagtgacagtgttttcctagaagctgcaaaggccctgacaagccaattgacagatgaagagctagcccaagggagactttacccaccgcttgctaatattcaggaagtttctattaacattgctattaaagttacagaatacctatatgctaataaaatggctttccgatacccagaacctgaagacaaggccaaatatgttaaagaaagaacatggcggagtgaatatgattccctgctgccagatgtgtatgaatggccagaatctgcatcaagccctcctgtgataacagaatagaagcactcccctgataaatactttctgtgctccagggaaccccttttttcagacaagaagagataatgtcttcagttttatggtgttttctgtgttttgttctccctgaccactttggttgatgtattttttccatgcgtctccacatctgttggggtagacgtgttgattgattgcattgcccaccagcaccctacagtcagatagttgtgatgctttaattctaacatacagcccgtaccacatccaggagatgtaaaaagtgtgtttgtgaatgtcttcacttgtactctaattcagacttgccaaagtatttgctatttactattatgggtaatactcttctctggcctagttcttacagagctactaaaatagaaatttacttttatggatagaagtacagaattttgagaagaaactaaattttcaccaaattttaaggaaaaattgtcattatctaaaaatgttcttatatatctgcttcatcttaccttcatactctgaaattccctatagcagacagagctagggaaatattaaaaatttaccctatttattttctggaactaaatcaagccttaactataacattatgagagtaatgggaactactgctggctttaagtaaataaaagtcattgttttcaacagtgtataaaaatcatagtgtaacctttttatttaataaatatcttacatttaattgcttcagttatgctatcttattgcccaactagaaatttagatttgcttatgaaaaacacatatttttgttacttctagatgattctaggagggagtataagatacctaatcatatgggaacatcacgtgactttttaaatctaaattagtcatgcttcacatcaaaatgagtcatatttaactggagaaactatgcccttattccagaactgatgctctttattgcttgagataattttggaatgttactatgatactgtttctttgaatatcattagtagtgacaactctttctccattgaaggcagacttaatttttttaaaccaccaacattaatttagagctaaatggggatgaataaggttggtgttcatctgggaaatgccttttttaatcccagtaaaatgggtaataatggctatccagaa

SEQ ID NO: 128050 - DNA, 1755 bp, Artificial Sequence
  derived and/or modified sequence
atgctgagccggctgcgggtggtgagcaccacctgcaccctggcctgtcgccaccttcatattaaggaaaagggcaaacccctgatgctgaacccacggacaaataagggcatggcatttaccctccaggagagacagatgctcggactccagggactcctgccaccgaaaattgagactcaggacatccaggccctgagatttcatagaaacctcaagaagatgacaagtcctctcgaaaaatatatctacattatgggaatccaggagaggaatgaaaagttattttaccgtatactccaggacgacatcgaaagtctcatgccaatcgtctacacaccaacagtgggactggcctgctcccagtacggacacatctttaggagaccaaaggggctgtttatctctatcagtgaccgagggcatgtgcgtagcatagtcgacaactggcccgagaaccacgtcaaggctgtagtggtcactgatggtgaacggatcttgggcctaggggatctaggggtgtacggaatgggaatccccgtggggaagttgtgcctttacacagcatgtgcagggattcggccagaccgctgcctgccggtgtgcattgacgtgggtactgataatatagcccttctcaaggaccccttttatatggggttataccagaagcgcgacaggacccagcagtacgacgatctgattgacgagttcatgaaagctattaccgacaggtatgggcgcaacactctaatccaatttgaggatttcggcaatcataatgcttttaggttcctgcggaagtatagggaaaagtactgtaccttcaatgacgatatccaggggactgccgcagtcgcccttgcagggctgctagctgctcagaaggtcatctccaaacccatcagcgagcataagatactgttcctgggagccggtgaggcagccctgggtatagcaaacttaattgtcatgagcatggttgaaaatggtctttccgaacaggaggctcaaaagaaaatctggatgtttgacaaatatggactgctggttaagggcaggaaagcaaaaatcgactcctaccaggagcctttcactcactcagcgcccgagtcaatccccgatacattcgaggacgccgtgaacatccttaagcccagcaccattattggcgtggcaggtgccggcagactgttcaccccagacgtgattcgtgccatggcatccatcaacgagcgtccagtgatcttcgctttatcaaatcccaccgcacaggccgagtgtactgctgaggaagcctacactctaaccgaaggccgctgcttgttcgcgtctggatccccgtttggcccagtcaagctgactgacggccgagtattcacacccggccagggaaacaacgtatacatttttccaggtgtcgcactggcagtgatcctgtgcaatactagacacatctcggacagtgtctttttggaagctgcaaaagctctgaccagccagctcaccgacgaggagcttgcacaaggacggctgtatcctcccctagcaaatatccaggaggtgagcatcaacatcgccatcaaggttaccgagtatctatatgccaataagatggcattccggtatcccgaacccgaggacaaagcaaagtatgtaaaggagaggacatggcgtagcgagtacgattctctccttcccgacgtctatgagtggcccgaatccgcatccagccctcctgttataactgaatag

SEQ ID NO: 128051 - DNA, 1755 bp, Artificial Sequence
  derived and/or modified sequence
atgttatctcgtctacgggtcgtaagcaccacttgcacattggcctgcaggcacctacatataaaagaaaaaggaaagccactaatgttaaaccccagaaccaacaaagggatggcttttaccctgcaggagcggcagatgctgggactgcagggcctgctgccccctaagatcgagacccaggatattcaagcactccggttccacaggaacctgaaaaagatgactagccccctagagaaatacatttatatcatgggcatccaggagcggaacgagaaactgttttaccggattctccaggacgacatagagagcctgatgcccatcgtatatacacccaccgtggggctagcttgctcacagtacggacatatttttcgcaggcccaaggggctgttcatcagcatttccgaccgaggtcatgtccgtagcatcgtggataactggcctgaaaatcacgtcaaagccgtcgtcgttacagatggagagagaatcttgggcctgggtgacctgggggtgtacgggatgggtattccagtgggtaagctgtgtctgtatactgcctgtgccggtatccggccagaccgctgtctgcctgtatgtattgacgttggaaccgataacattgcactgttgaaagaccccttttacatgggactctaccagaagcgcgatcgaacccagcaatatgacgatctgatcgacgagttcatgaaggctatcacggaccggtacggcaggaacaccctgatacagttcgaagatttcggcaaccacaacgcctttcgcttcctccgaaaatacagggaaaaatattgcaccttcaacgatgatatccagggtacggccgctgtggctttggccggactcttggcagctcaaaaggtaattagcaaacccatttctgagcacaagattctttttcttggggctggagaagcagcccttggtattgccaatctgatcgtgatgagcatggtcgagaatggcctgagcgagcaggaggctcagaaaaagatttggatgtttgataaatacggcttacttgtgaaggggagaaaggccaagatcgacagctaccaagaacccttcacacactctgcacctgaaagcatcccagacacgtttgaggatgcagtgaatatcctaaaaccttccaccattatcggagttgcgggagccggaaggctctttactccagacgttatacgggctatggcaagcataaatgagcggccagtgatctttgctctaagcaacccgacagcccaggctgaatgtaccgcggaagaagcctacactctgaccgaaggtagatgtcttttcgcttccggatccccttttggccctgtgaaactgaccgatggaagagtgtttacaccagggcaggggaacaacgtttatatattccccggagtggccctggccgtgattctttgtaatacaagacacatctccgactcagtgttcttagaagccgcaaaggcactgacaagtcaactaacggatgaggaacttgcccaaggtcgcctctatcctcctcttgcgaacattcaggaggtctccattaatatcgccattaaggtcacggagtatctgtacgcaaataaaatggcatttcggtaccccgaacccgaagacaaagctaagtatgtgaaggagaggacctggagatccgaatatgatagcctgctgcccgacgtctacgagtggccagaaagcgcaagctcaccccctgttattaccgagtag

SEQ ID NO: 128052 - DNA, 1755 bp, Artificial Sequence
  derived and/or modified sequence
atgctgagcagactgagagtggtgagcaccacctgcaccctggcctgcagacacctgcacatcaaggagaagggcaagcccctgatgctgaaccccagaaccaacaagggcatggccttcaccctgcaggagagacagatgctgggcctgcagggcctgctgccccccaagatcgagacccaggacatccaggccctgagattccacagaaacctgaagaagatgaccagccccctggagaagtacatctacatcatgggcatccaggagagaaacgagaagctgttctacagaatcctgcaggacgacatcgagagcctgatgcccatcgtgtacacccccaccgtgggcctggcctgcagccagtacggccacatcttcagaagacccaagggcctgttcatcagcatcagcgacagaggccacgtgagaagcatcgtggacaactggcccgagaaccacgtgaaggccgtggtggtgaccgacggcgagagaatcctgggcctgggcgacctgggcgtgtacggcatgggcatccccgtgggcaagctgtgcctgtacaccgcctgcgccggcatcagacccgacagatgcctgcccgtgtgcatcgacgtgggcaccgacaacatcgccctgctgaaggaccccttctacatgggcctgtaccagaagagagacagaacccagcagtacgacgacctgatcgacgagttcatgaaggccatcaccgacagatacggcagaaacaccctgatccagttcgaggacttcggcaaccacaacgccttcagattcctgagaaagtacagagagaagtactgcaccttcaacgacgacatccagggcaccgccgccgtggccctggccggcctgctggccgcccagaaggtgatcagcaagcccatcagcgagcacaagatcctgttcctgggcgccggcgaggccgccctgggcatcgccaacctgatcgtgatgagcatggtggagaacggcctgagcgagcaggaggcccagaagaagatctggatgttcgacaagtacggcctgctggtgaagggcagaaaggccaagatcgacagctaccaggagcccttcacccacagcgcccccgagagcatccccgacaccttcgaggacgccgtgaacatcctgaagcccagcaccatcatcggcgtggccggcgccggcagactgttcacccccgacgtgatcagagccatggccagcatcaacgagagacccgtgatcttcgccctgagcaaccccaccgcccaggccgagtgcaccgccgaggaggcctacaccctgaccgagggcagatgcctgttcgccagcggcagccccttcggccccgtgaagctgaccgacggcagagtgttcacccccggccagggcaacaacgtgtacatcttccccggcgtggccctggccgtgatcctgtgcaacaccagacacatcagcgacagcgtgttcctggaggccgccaaggccctgaccagccagctgaccgacgaggagctggcccagggcagactgtacccccccctggccaacatccaggaggtgagcatcaacatcgccatcaaggtgaccgagtacctgtacgccaacaagatggccttcagataccccgagcccgaggacaaggccaagtacgtgaaggagagaacctggagaagcgagtacgacagcctgctgcccgacgtgtacgagtggcccgagagcgccagcagcccccccgtgatcaccgagtag

SEQ ID NO: 128053 - protein, 390 aa, Artificial Sequence
  derived and/or modified sequence
MAQRYDDLPHYGGMDGVGIPSTMYGDPHAARSMQPVHHLNHGPPLHSHQYPHTAHTNAMAPSMGSSVNDALKRDKDAIYGHPLFPLLALIFEKCELATCTPREPGVAGGDVCSSESFNEDIAVFAKQIRAEKPLFSSNPELDNLMIQAIQVLRFHLLELEKVHELCDNFCHRYISCLKGKMPIDLVIDDREGGSKSDSEDITRSANLTDQPSWNRDHDDTASTRSGGTPGPSSGGHTSHSGDNSSEQGDGLDNSVASPSTGDDDDPDKDKKRHKKRGIFPKVATNIMRAWLFQHLTHPYPSEEQKKQLAQDTGLTILQVNNWFINARRRIVQPMIDQSNRAVSQGTPYNPDGQPMGGFVMDGQQHMGIRAPGPMSGMGMNMGMEGQWHYM

SEQ ID NO: 128054 - DNA, 1173 bp, Artificial Sequence
  derived and/or modified sequence
atggcccaaagatatgacgacctgcctcattatgggggaatggacggcgtgggcatcccatcgactatgtacggcgatccccatgctgctcggtcaatgcagcccgtgcatcacttgaaccatggacctcccttgcattcccatcagtatccacacaccgcccacaccaacgccatggccccgtcgatgggctcttccgttaacgatgccttgaagcgcgataaagatgcaatctatgggcacccgctgtttccactgctggcactgattttcgagaaatgtgaactcgcaacctgcacgccccgcgagccaggtgtagccggcggggatgtgtgctctagcgagagtttcaacgaagatatcgccgtgttcgcaaaacagatcagagccgagaaaccgctcttctccagcaacccggagctcgacaatctcatgattcaggccatacaagtgctccggtttcacctcctagagcttgagaaagttcacgaactctgtgataacttctgccacagatatatctcctgtcttaagggaaagatgcccatcgaccttgtaatagatgatagagagggcggtagcaaatccgacagcgaagatatcaccagatctgcaaatctcaccgaccaaccctcttggaatcgcgatcacgacgacacagcctccacccgaagcgggggcacacccgggccgtcaagcggcggacacacttcacacagcggcgataattcgtctgagcaaggagatggtcttgacaactctgtagccagtccgtcaactggggacgatgacgatccggataaagataagaagaggcataaaaagcgcggcatctttccaaaggtggcaactaatattatgagggcgtggctcttccaacacctaactcatccatatcctagtgaagaacagaagaagcagttggcccaggataccggactgaccattttgcaggtgaacaactggtttattaacgctcggaggaggattgtccaaccaatgatcgatcagtctaaccgagccgtgagccagggcaccccatataacccagatggacagcccatgggtgggtttgtgatggatgggcagcaacacatgggcatcagagcccctggaccgatgagtggcatgggtatgaatatggggatggaggggcaatggcattatatgtag

SEQ ID NO: 128055 - DNA, 663 bp, Artificial Sequence
  derived and/or modified sequence
atgcagcccgtccatcacctgaatcacggaccacctctgcatagtcatcaatacccgcataccgcccacacaaacgctatggcacccagcatgggatcttccgtgaacgatgctcttaagagagacaaggacgccatctatgggcaccccctttttcccctcctggctctgatcttcgaaaagtgcgaactggcaacctgtacacccagggagccaggagtagccggtggcgatgtatgtagctccgagagctttaacgaggacattgcggtgttcgctaagcagatcagggccgaaaaacccttattcagttctaacccagaactagataatctcatgattcaagctattcaggtcctccgctttcacctgttagagctggagaaagtgcacgaactgtgcgataacttttgccatcgctatattagttgtctgaaaggcaaaatgcctatcgacctcgtgattgatgaccgagagggtgggagcaaatctgactctgaggacatcacccgctctgcaaaccttactgatcaaccctcctggaacagggaccacgacgatacagcctccacacgaagtggcggaaccccgggcccttcctctggagggcacacttcacattccggggataatagttccgagcaggcccccctgcctttctag

SEQ ID NO: 128056 - DNA, 1113 bp, Artificial Sequence
  derived and/or modified sequence
atggctcagcgctacgacgacctgccgcattatggcgggatggacggggtgggcattccaagtaccatgtacggggacccacacgcagcaagatccatgcaacccgtgcaccacctcaaccatgggccacccctgcatagccaccagtaccctcacacagctcataccaatgccatggctccctcaatgggctcgagtgtgaacgatgccctgaagcgcgataaggacgcgatctatggtcacccattattccccctgcttgccctgatttttgaaaaatgcgagttagcaacttgcacaccacgcgagccaggcgtcgcgggtggcgacgtgtgctcctccgagagctttaatgaggatattgcagtctttgctaagcagattagggctgaaaagccgctattctctagcaatcctgagttagataacctaatgatacaagcaattcaagttctaaggtttcacctactcgagttggagaaagtccacgaactgtgcgataacttctgccataggtacatcagttgtttgaaagggaagatgccaatagatcttgtcattgacgaccgtgaaggaggctccaaatctgattccgaggatatcacgaggagcgctaacttgacagatcaaccgagttggaatcgggatcacgacgataccgccagtacaagatccggcggcacacctggtcccagttccggtgggcatacttctcacagcggagacaatagcagcgagcagggggatggcctcgataattcagtggccagccccagtacaggtgatgacgacgaccccgataaggacaaaaaacggcacaagaaaagaggcatattccctaaggtagccactaacattatgagggcgtggctgttccagcatctgactcacccctatccttcagaggaacagaagaaacaactggcacaggacacggggctgaccatactgcaggtcaataattggtttattaatgccaggcggcgtattgtgcagccgatgattgatcagagtaaccgcgcaggaaagtcccctatcgtgaccgtctttaagtccaggaaacggaagccatcctcctcacattcacctggcggaccactgccaggcaagtag

SEQ ID NO: 128057 - DNA, 1173 bp, Artificial Sequence
  derived and/or modified sequence
atggcccagagatatgatgacctgccccactatggaggcatggatggagtgggcatccccagcaccatgtacggggacccccatgctgcccgctccatgcagcctgtgcaccacctgaaccacggcccccccctgcacagccaccagtacccccacacagcccacaccaatgccatggcccccagcatgggcagctctgtgaatgatgccctgaagagggacaaggatgccatctacggccaccccctcttccccctgctggccctgatctttgagaagtgtgagctggccacctgcaccccccgggagcccggggtggccggaggagatgtgtgcagcagcgagagcttcaatgaagatattgctgtgtttgccaagcagatccgggcagagaagcccctcttcagcagcaaccctgagctggacaacctgatgatccaggccatccaggtgctgcgcttccacctgctggagctggagaaggtgcatgagctgtgtgacaacttctgccaccgctacatcagctgcctgaagggcaagatgcccatcgacctggtgattgatgaccgggagggcggcagcaagagtgacagcgaggacatcaccaggtctgccaacctgacagaccagcccagctggaacagagaccatgatgacacagccagcaccaggtctgggggcaccccaggccccagcagcggcggccacaccagccacagcggggacaacagcagcgagcagggagatggcctggacaacagcgtggccagccccagcactggagatgatgatgatcctgacaaggacaagaagaggcacaagaagaggggcatcttccccaaggtggccaccaacatcatgagggcctggctgttccagcacctgacccacccctaccccagcgaggagcagaagaagcagctggcccaggacaccggcctgaccatcctgcaggtgaacaactggttcatcaatgcccggcggcgcatcgtgcagcccatgattgaccagagcaacagagctgtgtcccagggcaccccctacaacccagatggccagcccatgggcggctttgtgatggatggccagcagcacatgggcatccgggcccctggccccatgagcggcatgggcatgaacatgggcatggagggccagtggcactacatgtag

SEQ ID NO: 128058 - DNA, 663 bp, Artificial Sequence
  derived and/or modified sequence
atgcagcctgtgcaccacctgaaccacggcccccccctgcacagccaccagtacccccacacagcccacaccaatgccatggcccccagcatgggcagctctgtgaatgatgccctgaagagggacaaggatgccatctacggccaccccctcttccccctgctggccctgatctttgagaagtgtgagctggccacctgcaccccccgggagcccggggtggccggaggagatgtgtgcagcagcgagagcttcaatgaagatattgctgtgtttgccaagcagatccgggcagagaagcccctcttcagcagcaaccctgagctggacaacctgatgatccaggccatccaggtgctgcgcttccacctgctggagctggagaaggtgcatgagctgtgtgacaacttctgccaccgctacatcagctgcctgaagggcaagatgcccatcgacctggtgattgatgaccgggagggcggcagcaagagtgacagcgaggacatcaccaggtctgccaacctgacagaccagcccagctggaacagagaccatgatgacacagccagcaccaggtctgggggcaccccaggccccagcagcggcggccacaccagccacagcggggacaacagcagcgagcaggcccccctgcccttctag

SEQ ID NO: 128059 - DNA, 1113 bp, Artificial Sequence
  derived and/or modified sequence
atggcccagagatatgatgacctgccccactatggaggcatggatggagtgggcatccccagcaccatgtacggggacccccatgctgcccgctccatgcagcctgtgcaccacctgaaccacggcccccccctgcacagccaccagtacccccacacagcccacaccaatgccatggcccccagcatgggcagctctgtgaatgatgccctgaagagggacaaggatgccatctacggccaccccctcttccccctgctggccctgatctttgagaagtgtgagctggccacctgcaccccccgggagcccggggtggccggaggagatgtgtgcagcagcgagagcttcaatgaagatattgctgtgtttgccaagcagatccgggcagagaagcccctcttcagcagcaaccctgagctggacaacctgatgatccaggccatccaggtgctgcgcttccacctgctggagctggagaaggtgcatgagctgtgtgacaacttctgccaccgctacatcagctgcctgaagggcaagatgcccatcgacctggtgattgatgaccgggagggcggcagcaagagtgacagcgaggacatcaccaggtctgccaacctgacagaccagcccagctggaacagagaccatgatgacacagccagcaccaggtctgggggcaccccaggccccagcagcggcggccacaccagccacagcggggacaacagcagcgagcagggagatggcctggacaacagcgtggccagccccagcactggagatgatgatgatcctgacaaggacaagaagaggcacaagaagaggggcatcttccccaaggtggccaccaacatcatgagggcctggctgttccagcacctgacccacccctaccccagcgaggagcagaagaagcagctggcccaggacaccggcctgaccatcctgcaggtgaacaactggttcatcaatgcccggcggcgcatcgtgcagcccatgattgaccagagcaacagagctgggaagagccccatcgtgaccgtcttcaagagcaggaagaggaagcccagcagcagccacagccctgggggccccctgcccgggaagtag

SEQ ID NO: 128060 - DNA, 1499 bp, Artificial Sequence
  derived and/or modified sequence
atgcagccaggtccatgcagccggtccaccacctgaaccacgggcctcctctgcactcgcatcagtacccgcacacagctcataccaacgccatggcccccagcatgggctcctctgtcaatgacgctttaaagagagataaagatgccatttatggacaccccctcttccctctcttagcactgatttttgagaaatgtgaattagctacttgtaccccccgcgagccgggggtggcgggcggggacgtctgctcgtcagagtcattcaatgaagatatagccgtgttcgccaaacagattcgcgcagaaaaacctctattttcttctaatccagaactggataacttgatgattcaagccatacaagtattaaggtttcatctattggaattagagaaggtacacgaattatgtgacaatttctgccaccggtatattagctgtttgaaagggaaaatgcctatcgatttggtgatagacgatagagaaggaggatcaaaatcagacagtgaagatataacaagatcagcaaatctaactgaccagccctcttggaacagagatcatgatgacacggcatctactcgttcaggaggaaccccaggcccttccagcggtggccacacgtcacacagtggggacaacagcagtgagcaagcacccttacccttctgaagaacagaaaaagcagttggcacaagacacgggactcaccatccttcaagtgaacaattggtttattaatgcccggagaagaatagtgcagcccatgatagaccagtccaaccgagcagtaagtcaaggaacaccttataatcctgatggacagcccatgggaggtttcgtaatggacggtcagcaacatatgggaattagagcaccagggctgcaaagtatgccaggggagtatgtagcccggggtggtccaatgggtgtgagtatgggacagccaagttatacccaaccccagatgcccccccatcctgctcagctgcgtcatgggccccccatgcatacgtacattcctggacaccctcaccacccaacagtgatgatgcatggaggaccgccccaccctggaatgccaatgtcagcatcaagccccacagttcttaatacaggagacccaacaatgagtggacaagtcatggacattcatgctcagtagcttaagggaatatgcattgtctgcaatggtgactgatttcaaatcatgttttttctgcaatgactgtggagttccattcttggcatctactctggaccaaggagcatccctaattcttcatagggacctttaaaaagcaggaaataccaactgaagtcaatttgggggacatgctaaataactatataagacattaagagaacaaagagtgaaatattgtaaatgctattatactgttatccatattacgttgtttcttatagattttttaaaaaaaatgtgaaatttttccacactatgtgtgttgtttccatagctcttcacttcct

SEQ ID NO: 128061 - DNA, 2392 bp, Artificial Sequence
  derived and/or modified sequence
cggaatccacctctccgcctgtgcaacacacactttacacacgcacggggactgcaagcgggcagcatcgatcgtggctcctttaagacaaactcagacagacattttttttaaccctccttctctaatctccttccagtgcagcacttgcaaagagggagagagagggagagaaagaaagagagagagagaagagagaaactgattaggaattaggactgattcaagggaagcgagcgctagggctttgtgcatttgaatattaacatttgaggtgttctgaccagaagaagacagagcggatgatcattcattcaccacgttgacaacctcgcctgtgattgacagctggagtggcagaaagccatgagatttggtagttgggtctgaggggcgctcttttttttccttttctttctttctttctttttttttttttaaactgatttttgggggagagaagatctgcttttttttgcccccgctgctgtcttggaaacggagcgcttttatgctcagtgactcgggcgctttgcttcaggtcccgtagaccgaagatctgggaccagtagctcacgttgctggagacgttaagggatttttcgtcgtgcttttttttttttttttttttttttccgggggagtttgaatatttgtttcttttcacactggccttaaagaggatatattagaagttgaagtaggaagggagccagagaggccgatggcgcaaaggtacgacgatctaccccattacgggggcatggatggagtaggcatcccctccacgatgtatggggacccgcatgcagccaggtccatgcagccggtccaccacctgaaccacgggcctcctctgcactcgcatcagtacccgcacacagctcataccaacgccatggcccccagcatgggctcctctgtcaatgacgctttaaagagagataaagatgccatttatggacaccccctcttccctctcttagcactgatttttgagaaatgtgaattagctacttgtaccccccgcgagccgggggtggcgggcggggacgtctgctcgtcagagtcattcaatgaagatatagccgtgttcgccaaacagattcgcgcagaaaaacctctattttcttctaatccagaactggataacttgatgattcaagccatacaagtattaaggtttcatctattggaattagagaaggtacacgaattatgtgacaatttctgccaccggtatattagctgtttgaaagggaaaatgcctatcgatttggtgatagacgatagagaaggaggatcaaaatcagacagtgaagatataacaagatcagcaaatctaactgaccagccctcttggaacagagatcatgatgacacggcatctactcgttcaggaggaaccccaggcccttccagcggtggccacacgtcacacagtggggacaacagcagtgagcaaggtgatggcttggacaacagtgtagcttcccccagcacaggtgacgatgatgaccctgataaggacaaaaagcgtcacaaaaagcgtggcatctttcccaaagtagccacaaatatcatgagggcgtggctgttccagcatctaacacacccttacccttctgaagaacagaaaaagcagttggcacaagacacgggactcaccatccttcaagtgaacaattggtttattaatgcccggagaagaatagtgcagcccatgatagaccagtccaaccgagcaggcaagtcccccatagtgactgtattcaagtcacgcaagcgaaaaccatcctcaagccattcaccgggaggtccgctacctggtaaataaactgggagtgagtataggaacgcctggcaattaaaattaaaccagtttcgtttcataacaacactaatcaatttaacatcattataaaacgtttggagaaggtggaaaaaaaaagccaacagagaaaagtaactcttaaataatatgctcagttacaatattctttgtacacattcaatatattaatgttattttttttctgagtttgccttcccagctctttctgctactatgaccactccctggtgcatggcttggtgtggaattgctgtaaactttattacctgtcaaaagggcaaaggggtcaggattgcttgtgggactcagtaaagttcaaagacattcaatgaggtagagcttttgtgtgctttaataacccaaggcagcttacttctgaagcagcttttcatgtacagttaaaacacgggattcaggtagtggtataaatacatggttcttatttctcagaccttctcttgttaatatccatcttctggtgttcgactttttttttttttaataacagtctttttgttttgtttttaaattatgagc

SEQ ID NO: 128062 - DNA, 1173 bp, Artificial Sequence
  derived and/or modified sequence
atggcccagcggtacgacgacctgccccactacggcggcatggacggagtaggaattccatcaacaatgtatggcgacccgcacgctgctcgctccatgcagccggtgcatcacctgaaccatggacccccattgcatagccatcagtatccacacaccgcccacaccaatgccatggctccgtctatgggctcgtcagtcaatgacgctctgaagagggataaagatgccatatacggccatccactctttcccctgctggccttaatcttcgagaaatgcgagctggcgacttgtaccccgcgggagcctggagtggcaggaggagacgtgtgcagctcggagtcatttaatgaggatattgccgtgtttgccaagcagatccgggcggaaaaacccctgttttcttcaaatcctgagcttgacaacctaatgatccaggctatccaggtgctcagattccatctcctggaactcgagaaggtgcacgagctgtgtgacaatttttgtcataggtacatcagttgtctcaagggcaagatgcccatcgacttagtgatcgacgaccgggaaggagggagtaagtccgactccgaagacatcacccgatcggccaatctgactgaccaacccagttggaaccgtgaccatgacgatactgcctctacaagatccgggggaacacctgggccttcctccggcggccataccagtcacagtggcgataacagcagcgagcagggggacggccttgacaacagtgttgctagcccgtctaccggtgacgatgacgatcctgacaaggacaagaaacgccataagaaaagaggcattttccccaaggttgccacaaatatcatgcgggcttggctattccagcacctgactcatccatatcctagcgaggagcagaaaaaacagctggcccaggatacaggactaactattctgcaggtgaataattggttcataaatgccaggaggagaatcgtgcagcccatgatagaccagagtaatcgtgctgtgtcgcagggcaccccttacaaccctgatggccaaccaatgggcgggttcgtcatggatggtcagcagcatatggggatcagagcaccaggacctatgtcaggtatgggcatgaacatggggatggagggccagtggcattatatgtag

SEQ ID NO: 128063 - DNA, 663 bp, Artificial Sequence
  derived and/or modified sequence
atgcagcccgtgcaccacctgaaccacggcccccccctgcacagccaccagtacccacatacggctcacacaaatgccatggcccctagcatgggtagttcagttaatgatgcactcaagcgcgacaaagacgctatctatggacatcctctgttccccctgttggcattgatcttcgaaaaatgcgagctggcgacatgtaccccgcgtgagccaggagtggcgggcggcgacgtttgtagtagtgagtcctttaacgaggatatcgccgtttttgcaaaacagataagagcggagaagcccttgttttcttccaaccccgagctcgataatctgatgatccaggccatccaggtgttgaggttccacctcctggaactggagaaggtacatgaattatgcgataatttttgtcataggtatatttcttgtcttaaggggaaaatgcccattgatctggtgatcgatgatagagagggcggaagtaaaagcgattccgaggacatcacacgcagcgccaacttgaccgatcaaccttcttggaaccgcgatcatgatgatacagcttccacccggtctggcggaacacctggcccttctagcggagggcacaccagccattccggagataattctagtgagcaggcacctctaccgttctag

SEQ ID NO: 128064 - DNA, 1113 bp, Artificial Sequence
  derived and/or modified sequence
atggcccagcggtacgacgacctgccccactacggcggcatggacggtgtgggcatccctagcacaatgtacggggatccacatgctgctcgctccatgcagcctgtacaccacctgaaccacggcccccccttgcactcacatcagtacccccacacggcccacactaacgccatggctccgagtatgggctcgtcagtgaatgatgcccttaagcgcgataaagatgccatctacggtcacccacttttcccattactggcgctgatttttgagaaatgcgagttggccacctgcaccccacgggaacccggcgtggctgggggtgacgtttgctcatccgagtcctttaatgaagacattgcagtgtttgccaaacagatcagggccgaaaagcctctcttctcaagcaaccccgagttagataacctgatgattcaggccattcaggttttaagatttcacctgctggaactggagaaagtacacgaactgtgcgacaatttctgccacagatatatttcatgtctgaaaggcaagatgcccatcgatcttgtgatcgatgatcgtgagggaggaagcaagagcgattcagaagatataacaaggagcgctaatctcaccgaccaaccatcatggaatagagaccacgacgatactgcttctacccgatctggcggcactcccgggccgtcctctggcggtcacacatcccatagcggcgacaatagtagtgaacagggcgacggcctggacaactcggtcgcctcaccttcaacaggggatgatgacgatcccgacaaggacaagaagaggcacaagaagagaggcatctttcccaaagtcgctacaaatatcatgcgtgcctggctatttcagcaccttacacatccctacccatcagaagaacagaagaagcagctggcacaggacactggacttactatattacaggtgaataattggtttatcaacgcaagacggcgcatagtgcagcccatgatcgaccagtctaatcgggccggtaaaagccctattgtaactgtgttcaaatccaggaagcggaagcctagttcatcccattcacctggcgggcccctgcctggaaagtag

SEQ ID NO: 128065 - DNA, 1173 bp, Artificial Sequence
  derived and/or modified sequence
atggcacagcgctatgacgacctgccccattacggaggcatggatggtgtcgggattcccagtactatgtacggagatcctcatgctgcacgttcaatgcagcctgtgcatcatctgaatcacggtccgcctctgcattcccatcagtacccacataccgctcataccaatgccatggccccttctatgggatcatcggtcaatgatgctttgaagcgtgacaaggacgccatatatgggcaccctctgttccccctcctggccttaatcttcgagaagtgtgaacttgccacctgcactcctcgggagcccggagtcgccggtggcgacgtgtgctctagcgaatctttcaacgaggacattgcggttttcgcgaagcaaattcgcgctgaaaaacctttatttagcagcaacccggagctcgacaatctcatgatccaggcaattcaagtcctgagattccacttacttgaacttgaaaaggtgcatgagctttgcgataatttttgccacaggtatattagctgcctgaaagggaaaatgccaatcgacctggtcattgatgaccgcgagggagggagcaaatcagatagtgaagatattacacgatcagcgaacctcactgaccagccaagttggaacagggatcacgatgatactgccagtactcgaagcggaggaactccgggacctagttccggcggtcacacatcgcacagtggagataactcttctgaacagggcgacgggctggataattcagtggccagtcccagtaccggagatgacgatgaccctgataaagataagaaaaggcacaagaagaggggaatctttcccaaggttgcaaccaacattatgagagcttggctcttccagcacttgacacatccctatccttctgaagaacagaagaagcaactagcccaggacactggcttaactattctgcaggtgaataactggttcattaatgcgcgtcggaggatcgttcaacctatgatcgatcaaagtaacagagctgtgtcccagggtacaccctataaccccgacgggcagcctatgggcggattcgtgatggacggacaacagcatatgggcatccgagcccctgggccaatgagtggaatggggatgaacatgggcatggaaggccagtggcactacatgtag

SEQ ID NO: 128066 - DNA, 663 bp, Artificial Sequence
  derived and/or modified sequence
atgcaaccggtgcaccacttgaatcacggacccccactgcacagtcaccagtacccccacaccgcacacacaaatgccatggcccctagcatgggcagttcggtcaatgatgcactaaagagagacaaggatgccatttatggccacccgctctttccattgctcgcacttatctttgagaagtgcgaattggccacatgcaccccacgtgaacccggtgtcgcaggaggtgatgtctgctctagcgaatcatttaatgaggacatcgctgtctttgcaaagcagattcgagctgagaagcctctgttttcatccaatccagaacttgataacctcatgattcaagccatacaggtgttacgctttcacctcttggagctggagaaggtgcacgaactctgcgataatttttgccacaggtacatatcttgtttaaaaggcaagatgccgatagaccttgtcatcgacgaccgcgagggcggatcgaagtccgactcagaggatatcacaaggtctgcaaatctgacggaccagccctcatggaatagagaccatgatgacaccgcctccaccagaagtggcggaacacccggacccagttccggagggcacacatcccattccggtgacaacagcagcgaacaggcaccactaccgttctag

SEQ ID NO: 128067 - DNA, 1113 bp, Artificial Sequence
  derived and/or modified sequence
atggcccagcggtacgatgacctccctcattacgggggaatggacggcgtcgggatccctagcacaatgtacggcgatccgcatgcagcaagaagcatgcagccggtgcaccacttgaaccacgggccaccactccactctcatcagtacccccatacagctcatactaacgctatggctccttccatggggagttctgttaacgatgcgttaaagcgtgacaaagatgcgatttatggtcatccactctttccacttctcgccttgatcttcgagaaatgtgagttggcgacttgtacacccagggaaccaggagtggcaggcggtgatgtgtgctctagcgaatcttttaacgaggatattgctgtgtttgcgaaacagatccgggcagagaagcccctgttcagctctaaccccgagctggacaatctgatgattcaggcaatccaagtgctgcgttttcatctgctggagctcgagaaggtccacgaactctgcgataacttttgccatcgctatatatcttgtctgaaggggaagatgccaatagatctcgtaatcgatgatcgggaaggaggttcgaaatccgattccgaggacattacccggtctgcaaatcttactgatcagccgagctggaatagggatcacgatgacacagcctcgacccgcagcggagggactcccggaccatcatcgggtggacatacgtcccattcaggcgataacagttccgagcaaggcgacggtttagacaacagcgtggctagtcctagcaccggggatgatgatgacccagacaaagacaagaagcgccacaaaaaacgcggaatctttcctaaggtggccaccaacatcatgcgtgcgtggttgttccagcatcttactcacccctacccctcagaggagcagaaaaaacagctcgcacaggacacgggcctgacgatcctgcaagtaaataattggttcattaacgccaggcgcagaattgtgcagccaatgatcgaccagagcaatcgcgcagggaaatctcctattgttacagtgttcaaatcccggaagcggaagccaagctcatcgcattccccagggggtccgcttcccggaaagtag

SEQ ID NO: 128068 - DNA, 1173 bp, Artificial Sequence
  derived and/or modified sequence
atggcccagagatacgacgacctgccccactacggcggcatggacggcgtgggcatccccagcaccatgtacggcgacccccacgccgccagaagcatgcagcccgtgcaccacctgaaccacggcccccccctgcacagccaccagtacccccacaccgcccacaccaacgccatggcccccagcatgggcagcagcgtgaacgacgccctgaagagagacaaggacgccatctacggccaccccctgttccccctgctggccctgatcttcgagaagtgcgagctggccacctgcacccccagagagcccggcgtggccggcggcgacgtgtgcagcagcgagagcttcaacgaggacatcgccgtgttcgccaagcagatcagagccgagaagcccctgttcagcagcaaccccgagctggacaacctgatgatccaggccatccaggtgctgagattccacctgctggagctggagaaggtgcacgagctgtgcgacaacttctgccacagatacatcagctgcctgaagggcaagatgcccatcgacctggtgatcgacgacagagagggcggcagcaagagcgacagcgaggacatcaccagaagcgccaacctgaccgaccagcccagctggaacagagaccacgacgacaccgccagcaccagaagcggcggcacccccggccccagcagcggcggccacaccagccacagcggcgacaacagcagcgagcagggcgacggcctggacaacagcgtggccagccccagcaccggcgacgacgacgaccccgacaaggacaagaagagacacaagaagagaggcatcttccccaaggtggccaccaacatcatgagagcctggctgttccagcacctgacccacccctaccccagcgaggagcagaagaagcagctggcccaggacaccggcctgaccatcctgcaggtgaacaactggttcatcaacgccagaagaagaatcgtgcagcccatgatcgaccagagcaacagagccgtgagccagggcaccccctacaaccccgacggccagcccatgggcggcttcgtgatggacggccagcagcacatgggcatcagagcccccggccccatgagcggcatgggcatgaacatgggcatggagggccagtggcactacatgtag

SEQ ID NO: 128069 - DNA, 663 bp, Artificial Sequence
  derived and/or modified sequence
atgcagcccgtgcaccacctgaaccacggcccccccctgcacagccaccagtacccccacaccgcccacaccaacgccatggcccccagcatgggcagcagcgtgaacgacgccctgaagagagacaaggacgccatctacggccaccccctgttccccctgctggccctgatcttcgagaagtgcgagctggccacctgcacccccagagagcccggcgtggccggcggcgacgtgtgcagcagcgagagcttcaacgaggacatcgccgtgttcgccaagcagatcagagccgagaagcccctgttcagcagcaaccccgagctggacaacctgatgatccaggccatccaggtgctgagattccacctgctggagctggagaaggtgcacgagctgtgcgacaacttctgccacagatacatcagctgcctgaagggcaagatgcccatcgacctggtgatcgacgacagagagggcggcagcaagagcgacagcgaggacatcaccagaagcgccaacctgaccgaccagcccagctggaacagagaccacgacgacaccgccagcaccagaagcggcggcacccccggccccagcagcggcggccacaccagccacagcggcgacaacagcagcgagcaggcccccctgcccttctag

SEQ ID NO: 128070 - DNA, 1113 bp, Artificial Sequence
  derived and/or modified sequence
atggcccagagatacgacgacctgccccactacggcggcatggacggcgtgggcatccccagcaccatgtacggcgacccccacgccgccagaagcatgcagcccgtgcaccacctgaaccacggcccccccctgcacagccaccagtacccccacaccgcccacaccaacgccatggcccccagcatgggcagcagcgtgaacgacgccctgaagagagacaaggacgccatctacggccaccccctgttccccctgctggccctgatcttcgagaagtgcgagctggccacctgcacccccagagagcccggcgtggccggcggcgacgtgtgcagcagcgagagcttcaacgaggacatcgccgtgttcgccaagcagatcagagccgagaagcccctgttcagcagcaaccccgagctggacaacctgatgatccaggccatccaggtgctgagattccacctgctggagctggagaaggtgcacgagctgtgcgacaacttctgccacagatacatcagctgcctgaagggcaagatgcccatcgacctggtgatcgacgacagagagggcggcagcaagagcgacagcgaggacatcaccagaagcgccaacctgaccgaccagcccagctggaacagagaccacgacgacaccgccagcaccagaagcggcggcacccccggccccagcagcggcggccacaccagccacagcggcgacaacagcagcgagcagggcgacggcctggacaacagcgtggccagccccagcaccggcgacgacgacgaccccgacaaggacaagaagagacacaagaagagaggcatcttccccaaggtggccaccaacatcatgagagcctggctgttccagcacctgacccacccctaccccagcgaggagcagaagaagcagctggcccaggacaccggcctgaccatcctgcaggtgaacaactggttcatcaacgccagaagaagaatcgtgcagcccatgatcgaccagagcaacagagccggcaagagccccatcgtgaccgtgttcaagagcagaaagagaaagcccagcagcagccacagccccggcggccccctgcccggcaagtag

SEQ ID NO: 128071 - protein, 381 aa, Artificial Sequence
  derived and/or modified sequence
MDGVGVPASMYGDPHAPRPIPPVHHLNHGPPLHATQHYGAHAPHPNVMPASMGSAVNDALKRDKDAIYGHPLFPLLALVFEKCELATCTPREPGVAGGDVCSSDSFNEDIAVFAKQVRAEKPLFSSNPELDNLMIQAIQVLRFHLLELEKVHELCDNFCHRYISCLKGKMPIDLVIDERDGSSKSDHEELSGSSTNLADHNPSSWRDHDDATSTHSAGTPGPSSGGHASQSGDNSSEQGDGLDNSVASPGTGDDDDPDKDKKRQKKRGIFPKVATNIMRAWLFQHLTHPYPSEEQKKQLAQDTGLTILQVNNWFINARRRIVQPMIDQSNRAVSQGAAYSPEGQPMGSFVLDGQQHMGIRPAGPMSGMGMNMGMDGQWHYM

SEQ ID NO: 128072 - protein, 238 aa, Artificial Sequence
  derived and/or modified sequence
MDGVGVPASMYGDPHAPRPIPPVHHLNHGPPLHATQHYGAHAPHPNVMPASMGSAVNDALKRDKDAIYGHPLFPLLALVFEKCELATCTPREPGVAGGDVCSSDSFNEDIAVFAKQVRAEKPLFSSNPELDNLMIQAIQVLRFHLLELEKVHELCDNFCHRYISCLKGKMPIDLVIDERDGSSKSDHEELSGSSTNLADHNPSSWRDHDDATSTHSAGTPGPSSGGHASQSGDNSSEQ

SEQ ID NO: 128073 - DNA, 1146 bp, Artificial Sequence
  derived and/or modified sequence
atggacggagtgggggtgcctgctagcatgtacggcgaccctcatgccccgagacccattcccccagtccaccacctgaaccacgggcccccactccatgcaacacagcattatggggctcacgctccccaccccaatgtgatgcccgcgagtatgggttccgctgtaaatgatgccttgaaacgcgataaagacgcgatctacggtcaccctctgtttcctctgctggccctcgtgttcgaaaagtgcgaacttgctacttgtacaccccgggaacccggagtagccggaggagatgtgtgctccagcgatagctttaacgaagacattgccgtcttcgccaagcaggttagggccgaaaagcccttgttcagtagtaacccagagctggacaacctgatgatccaggctattcaagtgcttcggtttcatctgctcgagctggagaaggtgcacgagttatgcgacaacttttgtcataggtatatctcatgtcttaaagggaagatgcccatcgacctggtgatcgacgaaagggatggcagttcgaaatcggaccatgaagaactgtctggttcaagtacgaacttggctgaccacaaccccagttcatggagggatcatgacgacgctacttcaacccactcagccgggaccccggggccatcttcgggtggacacgcctcccaaagtggcgacaattcgagcgagcaaggggatggcctggataactcggtcgcgtcacctggaaccggcgacgatgacgacccagacaaggacaaaaaacggcagaaaaagcgaggcatcttcccaaaggtcgccaccaatattatgcgcgcatggctctttcaacacctgactcatccctacccaagcgaggagcaaaaaaagcagctagcacaggatacgggactgactattctgcaggtaaacaactggttcattaacgcaaggcgccggatcgttcagccaatgatagatcaaagtaaccgagctgtcagccagggcgccgcatatagtcccgaagggcagcccatggggagtttcgtcctcgatgggcagcagcatatgggcatccggcccgcaggccctatgtccggcatgggcatgaatatgggcatggatgggcagtggcattacatgtag

SEQ ID NO: 128074 - DNA, 717 bp, Artificial Sequence
  derived and/or modified sequence
atggatggcgtgggggtaccggcctcaatgtacggagatcctcacgctcctcggcctattccaccggtgcatcacttgaaccacggccccccattacatgccacacagcattatggggctcacgcaccacatccgaatgtgatgcctgcatctatggggtcggccgtgaatgatgccctcaagcgcgataaggacgccatctacggacatcctctcttccccttactggcgctggtgttcgagaagtgtgagctggccacatgtactcctcgcgaacccggagtggctggaggtgatgtttgctcatccgacagcttcaacgaagatattgccgtttttgccaaacaggtgcgggcggagaagccgctgttctcttccaaccctgagctggacaatctaatgattcaggcaattcaggtcctgagatttcacctgcttgaattggaaaaggtgcatgagctttgcgataacttctgccacaggtatatcagttgtctcaagggaaagatgcccatcgaccttgtgatcgacgagcgagacgggagctccaagtcagaccatgaggaactgagcgggagcagtacaaacttggcagatcataatcccagctcatggagggaccatgacgatgctacctccactcacagtgccggaacccctggaccctcatccggcggacacgcatcccaatcaggagacaactcatctgagcagtag

SEQ ID NO: 128075 - DNA, 1146 bp, Artificial Sequence
  derived and/or modified sequence
atggatggagtgggcgtgcctgcctccatgtatggagacccccacgccccccggcccatcccccctgtgcaccacctgaaccacggcccccccctgcacgccacccagcactacggggcccacgccccccaccccaacgtgatgcctgcctccatgggcagcgctgtgaatgatgccctgaagagggacaaggatgccatctacggccaccccctcttccccctgctggccctggtgtttgagaagtgtgagctggccacctgcaccccccgggagcccggggtggccggaggagatgtgtgcagcagtgacagcttcaatgaagatattgctgtgtttgccaagcaggtgcgggcagagaagcccctcttcagcagcaaccctgagctggacaacctgatgatccaggccatccaggtgctgcgcttccacctgctggagctggagaaggtgcatgagctgtgtgacaacttctgccaccgctacatcagctgcctgaagggcaagatgcccatcgacctggtgattgatgaaagagatggcagcagcaagagtgaccacgaggagctgagcggcagcagcaccaacctggccgaccacaaccccagctcctggagggaccatgatgatgccaccagcacccacagcgctggcaccccaggccccagcagcggcggccacgccagccagagcggggacaacagcagcgagcagggagatggcctggacaacagcgtggccagccctggcactggagatgatgatgatcctgacaaggacaagaagaggcagaagaagaggggcatcttccccaaggtggccaccaacatcatgagggcctggctgttccagcacctgacccacccctaccccagcgaggagcagaagaagcagctggcccaggacaccggcctgaccatcctgcaggtgaacaactggttcatcaatgccaggagaagaattgtgcagcccatgattgaccagagcaacagagctgtgtcccagggcgccgcctacagccctgagggccagcccatgggcagctttgtgctggatggccagcagcacatgggcatccggcctgctggccccatgagcggcatgggcatgaacatgggcatggatggccagtggcactacatgtag

SEQ ID NO: 128076 - DNA, 717 bp, Artificial Sequence
  derived and/or modified sequence
atggatggagtgggcgtgcctgcctccatgtatggagacccccacgccccccggcccatcccccctgtgcaccacctgaaccacggcccccccctgcacgccacccagcactacggggcccacgccccccaccccaacgtgatgcctgcctccatgggcagcgctgtgaatgatgccctgaagagggacaaggatgccatctacggccaccccctcttccccctgctggccctggtgtttgagaagtgtgagctggccacctgcaccccccgggagcccggggtggccggaggagatgtgtgcagcagtgacagcttcaatgaagatattgctgtgtttgccaagcaggtgcgggcagagaagcccctcttcagcagcaaccctgagctggacaacctgatgatccaggccatccaggtgctgcgcttccacctgctggagctggagaaggtgcatgagctgtgtgacaacttctgccaccgctacatcagctgcctgaagggcaagatgcccatcgacctggtgattgatgaaagagatggcagcagcaagagtgaccacgaggagctgagcggcagcagcaccaacctggccgaccacaaccccagctcctggagggaccatgatgatgccaccagcacccacagcgctggcaccccaggccccagcagcggcggccacgccagccagagcggggacaacagcagcgagcagtag

SEQ ID NO: 128077 - DNA, 1146 bp, Artificial Sequence
  derived and/or modified sequence
atggacggcgtgggcgtgcccgccagcatgtacggcgacccccacgcccctcgacccatcccacctgtgcaccacctcaatcatggacctccactgcatgccacccaacactatggagctcacgccccccacccaaatgtcatgccggcatcaatggggtccgcagtcaatgatgctctcaaaagggacaaggatgctatctatggccaccccctgtttcccctcttagccttggtgtttgaaaagtgcgagttagccacgtgcacaccccgggaacctggcgttgccggaggagatgtatgcagttccgacagttttaacgaggacatagcggtgttcgccaaacaggtacgcgctgagaaaccactcttctcctcgaaccccgagcttgataatctcatgatccaagcgatccaagttcttaggtttcatctgctggagttagaaaaggtccacgaactctgcgataacttctgccatcgttacatcagctgcctcaagggtaaaatgccgattgaccttgttatcgacgagcgagacggcagcagcaagtctgatcatgaagaactgtccggatcctcaaccaacctggccgaccacaatccttcctcctggcgagatcatgatgacgcaaccagtacacactcagcaggaactcccggaccctcatcaggaggccacgccagccaaagcggagataacagtagtgagcagggagatggcctggataatagtgtggcctcccctggtacaggtgatgacgacgaccctgacaaggacaaaaagcgccaaaagaaacggggtatctttccaaaggtggcaacgaacatcatgcgggcctggttattccaacatctgacacatccatatccctctgaagagcagaagaaacaactcgcgcaggacaccggtctgaccattctccaggttaacaattggttcatcaatgccaggagaaggatcgtgcaacctatgatcgaccagtccaatcgcgccgtttcacagggagcggcttattccccagaaggccagcctatggggtccttcgtgttggatgggcaacagcacatgggtatccgcccagccggccccatgtccggaatgggtatgaatatgggtatggacggacagtggcactacatgtag

SEQ ID NO: 128078 - DNA, 717 bp, Artificial Sequence
  derived and/or modified sequence
atggacggcgtgggcgtgcccgccagcatgtacggcgacccccacgccccgaggccaatacccccagttcatcatctaaaccatggtccaccactgcatgcaactcaacattacggagcacatgcccctcatcctaatgtgatgcctgcctccatgggatccgccgtcaacgatgctctcaaacgtgataaagatgcaatatacggccacccactgtttcctttgctcgccctggtcttcgagaagtgcgaactcgctacttgtaccccacgcgaaccaggggtggcagggggagatgtgtgctcttctgattcctttaatgaagatattgcagtgtttgctaaacaggtgagagcagagaaacccctgttttccagcaaccctgaacttgataatctgatgatccaggccatccaggtcctgaggttccacctacttgaactagagaaggtgcacgaactctgcgataacttttgccatagatacatttcttgcttgaaaggcaagatgcccatagacctagtgatagacgagcgagacggatcctccaaatcagatcatgaggagctgtccggtagctctactaaccttgccgaccacaacccaagcagttggcgggaccacgacgacgcaacgagcacacactctgccggtacccccggaccttccagcggcggccatgctagccagtctggggacaatagcagcgaacagtag

SEQ ID NO: 128079 - DNA, 1146 bp, Artificial Sequence
  derived and/or modified sequence
atggacggtgttggagtgcccgctagcatgtatggggaccctcatgcaccgaggcccattccaccagtgcaccacctaaatcatggcccaccattgcacgcaacccagcactacggtgcacacgcaccacatcccaacgttatgccggcatccatgggatcagctgtgaacgacgcattaaaaagggacaaggacgctatatatggccaccccctctttcccctcctcgcattagtcttcgagaaatgtgagcttgctacctgcactcccagagagcccggtgtggctggaggcgacgtctgcagtagtgattccttcaatgaggacattgctgtgttcgccaaacaagtacgtgcagaaaagccgctcttctcaagcaatccggagctggacaacttaatgatccaggcgatccaggtgctccgctttcatctcttggaactcgaaaaagtccatgaactgtgcgataacttttgccaccgctatatctcatgtttgaagggcaagatgcccatcgatctggtgatcgacgaacgggacggttcatctaagagcgaccacgaagagctgtctggcagcagtacgaatctggctgaccacaaccccagctcttggcgcgatcacgacgacgctacatctacacattcagcaggaacccccggaccttcaagtggtggacacgcatcacagagcggggacaattcctccgagcaaggtgacgggctggataattcagttgcctctcccggaactggagatgacgatgatcctgacaaagataaaaaaaggcagaaaaaacgtggtatcttcccaaaagttgcgacgaacattatgcgggcttggctatttcagcatttgacccacccatatcccagcgaagagcagaagaagcagctagcacaggataccggcctgactattctgcaggttaacaactggtttatcaatgcaaggagacgcattgttcagcctatgatcgatcagagcaaccgcgcagtatctcagggagccgcatacagcccggaaggccagcccatgggcagcttcgtgttggacggtcagcaacatatgggaatacgccctgccggtccaatgtccgggatgggtatgaacatggggatggatggtcaatggcactacatgtag

SEQ ID NO: 128080 - DNA, 717 bp, Artificial Sequence
  derived and/or modified sequence
atggatggtgtgggtgtccccgctagtatgtatggcgacccccacgcacccaggcccattccccctgtccaccatctaaaccatggaccccctctccatgccacgcagcattatggggcacacgccccacacccaaacgttatgcctgcctcaatgggctccgccgtgaacgatgccctgaagcgggacaaggacgctatctatggccaccccttatttccattgcttgcattggtctttgagaagtgtgaactggccacatgtacaccaagggagccaggcgtggccggaggggatgtatgctcatcagatagctttaacgaggacattgccgtgttcgctaagcaggtgcgagcagaaaaacccttgttctctagtaacccagagttggataacctgatgatacaggccatccaggtcctaaggttccacctgctggagctcgagaaagtccatgagctttgtgacaacttttgccatcggtacatcagctgcctgaaggggaaaatgcccatcgacttggttatcgacgaacgcgacggctcttccaagtccgatcacgaagagctgagtggatccagcacgaacctcgccgaccataacccttcctcctggcgtgatcacgacgacgccacttccacacatagcgcaggtacccccggaccatcctccggcggtcacgcatcacagtcaggtgataattcctccgagcagtag

SEQ ID NO: 128081 - DNA, 1146 bp, Artificial Sequence
  derived and/or modified sequence
atggacggcgtgggcgtgcccgccagcatgtacggcgacccccacgcccccagacccatcccccccgtgcaccacctgaaccacggcccccccctgcacgccacccagcactacggcgcccacgccccccaccccaacgtgatgcccgccagcatgggcagcgccgtgaacgacgccctgaagagagacaaggacgccatctacggccaccccctgttccccctgctggccctggtgttcgagaagtgcgagctggccacctgcacccccagagagcccggcgtggccggcggcgacgtgtgcagcagcgacagcttcaacgaggacatcgccgtgttcgccaagcaggtgagagccgagaagcccctgttcagcagcaaccccgagctggacaacctgatgatccaggccatccaggtgctgagattccacctgctggagctggagaaggtgcacgagctgtgcgacaacttctgccacagatacatcagctgcctgaagggcaagatgcccatcgacctggtgatcgacgagagagacggcagcagcaagagcgaccacgaggagctgagcggcagcagcaccaacctggccgaccacaaccccagcagctggagagaccacgacgacgccaccagcacccacagcgccggcacccccggccccagcagcggcggccacgccagccagagcggcgacaacagcagcgagcagggcgacggcctggacaacagcgtggccagccccggcaccggcgacgacgacgaccccgacaaggacaagaagagacagaagaagagaggcatcttccccaaggtggccaccaacatcatgagagcctggctgttccagcacctgacccacccctaccccagcgaggagcagaagaagcagctggcccaggacaccggcctgaccatcctgcaggtgaacaactggttcatcaacgccagaagaagaatcgtgcagcccatgatcgaccagagcaacagagccgtgagccagggcgccgcctacagccccgagggccagcccatgggcagcttcgtgctggacggccagcagcacatgggcatcagacccgccggccccatgagcggcatgggcatgaacatgggcatggacggccagtggcactacatgtag

SEQ ID NO: 128082 - DNA, 717 bp, Artificial Sequence
  derived and/or modified sequence
atggacggcgtgggcgtgcccgccagcatgtacggcgacccccacgcccccagacccatcccccccgtgcaccacctgaaccacggcccccccctgcacgccacccagcactacggcgcccacgccccccaccccaacgtgatgcccgccagcatgggcagcgccgtgaacgacgccctgaagagagacaaggacgccatctacggccaccccctgttccccctgctggccctggtgttcgagaagtgcgagctggccacctgcacccccagagagcccggcgtggccggcggcgacgtgtgcagcagcgacagcttcaacgaggacatcgccgtgttcgccaagcaggtgagagccgagaagcccctgttcagcagcaaccccgagctggacaacctgatgatccaggccatccaggtgctgagattccacctgctggagctggagaaggtgcacgagctgtgcgacaacttctgccacagatacatcagctgcctgaagggcaagatgcccatcgacctggtgatcgacgagagagacggcagcagcaagagcgaccacgaggagctgagcggcagcagcaccaacctggccgaccacaaccccagcagctggagagaccacgacgacgccaccagcacccacagcgccggcacccccggccccagcagcggcggccacgccagccagagcggcgacaacagcagcgagcagtag

SEQ ID NO: 128083 - protein, 626 aa, Artificial Sequence
  derived and/or modified sequence
MDEQEALNSIMNDLVALQMNRRHRMPGYETMKNKDTGHSNRQSDVRIKFEHNGERRIIAFSRPVKYEDVEHKVTTVFGQPLDLHYMNNELSILLKNQDDLDKAIDILDRSSSMKSLRILLLSQDRNHNSSSPHSGVSRQVRIKASQSAGDINTIYQPPEPRSRHLSVSSQNPGRSSPPPGYVPERQQHIARQGSYTSINSEGEFIPETSEQCMLDPLSSAENSLSGSCQSLDRSADSPSFRKSRMSRAQSFPDNRQEYSDRETQLYDKGVKGGTYPRRYHVSVHHKDYSDGRRTFPRIRRHQGNLFTLVPSSRSLSTNGENMGLAVQYLDPRGRLRSADSENALSVQERNVPTKSPSAPINWRRGKLLGQGAFGRVYLCYDVDTGRELASKQVQFDPDSPETSKEVSALECEIQLLKNLQHERIVQYYGCLRDRAEKTLTIFMEYMPGGSVKDQLKAYGALTESVTRKYTRQILEGMSYLHSNMIVHRDIKGANILRDSAGNVKLGDFGASKRLQTICMSGTGMRSVTGTPYWMSPEVISGEGYGRKADVWSLGCTVVEMLTEKPPWAEYEAMAAIFKIATQPTNPQLPSHISEHGRDFLRRIFVEARQRPSAEELLTHHFAQLMY

SEQ ID NO: 128084 - DNA, 1881 bp, Artificial Sequence
  derived and/or modified sequence
atggacgagcaggaggccctgaacagcatcatgaacgacctggtggccctgcagatgaacagaagacacagaatgcccggctacgagaccatgaagaacaaggacaccggccacagcaacagacagagcgacgtgagaatcaagttcgagcacaacggcgagagaagaatcatcgccttcagcagacccgtgaagtacgaggacgtggagcacaaggtgaccaccgtgttcggccagcccctggacctgcactacatgaacaacgagctgagcatcctgctgaagaaccaggacgacctggacaaggccatcgacatcctggacagaagcagcagcatgaagagcctgagaatcctgctgctgagccaggacagaaaccacaacagcagcagcccccacagcggcgtgagcagacaggtgagaatcaaggccagccagagcgccggcgacatcaacaccatctaccagccccccgagcccagaagcagacacctgagcgtgagcagccagaaccccggcagaagcagccccccccccggctacgtgcccgagagacagcagcacatcgccagacagggcagctacaccagcatcaacagcgagggcgagttcatccccgagaccagcgagcagtgcatgctggaccccctgagcagcgccgagaacagcctgagcggcagctgccagagcctggacagaagcgccgacagccccagcttcagaaagagcagaatgagcagagcccagagcttccccgacaacagacaggagtacagcgacagagagacccagctgtacgacaagggcgtgaagggcggcacctaccccagaagataccacgtgagcgtgcaccacaaggactacagcgacggcagaagaaccttccccagaatcagaagacaccagggcaacctgttcaccctggtgcccagcagcagaagcctgagcaccaacggcgagaacatgggcctggccgtgcagtacctggaccccagaggcagactgagaagcgccgacagcgagaacgccctgagcgtgcaggagagaaacgtgcccaccaagagccccagcgcccccatcaactggagaagaggcaagctgctgggccagggcgccttcggcagagtgtacctgtgctacgacgtggacaccggcagagagctggccagcaagcaggtgcagttcgaccccgacagccccgagaccagcaaggaggtgagcgccctggagtgcgagatccagctgctgaagaacctgcagcacgagagaatcgtgcagtactacggctgcctgagagacagagccgagaagaccctgaccatcttcatggagtacatgcccggcggcagcgtgaaggaccagctgaaggcctacggcgccctgaccgagagcgtgaccagaaagtacaccagacagatcctggagggcatgagctacctgcacagcaacatgatcgtgcacagagacatcaagggcgccaacatcctgagagacagcgccggcaacgtgaagctgggcgacttcggcgccagcaagagactgcagaccatctgcatgagcggcaccggcatgagaagcgtgaccggcaccccctactggatgagccccgaggtgatcagcggcgagggctacggcagaaaggccgacgtgtggagcctgggctgcaccgtggtggagatgctgaccgagaagcccccctgggccgagtacgaggccatggccgccatcttcaagatcgccacccagcccaccaacccccagctgcccagccacatcagcgagcacggcagagacttcctgagaagaatcttcgtggaggccagacagagacccagcgccgaggagctgctgacccaccacttcgcccagctgatgtactag

SEQ ID NO: 128085 - DNA, 1881 bp, Artificial Sequence
  derived and/or modified sequence
atggacgagcaggaagccctcaacagcattatgaacgatctggtggcactgcagatgaaccgccgccatcgtatgcccggatacgaaacaatgaaaaataaagacaccggccatagcaataggcagagcgatgttcggataaaattcgaacataatggagaacggcggatcatcgccttctcccgccccgtgaaatacgaggatgtggaacacaaagtgacgactgtctttgggcaaccccttgatttgcattatatgaacaacgagctgagcatactgctgaaaaaccaggacgacctcgacaaagctatagatatccttgacagatcaagctccatgaaaagtctgcgcatcttgctgctcagccaagaccggaaccacaactcttcttctccacactctggcgttagtcgccaggttaggataaaagcgagtcagagtgcgggagacatcaacaccatctaccaacctcctgaacctaggtccaggcacctttccgtgtcttctcagaaccctggccgcagttctccgccaccgggctatgtgcccgaacgccagcagcacattgcgcgccagggcagctatacatctatcaattctgagggagagtttatcccggaaaccagtgaacagtgcatgttagatcccttgtcctctgcggaaaattctttgtccggttcctgtcagagcctggataggtctgcagattcaccttcttttcgcaagtccaggatgtcaagggctcaatctttcccagataaccgacaggaatatagcgaccgagagacccaactgtacgacaagggggtaaaaggagggacatacccacggcgctaccacgtgagtgtccaccacaaggactattcagatggtaggaggacatttccgagaatccggcgtcaccagggaaatctcttcacgctggtcccctctagcaggagcctctctacaaacggggaaaacatgggactggctgtgcagtatctagatccccgtggaagattacgaagtgctgattccgagaatgccctgtcggtccaagaaaggaacgtgccaaccaagagcccttccgcacccatcaactggcggagaggcaagctgctgggtcagggtgcctttggcagggtttacctgtgttatgatgtcgatacaggcagagagctggccagcaagcaagtgcagttcgatcccgattcacctgagacaagtaaggaggtaagcgcccttgaatgcgagatccagctgcttaaaaacctgcaacacgaaaggattgtgcaatactacggatgtctcagagacagggcagagaagaccctaaccattttcatggaatatatgcccggaggatcagtcaaggaccaattaaaggcctatggcgccttaactgagtctgtcactcgaaagtacacgcgccagattctggagggaatgagttatcttcactcaaatatgatagtgcatagagatatcaaaggcgccaacattctccgcgatagcgctggcaacgtcaaactcggggatttcggcgcgagcaaacggctgcaaacaatttgtatgtctggcaccggaatgagaagtgtcaccggcaccccttattggatgtcaccagaggttatatctggagaaggatatggtcggaaagctgacgtctggagtctgggatgtactgtcgtggagatgctgaccgagaaaccaccatgggcagaatacgaggcaatggcggcgatattcaagattgccacgcagcctaccaaccctcagcttccaagtcatatatccgaacatggccgcgacttcctgcggcgtatctttgtagaggcgagacaacggccgtccgccgaagagctcttgactcatcattttgcccagctgatgtactag

SEQ ID NO: 128086 - DNA, 4730 bp, Artificial Sequence
  derived and/or modified sequence
gagaacggtggccggacggagagactgcgggtctgagggactggcgggcgggcgggccgagcggcgccgccgaggccgggctgggccgagcccaggagcgcccgggatgtagcgggccaccctgccgatgccacagcgcccggccgcgggcggagccggagccggagcctggggaggcggcgggggcccagagcgcagcccgcgccccccgcgcggagccaggcccgctgccgtccccgccgcccgggcccccggcatgcagccccggctgcggaggtgacactcacggaccttagccaccgccgccgccatcgccaccatggacgaacaggaggcattgaactcaatcatgaacgatctggtggccctccagatgaaccgacgtcaccggatgcctggatatgagaccatgaagaacaaagacacaggtcactcaaataggcagagtgacgtcagaatcaagttcgagcacaacggggagaggcgaattatagcgttcagccggcctgtgaaatatgaagatgtggagcacaaggtgacaacagtatttggacaacctcttgatctacattacatgaacaatgagctctccatcctgctgaaaaaccaagatgatcttgataaagcaattgacattttagatagaagctcaagcatgaaaagccttaggatattgctgttgtcccaggacagaaaccataacagttcctctccccactctggggtgtccagacaggtgcggatcaaggcttcccagtccgcaggggatataaatactatctaccagccccccgagcccagaagcaggcacctctctgtcagctcccagaaccctggccgaagctcacctccccctggctatgttcctgagcggcagcagcacattgcccggcaggggtcctacaccagcatcaacagtgagggggagttcatcccagagaccagcgagcagtgcatgctggatcccctgagcagtgcagaaaattccttgtctggaagctgccaatccttggacaggtcagcagacagcccatccttccggaaatcacgaatgtcccgtgcccagagcttccctgacaacagacaggaatactcagatcgggaaactcagctttatgacaaaggggtcaaaggtggaacctacccccggcgctaccacgtgtctgtgcaccacaaggactacagtgatggcagaagaacatttccccgaatacggcgtcatcaaggcaacttgttcaccctggtgccctccagccgctccctgagcacaaatggcgagaacatgggtctggctgtgcaatacctggacccccgtgggcgcctgcggagtgcggacagcgagaatgccctctctgtgcaggagaggaatgtgccaaccaagtctcccagtgcccccatcaactggcgccggggaaagctcctgggccagggtgccttcggcagggtctatttgtgctatgacgtggacacgggacgtgaacttgcttccaagcaggtccaatttgatccagacagtcctgagacaagcaaggaggtgagtgctctggagtgcgagatccagttgctaaagaacttgcagcatgagcgcatcgtgcagtactatggctgtctgcgggaccgcgctgagaagaccctgaccatcttcatggagtacatgccagggggctcggtgaaagaccagttgaaggcttacggtgctctgacagagagcgtgacccgaaagtacacgcggcagatcctggagggcatgtcctacctgcacagcaacatgattgttcaccgggacattaagggagccaacatcctccgagactctgctgggaatgtaaagctgggggactttggggccagcaaacgcctgcagacgatctgtatgtcggggacgggcatgcgctccgtcactggcacaccctactggatgagccctgaggtgatcagcggcgagggctatggaaggaaagcagacgtgtggagcctgggctgcactgtggtggagatgctgacagagaaaccaccgtgggcagagtatgaagctatggccgccatcttcaagattgccacccagcccaccaatcctcagctgccctcccacatctctgaacatggccgggacttcctgaggcgcatttttgtggaggctcgccagagaccttcagctgaggagctgctcacacaccactttgcacagctcatgtactgagctctcacggccacacagctgccggtcgccctttgctgcatggcagggggctgctgctgggctcagtgaagttgctgcttctcccaggcaaggctgtggaccatggagtggcagcccagccagcgtcggtctgtgccccttccgccactggggctcagagccggggtggggtggctgcagcctcaggactgggagcccccagcctgtcagatccaggagctccagtgtcctgagctcagcgtggaggggtaggggctgggaacagtgtgcaaggcagccgtgggccccaccctcggggatgtgtcctgacactgcaattggcaccgaagcccagagggtctgggggcacaagactgacgccagggtatgaagagtgttattttcattcaaagtgttattttgtttttccttccaatgtctggagaccaccagggcatctctgggctggatgagctcccacaagcctgagggaaaggccagcactcgctagcagtggcaggcagaggcccaggctgccgtcccctagagtcccaggttggctctgccagtcctgtcctttaccaaagatgaatgaagcaaatgtcatgctgccttattcagggaaggaggagcctgtcctgcctgtggccatgaccctgcctctcccaggcaggggcccgcgatgtggaactgctgccactgaggggggatccagttttgtcaatgcagttgtctctgttttacaagttggagtcactcttatgctgtacccagtttctaaactggagactgtgtgtgccctctgggctctgagtacccctgctttgggcttgggcctaggctgcattgaaaagagctgaaggttgtggcctttgcgctcctggcccagcctttgttccccactggagcagaaggggagatggacgacacggtcggggcatctggcctggccagtgccctgatcccagagagcccgaggaggtgtctcaggctgcctgagtcgtgacctgctaggccagagcccactccatctggtagaagggaaagcccatatgctaccaccagctgtgtccaaaaccgccagctctgttcttcctcagccagcctcgcccatccccttgaggtctcagcccctttcccttgtagctcctcccctggagggggaatggcagcaggggttggggaaacagcatctccaagcagcttagagttggccatatttacctcagcctgggcgctggtcctttcttccggcccctcccctccaaaatgtgcctattgctagagctcctccctctcaacacccagtttccttgggagttgtcattaaaggaaaaaaaaaaaaaaaaaagccagtgcccagggatgggcatctccagggagctggggattagtgccaggcagccctgccagccatgcctacatccccatgggcacagaacaagccaaagccttcgttgtatgttgacgatgcacttttatgaatgtagtttctatcgctgtttttagccttttcacatcatgtaatgtgaggccttgtacttgttaatttatatctcagatcatatttgatggtttttatatatatcaattctagactgttacaggtgacggacgcctcaagagagagaagagaaaatgaaagcagctggttttgcagaagtgtgtgtcgcatgcgccagttgggcctggaccctcctgtgtccatccctgttcccccaggggctctatcagcccctgtaccccacactgccctctgaagacaacacaggctcctgcttccacctcggcccttgcccagggtggggcctggccctcatcttgaccaaagctgctgtgtggcagctcggcctctctacgaccccatcttggtggctgcacactcttcctggcccgcacccccatccccagtccctgttccccaagaggatacagagcacggtgctggctgactcaactgtgcgtcccaggttcagggtcttacagagctccaccccctggggtcttacctcactgggaatgtgttttgaaaatgaatttgaagacaagccaacaaaccctgcactccaaaaaagcaaaacagaccctaatttttttgtgccaaaaactgtggacatgctggctcagcatcctcaggaccaagttgttgcttaatttattgttttttaataactaatccagataaaaagttgtggggcttcagggtgacctgggcccaaaggttctgaagggcagttcctggcagccccaggcttgctgtgggaaggggccgtgccgtcactttctcatcattccatggggtgtgtctgcctgggccaactctgcatggagaggccagggctggggacagtccgcactctgccaccctcctgccccttccacccaccccagctctatgtctgtgtctgaattgtggatcgtgcagccatggttattgtggaactgtggaacctgcagccatagttatttgactatatcttgaccgagggcttgcagtgcaaagccaggccagtgttgcgcattacttacaataaaagggatcatttatatc

SEQ ID NO: 128087 - DNA, 1881 bp, Artificial Sequence
  derived and/or modified sequence
atggatgagcaggaggccctgaacagcatcatgaatgacctggtggccctgcagatgaacagaagacacaggatgcctggctatgagaccatgaagaacaaggacaccggccacagcaaccggcagagtgatgtgcgcatcaagtttgagcacaacggggagcggcgcatcatcgccttcagcaggcctgtgaagtatgaagatgtggagcacaaggtgaccaccgtgtttggccagcccctggacctgcactacatgaacaatgagctgagcatcctgctgaagaaccaggatgacctggacaaggccatcgacatcctggacaggagcagctccatgaagagcctgcgcatcctgctgctgagccaggacaggaaccacaacagcagcagcccccacagcggcgtgtcccggcaggtgcgcatcaaggccagccagagcgctggggacatcaacaccatctaccagcccccagagcccaggagccgccacctgtctgtgagcagccagaaccctggccgcagcagccccccacctggctacgtgcctgagcggcagcagcacatcgcccggcagggcagctacaccagcatcaacagcgagggggagttcatccctgagaccagcgagcagtgcatgctggaccccctgagcagcgctgagaacagcctgagcggcagctgccagagcctggacagatctgctgacagccccagcttcaggaagagcaggatgagccgggcccagagcttcccagacaaccggcaggagtacagcgaccgggagacccagctgtatgacaagggcgtgaagggcggcacctacccccggcgctaccacgtgtctgtgcaccacaaggactacagtgatggccgccgcaccttcccccgcatcagaagacaccagggcaacctcttcaccctggtgcccagcagccgcagcctgagcaccaacggggagaacatgggcctggccgtgcagtacctggacccccggggccgcctgcggtctgctgacagtgaaaatgccctgtctgtgcaggagagaaatgtgcccaccaagagccccagcgcccccatcaactggaggcggggcaagctgctgggccagggcgccttcggccgggtgtacctgtgctatgatgtggacaccggccgggagctggccagcaagcaggtgcagtttgatcctgacagccctgagaccagcaaggaggtgtctgccctggagtgtgagatccagctgctgaagaacctgcagcacgagcgcatcgtgcagtactacggctgcctgcgggacagagctgagaagaccctgaccatcttcatggagtacatgcctgggggctctgtgaaggaccagctgaaggcctacggggccctgacagagagcgtgaccaggaagtacacccggcagatcctggagggcatgagctacctgcacagcaacatgattgtgcaccgggacatcaagggggccaacatcctgcgggacagcgctggaaatgtgaagctgggggactttggagccagcaagaggctgcagaccatctgcatgagcggcaccggcatgaggtctgtgacaggcaccccctactggatgagccctgaggtgatcagcggggagggctacggcaggaaggcagatgtgtggagcctgggctgcaccgtggtggagatgctgacagagaagccaccctgggccgagtatgaggccatggccgccatcttcaagatcgccacccagcccaccaacccccagctgcccagccacatcagcgagcacggccgggacttcctgcggcgcatctttgtggaggcccggcagaggcccagcgctgaggagctgctgacccaccactttgcccagctgatgtactag

SEQ ID NO: 128088 - DNA, 1881 bp, Artificial Sequence
  derived and/or modified sequence
atggacgagcaggaggccctgaacagcatcatgaacgacctggtggcccttcaaatgaacaggcgacacaggatgccaggctacgagactatgaagaataaggatacaggacactctaaccggcagagcgacgtgagaatcaagtttgagcataatggcgagaggcggatcatagcatttagccggcctgtgaaatacgaggacgtggaacacaaggttaccacagtgttcgggcagcccctggacctccattatatgaataacgaactgagcattctgctcaaaaatcaggatgacctggataaagccatagatattctggaccgcagctcctctatgaagtcgctccgcatcctgctcctttctcaggacaggaatcataatagtagcagccctcactcaggtgtatcaagacaagttagaataaaggccagtcagtccgcaggcgatataaacacaatctaccaaccacccgagcccaggagtcggcatctgtcagtgtccagtcaaaaccctggcagatcctcaccaccaccagggtatgtgccggaaagacagcagcatattgctcggcaggggtcatacacaagtattaacagtgagggagagttcatccctgagacctctgaacaatgtatgctggacccgctgtcgagcgcggagaatagccttagcggcagctgccagtcacttgatcgcagcgcggattctccttcattccgcaaaagcaggatgtcacgggcgcagagtttcccagataatcggcaggaatactctgacagggaaacccaactgtatgataaaggagtcaaaggggggacctacccacgccggtatcacgtcagcgtgcaccataaagattattccgatgggcgaaggacttttccccgtatccgccggcaccaggggaacttatttacactggtgccttcctcacgctccctcagcacaaatggggaaaatatggggctggctgtccagtatctcgatcctcggggtcggttgagatcagcagatagcgagaatgctctcagcgtgcaggaacggaacgtccctacaaagagcccttccgcaccaataaactggaggcggggaaagctgctcgggcaaggggcctttgggcgggtatatctgtgttacgacgtggataccggccgggagctagcatccaaacaggtgcagttcgatcctgacagcccagagacttccaaagaagtgtcagctcttgagtgtgagatccagcttctcaaaaatctgcaacacgagcgtattgtacaatactatggctgcctgcgggacagggcagagaaaacactgacaatcttcatggaatacatgcccggagggtcagtcaaggaccagctcaaagcgtacggggcactaacagaatctgttacgcggaaatacacccggcagatcttggagggcatgagttatctccattctaacatgatcgtgcatcgtgatatcaagggagccaatatactgcgcgacagcgccggcaacgtcaaactcggcgattttggagcctccaaaagactccagaccatttgcatgtccggaactggtatgaggtccgttactggcaccccatactggatgagccccgaagtgatttcaggcgagggatatggaagaaaggcagacgtttggagccttgggtgtacggtcgttgagatgttgacggaaaagcctccctgggcggagtacgaggccatggcagcaatattcaaaattgccacccaacctaccaacccccagctgcctagtcatatcagtgaacacggacgcgactttttgaggaggatttttgtggaggccaggcagcgtcctagtgccgaggagctgctaacccaccactttgcccagcttatgtactag

SEQ ID NO: 128089 - DNA, 1881 bp, Artificial Sequence
  derived and/or modified sequence
atggacgagcaggaggcccttaacagtattatgaacgacctggtggcactgcaaatgaacaggcgacacagaatgcctggctacgagactatgaagaataaggacactggacacagcaacaggcagtccgatgtccgaattaaattcgaacacaacggcgagcgcaggattattgcattcagccgccctgtgaagtacgaggatgtcgagcacaaagtaacgacagtctttggacaacctctggatttgcattacatgaataatgagctgagtatcctactcaaaaaccaggatgatctcgataaggcaatagacattctagatcgctcgagctctatgaagtctctcagaatactgctattatcccaggataggaaccacaatagtagcagtccccattctggagtctcccgccaggtgcgcatcaaggcaagccaatctgccggagatataaataccatctaccagccacctgagcccagaagtagacatttgtccgtttcctcccagaaccccggtcggtcatccccccctcctggatacgtgcccgagaggcagcaacacattgccagacaggggtcatatacctctatcaactctgaaggtgaatttattcctgaaacttcagagcaatgcatgttagatcctctctcgagcgcagaaaactctcttagtgggtcctgtcagtccctggatagatcagccgactctccctcattccgcaagagccgtatgagcagggcccaatctttccccgacaacagacaagaatacagtgaccgcgaaacccagctctacgacaagggtgtgaaaggcggtacctatccccgtcgttaccacgtgtctgtgcatcacaaggactattctgacggccgaaggacctttccacggatacgtcgacaccagggcaacctgtttacgttagttccatcttcccgctccctgtctacaaatggcgaaaacatggggctcgcagtgcagtacctggaccctcgcggtagattacggtctgcagactcagaaaacgctctctccgtgcaagagcggaacgtcccgacaaagtccccatcagcacccattaattggaggcgtggcaagcttctcggccagggagcctttggacgcgtgtacttatgttacgatgttgacactggaagggaactcgcctcaaagcaggtccagttcgatccagactcccctgaaacctcaaaagaggtctcagcactcgagtgcgagatccagttgctgaaaaacttgcagcacgaaaggattgtacagtactacggctgtctcagggaccgggctgagaaaacactgactatcttcatggaatacatgcctggaggttcagtcaaagatcagctgaaagcttacggcgcactcactgagtccgtgaccaggaaatatacaaggcagattctggagggaatgtcctatctgcactcgaacatgatagtccaccgggatatcaagggggcaaacattctgcgcgactctgcgggaaatgtaaagctgggggatttcggcgctagcaagaggttacagactatctgcatgtctgggaccggaatgcggagtgtgacagggacaccttattggatgtcgccagaagtaatttcaggtgaggggtatgggaggaaagcagacgtctggagcttgggttgtactgttgtggaaatgctgaccgaaaaaccaccctgggccgaatatgaagctatggctgccatcttcaagatcgcaacccaaccgaccaaccctcaactgcctagccatattagcgaacatggcagggacttcctccgccgaattttcgtggaggcaagacagcgtccatccgccgaagaactgctgacacatcacttcgcgcagctgatgtattag

SEQ ID NO: 128090 - protein, 335 aa, Artificial Sequence
  derived and/or modified sequence
MVRRDRLRRMREWWVQVGLLAVPLLAAYLHIPPPQLSPALHSWKSSGKFFTYKGLRIFYQDSVGVVGSPEIVVLLHGFPTSSYDWYKIWEGLTLRFHRVIALDFLGFGFSDKPRPHHYSIFEQASIVEALLRHLGLQNRRINLLSHDYGDIVAQELLYRYKQNRSGRLTIKSLCLSNGGIFPETHRPLLLQKLLKDGGVLSPILTRLMNFFVFSRGLTPVFGPYTRPSESELWDMWAGIRNNDGNLVIDSLLQYINQRKKFRRRWVGALASVTIPIHFIYGPLDPVNPYPEFLELYRKTLPRSTVSILDDHISHYPQLEDPMGFLNAYMGFINSF

SEQ ID NO: 128091 - DNA, 2409 bp, Artificial Sequence
  derived and/or modified sequence
agcacatgctgggctcgggggcgatgggcttgtgcgcggacctggcgacgctctagccccgagccgcgtattcgtggccgggtcctccctgggaacagggtgaaggccgagaacctctggcctcaggaagcgcatgcgcaaccggttctccgaaacatggagtcctgtaggcaaggtcttacctgaatcaggatgagggagtggtgggtccaggtggggctgctggccgtgcccctgcttgctgcgtacctgcacatcccaccccctcagctctcccctgcccttcactcatggaagtcttcaggcaagtttttcacttacaagggactgcgtatcttctaccaagactctgtgggtgtggttggaagtccagagatagttgtgcttttacacggttttccaacatccagctacgactggtacaagatttgggaaggtctgaccttgaggtttcatcgggtgattgcccttgatttcttaggctttggcttcagtgacaaaccgagaccacatcactattccatatttgagcaggccagcatcgtggaagcgcttttgcggcatctggggctccagaaccgcaggatcaaccttctttctcatgactatggagatattgttgctcaggagcttctctacaggtacaagcagaatcgatctggtcggcttaccataaagagtctctgtctgtcaaatggaggtatctttcctgagactcaccgtccactccttctccaaaagctactcaaagatggaggtgtgctgtcacccatcctcacacgactgatgaacttctttgtattctctcgaggtctcaccccagtctttgggccgtatactcggccctctgagagtgagctgtgggacatgtgggcagggatccgcaacaatgacgggaacttagtcattgacagtctcttacagtacatcaatcagaggaagaagttcagaaggcgctgggtgggagctcttgcctctgtaactatccccattcattttatctatgggccattggatcctgtaaatccctatccagagtttttggagctgtacaggaaaacgctgccgcggtccacagtgtcgattctggatgaccacattagccactatccacagctagaggatcccatgggcttcttgaatgcatatatgggcttcatcaactccttctgagctggaaagagtagcttccctgtattacctcccctactcccttatgtgttgtgtattccacttaggaagaaatgcccaaaagaggtcctggccatcaaacataattctctcacaaagtccactttactcaaattggtgaacagtgtataggaagaagccagcaggagctctgactaaggttgacataatagtccacctcccattactttgatatctgatcaaatgtatagacttggctttgttttttgtgctattaggaaattctgatgagcattactattcactgatgcagaaagacgttcttttgcataaaagacttttttttaacactttggacttctctgaaatatttagaagtgctaatttctggcccacccccaacaggaattctatagtaaggaggaggagaaggggggctccttccctctcctcgaatgacgttatgggcacatgccttttaaaagttctttaagcaacacagagctgagtcctctttgtcatacctttggatttagtgtttcatcagctgtttttagttataaacattttgttaaaatagatattggtttaaatgatacagtattttaggtatgatttaagactatgatttacctatacattatatatattttataaagatactaaaccagcatacccttactctgccagagtagtgaagctaattaaacacatttggtttctgaataaattgaactaaatccaaactatttcctaaaatcacaggacattaaggaccaatagcatctgtgccagagatgtactgttattagctgggaagaccaattctaacagcaaataacagtctgagactcctcatacctcagtggttagaagcatgtctctcttgagctacagtagaggggaagggattgttgtgtagtcaagtcaccatgctgaatgtacactgattcctttatgatgactgcttaactccccactgcctgtcccagagaggctttccaatgtagctcagtaattcctgttactttacagacaggaaagttccagaaactttaagaacaaactctgaaagacctatgagcaaatggtgctgaatactttttttttaaagccacatttcattgtcttagtcaaagcaggattattaagtgattatttaaaattcgtttttttaaattagcaacttcaagtataacaactttgaaactggaataagtgtttattttctattaataaaaatgaattgtgacaaaa

SEQ ID NO: 128092 - protein, 255 aa, Artificial Sequence
  derived and/or modified sequence
MKALLALPLLLLLSTPPCAPQVSGIRGDALERFCLQQPLDCDDIYAQGYQSDGVYLIYPSGPSVPVPVFCDMTTEGGKWTVFQKRFNGSVSFFRGWNDYKLGFGRADGEYWLGLQNMHLLTLKQKYELRVDLEDFENNTAYAKYADFSISPNAVSAEEDGYTLFVAGFEDGGAGDSLSYHSGQKFSTFDRDQDLFVQNCAALSSGAFWFRSCHFANLNGFYLGGSHLSYANGINWAQWKGFYYSLKRTEMKIRRA

SEQ ID NO: 128093 - DNA, 768 bp, Artificial Sequence
  derived and/or modified sequence
atgaaggcgctgttagctctgcctctactgctcctgctgagtactcctccatgtgctcctcaggtcagcggcataaggggcgacgccctcgaacgcttttgcctccaacagcccctcgattgcgacgatatctacgcccaagggtatcagtccgatggtgtatacctgatctacccgtctggaccgtccgtccccgttcctgttttctgtgacatgaccacagaaggaggaaagtggacagtgtttcagaaaagattcaacggaagcgtcagcttttttagaggctggaatgactacaagctgggcttcggacgagccgatggcgaatactggcttgggctgcagaatatgcaccttcttacacttaagcagaagtacgagctgcgcgtggacttggaagatttcgagaataacaccgcatatgctaaatacgctgacttctcaatttcaccaaatgcagtttcagctgaagaagacgggtatacgctattcgtggcaggctttgaggacggcggcgctggggactccctcagttaccattcaggccagaagttctcgaccttcgatagagatcaagatttgtttgtccagaattgtgcagccctcagcagcggcgcgttctggttcaggagctgtcattttgcaaacctgaatggcttctacctgggcggcagccatttatcctatgccaacggcatcaactgggcccaatggaaaggcttttattatagcctcaagcgcactgagatgaagatacggagagcatag

SEQ ID NO: 128094 - DNA, 768 bp, Artificial Sequence
  derived and/or modified sequence
atgaaggccctgctggccctgcccctgctgctgctgctgagcaccccaccctgtgccccccaggtgtctggcatcagaggagatgccctggagcgcttctgcctgcagcagcccctggactgtgatgacatctatgcccagggctaccagagtgatggagtgtacctgatctaccccagcggccccagcgtgcctgtgcctgtgttctgtgacatgaccacagagggcggcaagtggacagtgttccagaagcgcttcaatggatctgtgtccttcttccggggctggaatgactacaagctgggcttcggccgggcagatggagagtactggctgggcctgcagaacatgcacctgctgaccctgaagcagaagtatgagctgcgggtggacctggaggactttgagaacaacacagcctatgccaagtatgctgacttcagcatcagccccaatgctgtgtctgctgaggaggatggctacaccctgtttgtggccggctttgaagatggaggagctggggacagcctgagctaccacagcggccagaagttcagcacctttgaccgggaccaggacctgtttgtgcagaactgtgccgccctgagcagcggggccttctggttccgcagctgccactttgccaacctgaatggcttctacctgggcggcagccacctgtcctatgccaacggcatcaactgggcccagtggaagggcttctactacagcctgaagaggacagagatgaagatcagaagagcctag

SEQ ID NO: 128095 - DNA, 1873 bp, Artificial Sequence
  derived and/or modified sequence
cggctggcgggggcccagcgcataactctgggcggttgcagtctggggccgcagacacccagccactctgagcagaactgacagcatgaaggcactcctggccctgccgctgctgctgcttctctccacgcccccgtgtgccccccaggtctccgggatccgaggagatgctctggagaggttttgccttcagcaacccctggactgtgacgacatctatgcccagggctaccagtcagacggcgtgtacctcatctacccctcgggccccagtgtgcctgtgcccgtcttctgtgacatgaccaccgagggcgggaagtggacggttttccagaagagattcaatggctcagtaagtttcttccgcggctggaatgactacaagctgggcttcggccgtgctgatggagagtactggctggggctgcagaacatgcacctcctgacactgaagcagaagtatgagctgcgagtggacttggaggactttgagaacaacacggcctatgccaagtacgctgacttctccatctccccgaacgcggtcagcgcagaggaggatggctacaccctctttgtggcaggctttgaggatggcggggcaggtgactccctgtcctaccacagtggccagaagttctctaccttcgaccgggaccaggacctctttgtgcagaactgcgcagctctctcctcaggagccttctggttccgcagctgccactttgccaacctcaatggcttctacctaggtggctcccacctctcttatgccaatggcatcaactgggcccagtggaagggcttctactactccctcaaacgcactgagatgaaaatccgccgggcctgaagggctggccccctcaggcacctttcctcccctggacacccatggtctccatgagtgctccctctgctgcccctgatgcatgcttctgctgattcccgagcaccaactccttacaagggggccttgtggctctcagccatgccacatccctgtcacacacccagggcatccattcctaagccagacccggctcccctacacctgaagttacactgccagcagttccccaggcctcttccgagaggcacatggttctagcctggacctggctgggctccatgagaatgagttgcctccaacctgtcccaacagctgacagccaggagccactctcccagctgcaggcctttgtggtccatcttgtcctgcttcctcactgtggacccctgtctgggccaccctagtgtgctaagctgagcagtgcagtgtgaacagggcccatggtgtattctaggccacagcccagcactcctctgggctgctctcaaaccatgtcccatcttcagcatccctcccaccaacttactcccctgtggtgagtaccgtggaaccccagcccacctcactatcatactcagcttcccctgatggcccatcccagcccctgaagctctatgccaagaacacagctaccgcacaccaccctgaaacagccacagccaaggtaggcatgcatatgaggtcttccccataccctctgggtgttgagaggtttagccacatgagggagcagaggacaatctctgcagggctgggagtgggtagggactgaaggtctcaataaaccttcagaacctgaatgaactggcttcatacacacaaacatatttgtttatcccccaaatgtaggcacctggctcctccttgctcccctgctgatggtgtcctaccccgaactccaaaaattacacctggagtcaggtgcagaagggaaccttgtatttcacaggcctcattttgatggcaaaaagacagtgtaataataacataataataataaaaatataatactgaaaagga

SEQ ID NO: 128096 - DNA, 768 bp, Artificial Sequence
  derived and/or modified sequence
atgaaggccctgctggccctgcccctgctgctgctgctgagcacccctccatgtgcgcctcaggtgtctggaattcgaggggacgctcttgagaggttctgcctgcagcagcctctggattgcgacgacatctatgcccagggttatcagtcggatggcgtgtatctcatatacccctccggaccctcagtcccagtaccagtattttgtgacatgacaactgaaggcggtaaatggacagtttttcagaagagatttaacgggagtgttagtttctttcgtggatggaacgattacaaattggggtttggaagggctgatggcgagtattggctgggcttgcagaacatgcacctacttactctcaaacagaagtatgaactgcgggtcgatcttgaggattttgaaaacaacacagcctatgccaagtacgccgatttttcaatctctcccaacgctgtcagcgccgaagaggacgggtacactctcttcgttgccggatttgaggacggaggcgctggggattcgttgtcctatcatagtggtcagaagttctcaacgttcgatcgcgaccaggatctgtttgtccagaattgtgccgccctatcttctggagcattctggttcagatcctgccacttcgctaatctcaacggtttttacctgggcggctctcacttgtcttacgcgaatggaattaattgggcccagtggaaaggcttttattacagtctgaagcggaccgagatgaagattcggagggcgtag

SEQ ID NO: 128097 - DNA, 768 bp, Artificial Sequence
  derived and/or modified sequence
atgaaggccctgctggccctccctctgctgctgctgttgtctacacccccatgcgctcctcaggtgtctggcatccggggtgacgctcttgagcgattttgtcttcagcagcccctcgattgcgacgacatttacgcacaaggttaccaatctgacggagtctaccttatctatccctcaggtcctagcgtacctgtacccgtgttttgtgatatgacaaccgaagggggaaaatggactgtgttccagaaacgctttaatggctccgtctctttcttccgcggatggaacgactacaaacttggatttgggagggctgacggagaatattggctgggtctccagaatatgcacttgttaacgcttaagcaaaaatatgaactgcgtgtggatttggaagactttgaaaataatacggcctatgcaaaatacgcggatttttctatttcacctaatgcggtcagcgccgaggaagacggatatactttgtttgtggctggcttcgaagacggcggagccggagactcactgagctaccatagtggacagaagttctcaacatttgatcgcgaccaagatttgtttgtgcagaactgcgccgcactctcaagtggtgccttttggttcaggagctgtcacttcgccaatctaaatggattttatctcgggggaagccacctatcgtatgccaatggcatcaactgggctcagtggaagggattctattattctctcaagcgtacggagatgaagatcagacgcgcttag

SEQ ID NO: 128098 - DNA, 768 bp, Artificial Sequence
  derived and/or modified sequence
atgaaggccctgctggccctgcccctgctgctgctgctgagcacccccccctgcgccccccaggtgagcggcatcagaggcgacgccctggagagattctgcctgcagcagcccctggactgcgacgacatctacgcccagggctaccagagcgacggcgtgtacctgatctaccccagcggccccagcgtgcccgtgcccgtgttctgcgacatgaccaccgagggcggcaagtggaccgtgttccagaagagattcaacggcagcgtgagcttcttcagaggctggaacgactacaagctgggcttcggcagagccgacggcgagtactggctgggcctgcagaacatgcacctgctgaccctgaagcagaagtacgagctgagagtggacctggaggacttcgagaacaacaccgcctacgccaagtacgccgacttcagcatcagccccaacgccgtgagcgccgaggaggacggctacaccctgttcgtggccggcttcgaggacggcggcgccggcgacagcctgagctaccacagcggccagaagttcagcaccttcgacagagaccaggacctgttcgtgcagaactgcgccgccctgagcagcggcgccttctggttcagaagctgccacttcgccaacctgaacggcttctacctgggcggcagccacctgagctacgccaacggcatcaactgggcccagtggaagggcttctactacagcctgaagagaaccgagatgaagatcagaagagcctag

SEQ ID NO: 128099 - protein, 95 aa, Artificial Sequence
  derived and/or modified sequence
MKLLMVLMLAALLLHCYADSGCKLLEDMVEKTINSDISIPEYKELLQEFIDSDAAAEAMGKFKQCFLNQSHRTLKNFGLMMHTVYDSIWCNMKSN

SEQ ID NO: 128100 - DNA, 288 bp, Artificial Sequence
  derived and/or modified sequence
atgaagctacttatggtactgatgcttgcagcgctcctcctccactgttatgccgattccggctgcaagctgctggaagatatggtcgaaaagactataaattcagacatttctatcccagagtacaaagaactgctccaggagttcatcgatagcgacgctgccgccgaggctatgggcaaatttaagcagtgctttctgaaccagagtcataggaccctgaagaatttcggcttaatgatgcataccgtgtacgactccatctggtgcaatatgaagagtaactag

SEQ ID NO: 128101 - DNA, 288 bp, Artificial Sequence
  derived and/or modified sequence
atgaagctgctgatggtgctgatgctggccgccctgctgctgcactgctacgccgacagcggctgcaagctgctggaggacatggtggagaagaccatcaacagcgacatcagcatccctgagtacaaggagctgctgcaggagttcatcgacagtgatgctgctgctgaggccatgggcaagttcaagcagtgcttcctgaaccagagccacaggaccctgaagaactttggcctgatgatgcacacagtgtatgacagcatctggtgcaacatgaagagcaactag

SEQ ID NO: 128102 - DNA, 288 bp, Artificial Sequence
  derived and/or modified sequence
atgaagctgctgatggtgctgatgctggccgccctgctgctgcactgttatgcagatagcgggtgcaagcttcttgaggatatggttgagaagacgatcaattccgatatttctatcccagaatataaggagctgctccaggagtttatcgactcagacgccgctgcagaagctatggggaaatttaagcagtgtttcctgaaccagtctcacaggaccctgaaaaacttcggcctgatgatgcatactgtttacgattccatatggtgcaatatgaagagcaactag

SEQ ID NO: 128103 - DNA, 288 bp, Artificial Sequence
  derived and/or modified sequence
atgaaactgctgatggtgctgatgctggctgccctgctactacactgctacgccgatagcgggtgtaaattgctcgaggatatggttgagaagacaatcaactcagatattagtatccctgagtacaaggaacttttgcaggagtttatcgattcagacgcagccgctgaggccatgggaaaatttaagcagtgtttcctgaaccaatcgcacagaacactaaagaatttcggactgatgatgcacaccgtgtatgatagcatctggtgtaatatgaaatccaattag

SEQ ID NO: 128104 - DNA, 518 bp, Artificial Sequence
  derived and/or modified sequence
cctccacagcaacttccttgatccctgccacgcacgactgaacacagacagcagccgcctcgccatgaagctgctgatggtcctcatgctggcggccctcctcctgcactgctatgcagattctggctgcaaactcctggaggacatggttgaaaagaccatcaattccgacatatctatacctgaatacaaagagcttcttcaagagttcatagacagtgatgccgctgcagaggctatggggaaattcaagcagtgtttcctcaaccagtcacatagaactctgaaaaactttggactgatgatgcatacagtgtacgacagcatttggtgtaatatgaagagtaattaactttacccaaggcgtttggctcagagggctacagactatggccagaactcatctgttgattgctagaaaccacttttctttcttgtgttgtctttttatgtggaaactgctagacaactgttgaaacctcaaattcatttccatttcaataaactaactgcaaatc

SEQ ID NO: 128105 - DNA, 288 bp, Artificial Sequence
  derived and/or modified sequence
atgaagctgctgatggtgctgatgctggccgccctgctgctgcactgctacgccgacagcggctgcaagctgctggaggacatggtggagaagaccatcaacagcgacatcagcatccccgagtacaaggagctgctgcaggagttcatcgacagcgacgccgccgccgaggccatgggcaagttcaagcagtgcttcctgaaccagagccacagaaccctgaagaacttcggcctgatgatgcacaccgtgtacgacagcatctggtgcaacatgaagagcaactag

SEQ ID NO: 128106 - protein, 447 aa, Artificial Sequence
  derived and/or modified sequence
MRFRIYKRKVLILTLVVAACGFVLWSSNGRQRKNEALAPPLLDAEPARGAGGRGGDHPSVAVGIRRVSNVSAASLVPAVPQPEADNLTLRYRSLVYQLNFDQTLRNVDKAGTWAPRELVLVVQVHNRPEYLRLLLDSLRKAQGIDNVLVIFSHDFWSTEINQLIAGVNFCPVLQVFFPFSIQLYPNEFPGSDPRDCPRDLPKNAALKLGCINAEYPDSFGHYREAKFSQTKHHWWWKLHFVWERVKILRDYAGLILFLEEDHYLAPDFYHVFKKMWKLKQQECPECDVLSLGTYSASRSFYGMADKVDVKTWKSTEHNMGLALTRNAYQKLIECTDTFCTYDDYNWDWTLQYLTVSCLPKFWKVLVPQIPRIFHAGDCGMHHKKTCRPSTQSAQIESLLNNNKQYMFPETLTISEKFTVVAISPPRKNGGWGDIRDHELCKSYRRLQ

SEQ ID NO: 128107 - protein, 453 aa, Artificial Sequence [sequence omitted]

SEQ ID NO: 128108 - DNA, 1344 bp, Artificial Sequence
  derived and/or modified sequence
atgagatttaggatctataagcggaaagtactgattttgacactcgtggtggcggcctgcggctttgttctctggtcttctaatggaagacagaggaagaacgaggctcttgccccccccctactggatgccgagccagccaggggggcgggtggacggggaggggaccacccttcagttgccgtcgggatccgcagagtttccaatgtctccgccgccagtctggttcctgccgttcctcagcctgaagctgataaccttacccttagatacaggtccttggtctaccaactgaattttgatcagaccttgcgaaacgtcgacaaggccggcacctgggctccaagagagctggtactcgtcgtccaggtccacaaccgaccagagtatctgagattgctcctggactctctcagaaaagcccaggggatcgataacgtgctcgttatcttctcacacgatttctggtctaccgagataaatcaactgattgccggcgtgaatttctgccctgtccttcaggtgtttttccctttttccatccagctgtacccaaacgagttccctggttctgacccacgggattgcccaagagacttacccaagaacgcggcacttaagctcgggtgtattaacgctgaataccccgattcatttggccactaccgcgaggctaagtttagtcaaacaaaacatcattggtggtggaaactccactttgtctgggagcgggtcaaaatcctcagggactatgcagggctgatactgttcctggaggaggaccactacctcgccccagatttctatcacgttttcaaaaagatgtggaaactgaaacaacaggagtgtccagaatgcgatgtactcagtctgggcacttacagtgcgtctagaagtttctatggtatggcagataaggtggatgttaagacttggaagtctactgagcataatatgggcctggcactgacccggaacgcataccagaagcttattgagtgcactgacaccttctgtacatatgatgactacaattgggattggacactccagtaccttacagtgtcatgcctgccaaagttctggaaagttctggtcccccagatccccagaattttccatgccggagattgtggcatgcaccacaaaaagacctgcaggccctcgacgcagagcgctcagattgaaagtctcttgaacaacaataagcagtacatgtttcctgagactctcaccatctccgaaaagttcacagtcgtggccatatctccgccccgaaaaaatgggggatggggcgatattagagatcacgaattgtgtaagtcctatcgccgactgcaatag

SEQ ID NO: 128109 - DNA, 1362 bp, Artificial Sequence
  derived and/or modified sequence
atggagcgcacagagacaatgcggttccgtatttataagcgaaaggtcctgatattgaccttggtggtggcagcttgcggatttgtcctctggtctagtaacggcaggcagcgtaagaatgaggcccttgcaccccctctcctggatgcagagcctgccaggggggccggtggcaggggaggtgaccacccaagcgttgccgtaggcattcggagggtgagcaatgtgtcggccgcaagcctggttccagccgttccacaaccggaggccgataatttaaccctgcgctatagatctctggtgtaccagctcaacttcgatcagacccttcgaaatgttgacaaagcgggcacctgggctccccgcgagttggtgttggttgttcaggtacacaaccggccagagtacctgcgtttactcctggattctctacgcaaagctcagggtatcgacaatgtcctggtgatcttctcacatgatttctggtcaactgagatcaaccaactcatcgctggggtgaatttctgccccgtcctacaagtgttctttccttttagcatacagttgtaccctaacgagtttccgggaagcgaccctagagactgtcctagagacctccccaaaaacgcggctcttaagctgggatgcatcaatgcggaataccccgattcctttggacattaccgcgaggcgaaattctcccaaactaagcaccattggtggtggaagctgcacttcgtgtgggaacgcgtgaaaattctgcgggactatgcagggctcattctgtttctagaggaagaccactacctggccccagacttctatcacgtctttaaaaagatgtggaaattgaagcagcaggaatgcccggagtgtgatgttctgtctcttggaacctactccgcatccagaagcttttatggcatggcagacaaagtagatgtaaagacctggaaatctaccgagcacaatatgggcctggcgctgacacgcaacgcctatcagaagctgatagagtgcactgatacgttctgtacatacgacgactacaattgggattggacattgcagtatcttacggtttcctgtctgcccaaattctggaaagtgttggtgccacagatacctagaattttccacgccggagattgtgggatgcaccataaaaaaacttgtcggccttctacccagagcgcacagatcgagtccctcctgaataacaacaaacagtacatgttcccagaaacactgacaatttccgaaaaattcacagtcgtcgccattagccccccaaggaaaaacggcggttggggcgatataagagatcatgaactttgtaagtcttacagaagattgcaatag

SEQ ID NO: 128110 - DNA, 1344 bp, Artificial Sequence
  derived and/or modified sequence
atgaggttccgcatctacaagaggaaggtgctgatcctgaccctggtggtggccgcctgtggctttgtgctgtggagcagcaatggccggcagaggaagaatgaggccctggccccacccctgctggatgctgagcccgcccggggggccggcggccggggcggggaccaccccagcgtggccgtgggcatcagaagagtgtccaatgtgtctgctgccagcctggtgcctgctgtgccccagcctgaggccgacaacctgaccctgcgctaccgcagcctggtgtaccagctgaactttgaccagaccctgagaaatgtggacaaggccggcacctgggccccccgggagctggtgctggtggtgcaggtgcacaacagacctgagtacctgcggctgctgctggacagcctgaggaaggcccagggcatcgacaacgtgctggtgatcttcagccatgacttctggagcacagagatcaaccagctgattgctggggtgaacttctgccctgtgctgcaggtgttcttccccttcagcatccagctgtacccaaatgagttccctggcagtgacccccgggactgcccccgggacctgcccaagaatgctgccctgaagctgggctgcatcaatgctgagtacccagacagctttggccactaccgggaggccaagttcagccagaccaagcaccactggtggtggaagctgcactttgtgtgggagcgggtgaagatcctgcgggactatgccggcctcatcctcttcctggaggaggaccactacctggccccagacttctaccacgtgttcaagaagatgtggaagctgaagcagcaggagtgcccagaatgtgatgtgctgagcctgggcacctacagcgccagccgctccttctacggcatggctgacaaggtggatgtgaagacctggaagagcacagagcacaacatgggcctggccctgaccagaaatgcctaccagaagctgattgaatgtacagacaccttctgcacctatgatgactacaactgggactggaccctgcagtacctgactgtgtcctgcctgcccaagttctggaaggtgctggtgccccagatcccccgcatcttccacgccggggactgtggcatgcaccacaagaagacctgccggcccagcacccagagcgcccagatcgagagcctgctgaacaacaacaagcagtacatgtttcctgagaccctgaccatcagcgagaagttcaccgtggtggccatcagcccccccaggaagaatggaggctggggagacatccgggaccacgagctgtgcaagagctaccgccgcctgcagtag

SEQ ID NO: 128111 - DNA, 1362 bp, Artificial Sequence
  derived and/or modified sequence
atggagaggacagagaccatgaggttccgcatctacaagaggaaggtgctgatcctgaccctggtggtggccgcctgtggctttgtgctgtggagcagcaatggccggcagaggaagaatgaggccctggccccacccctgctggatgctgagcccgcccggggggccggcggccggggcggggaccaccccagcgtggccgtgggcatcagaagagtgtccaatgtgtctgctgccagcctggtgcctgctgtgccccagcctgaggccgacaacctgaccctgcgctaccgcagcctggtgtaccagctgaactttgaccagaccctgagaaatgtggacaaggccggcacctgggccccccgggagctggtgctggtggtgcaggtgcacaacagacctgagtacctgcggctgctgctggacagcctgaggaaggcccagggcatcgacaacgtgctggtgatcttcagccatgacttctggagcacagagatcaaccagctgattgctggggtgaacttctgccctgtgctgcaggtgttcttccccttcagcatccagctgtacccaaatgagttccctggcagtgacccccgggactgcccccgggacctgcccaagaatgctgccctgaagctgggctgcatcaatgctgagtacccagacagctttggccactaccgggaggccaagttcagccagaccaagcaccactggtggtggaagctgcactttgtgtgggagcgggtgaagatcctgcgggactatgccggcctcatcctcttcctggaggaggaccactacctggccccagacttctaccacgtgttcaagaagatgtggaagctgaagcagcaggagtgcccagaatgtgatgtgctgagcctgggcacctacagcgccagccgctccttctacggcatggctgacaaggtggatgtgaagacctggaagagcacagagcacaacatgggcctggccctgaccagaaatgcctaccagaagctgattgaatgtacagacaccttctgcacctatgatgactacaactgggactggaccctgcagtacctgactgtgtcctgcctgcccaagttctggaaggtgctggtgccccagatcccccgcatcttccacgccggggactgtggcatgcaccacaagaagacctgccggcccagcacccagagcgcccagatcgagagcctgctgaacaacaacaagcagtacatgtttcctgagaccctgaccatcagcgagaagttcaccgtggtggccatcagcccccccaggaagaatggaggctggggagacatccgggaccacgagctgtgcaagagctaccgccgcctgcagtag

SEQ ID NO: 128112 - DNA, 2710 bp, Artificial Sequence
  derived and/or modified sequence
gggccggagggccgcggtgtgccgcggggcagttgcgggttgtcataacggtccccgccggagtgaggcgaggccgcgtcgctcagttctggccgtctagggcccctgtaaggatgagagcgcagaggacgcagggccgctggaggcgcaggtaacgaagctagggtgcggttgggaccgcggctgagctttttccgggacccgtggtgctgaatggagaggacggagacgaagccgagccgcggctcctagcggcggcgccgatgctcgagctgtagctgccaggcgaggatgtgtggagcgcaggcggcgcggggtaaatgagaggtctcgggccccaggacccccggggcccgggatgagttagcgagggcagccgcgggggccagttccgaccgtgacaggccaaggcgacggccgccgcccgcccgccccttccgtgcagaagcagctgctcctttccgcgcccgcccgcctgcgctcccggccctggagaccatgaggttccgcatctacaaacggaaggtgctaatcctgacgctcgtggtggccgcctgcggcttcgtcctctggagcagcaatgggcgacaaaggaagaacgaggccctcgccccaccgttgctggacgccgaacccgcgcggggtgccggcggccgcggtggggaccacccctctgtggctgtgggcatccgcagggtctccaacgtgtcggcggcttccctggtcccggcggtcccccagcccgaggcggacaacctgacgctgcggtaccggtccctggtgtaccagctgaactttgatcagaccctgaggaatgtagataaggctggcacctgggccccccgggagctggtgctggtggtccaggtgcataaccggcccgaatacctcagactgctgctggactcacttcgaaaagcccagggaattgacaacgtcctcgtcatctttagccatgacttctggtcgaccgagatcaatcagctgatcgccggggtgaatttctgtccggttctgcaggtgttctttcctttcagcattcagttgtaccctaacgagtttccaggtagtgaccctagagattgtcccagagacctgccgaagaatgccgctttgaaattggggtgcatcaatgctgagtatcccgactccttcggccattatagagaggccaaattctcccagaccaaacatcactggtggtggaagctgcattttgtgtgggaaagagtgaaaattcttcgagattatgctggccttatacttttcctagaagaggatcactacttagccccagacttttaccatgtcttcaaaaagatgtggaaactgaagcagcaagagtgccctgaatgtgatgttctctccctggggacctatagtgccagtcgcagtttctatggcatggctgacaaggtagatgtgaaaacttggaaatccacagagcacaatatgggtctagccttgacccggaatgcctatcagaagctgatcgagtgcacagacactttctgtacttatgatgattataactgggactggactcttcaatacttgactgtatcttgtcttccaaaattctggaaagtgctggttcctcaaattcctaggatctttcatgctggagactgtggtatgcatcacaagaaaacctgtagaccatccactcagagtgcccaaattgagtcactcttaaataataacaaacaatacatgtttccagaaactctaactatcagtgaaaagtttactgtggtagccatttccccacctagaaaaaatggagggtggggagatattagggaccatgaactctgtaaaagttatagaagactgcagtgaaaatcacagttacaaaagcgacagtcttctatttttgatatttgtccaaacaggacatacaattgaataaaagagtttaggaactggtttctgctttaatacaaaaacaaaatcttgtaaaaggtgtccaaatacatagtaatcttttccagttatgtctgattaagatttaaaactgaaggtttcattttgggagtagggttttaaagctcaatctgttatctgctaaaattgattattgttgatatgagagaagaggggaaattttatttaaattgcatttattaatctttttatctgaaactttgtacacttttccactttcaaaacctattttaagtacagcaaaatttatttaaaactgtcatagcagtaaaaagtattacgatgaaattgttagggtattaatggaacaaacccagtttcactctcttgacacacttattaggaagggattgcttcactggtttaataatttaaaagttatgtttgttaaacaccctgtcagaacagtcattttcagtattagattcctgtactattgtgttttgagtgtgttttggaaccttcatagaacacactttcttttggaatgtatttgattgataagaaagtttaaacattgttttcacctcaatgtagaaatacagtggttttgtttttttttttcttttagtgctgacaaaataaaatactcatttttgcataaaaaggttcctaatccttttgcagaataagttttgtttactctttataccaaaattcagtgaaggcattctacaagttttgagttagcattacattttaatatttactattgctacattgtataattgagtttgaaataaaacccagcttatgacaatgc

SEQ ID NO: 128113 - DNA, 1784 bp, Artificial Sequence
  derived and/or modified sequence
ataacggtccccgccggagtgaggcgaggccgcgtcgctcagttctggccgtctagggcccctgtaaggatgagagcgcagaggacgcagggccgctggaggcgcaggtaacgaagctagggtgcggttgggaccgcggctgagctttttccgggacccgtggtgctgaatggagaggacggagaccatgaggttccgcatctacaaacggaaggtgctaatcctgacgctcgtggtggccgcctgcggcttcgtcctctggagcagcaatgggcgacaaaggaagaacgaggccctcgccccaccgttgctggacgccgaacccgcgcggggtgccggcggccgcggtggggaccacccctctgtggctgtgggcatccgcagggtctccaacgtgtcggcggcttccctggtcccggcggtcccccagcccgaggcggacaacctgacgctgcggtaccggtccctggtgtaccagctgaactttgatcagaccctgaggaatgtagataaggctggcacctgggccccccgggagctggtgctggtggtccaggtgcataaccggcccgaatacctcagactgctgctggactcacttcgaaaagcccagggaattgacaacgtcctcgtcatctttagccatgacttctggtcgaccgagatcaatcagctgatcgccggggtgaatttctgtccggttctgcaggtgttctttcctttcagcattcagttgtaccctaacgagtttccaggtagtgaccctagagattgtcccagagacctgccgaagaatgccgctttgaaattggggtgcatcaatgctgagtatcccgactccttcggccattatagagaggccaaattctcccagaccaaacatcactggtggtggaagctgcattttgtgtgggaaagagtgaaaattcttcgagattatgctggccttatacttttcctagaagaggatcactacttagccccagacttttaccatgtcttcaaaaagatgtggaaactgaagcagcaagagtgccctgaatgtgatgttctctccctggggacctatagtgccagtcgcagtttctatggcatggctgacaaggtagatgtgaaaacttggaaatccacagagcacaatatgggtctagccttgacccggaatgcctatcagaagctgatcgagtgcacagacactttctgtacttatgatgattataactgggactggactcttcaatacttgactgtatcttgtcttccaaaattctggaaagtgctggttcctcaaattcctaggatctttcatgctggagactgtggtatgcatcacaagaaaacctgtagaccatccactcagagtgcccaaattgagtcactcttaaataataacaaacaatacatgtttccagaaactctaactatcagtgaaaagtttactgtggtagccatttccccacctagaaaaaatggagggtggggagatattagggaccatgaactctgtaaaagttatagaagactgcagtgaaaatcacagttacaaaagcgacagtcttctatttttgatatttgtccaaacaggacatacaattgaataaaagagtttaggaactggtttctgctttaatacaaaaacaaaatcttgtaaaaggtgtccaaatacatagtaatcttttccagttatgtctgattaagatttaaaactgaaggtttcattttgggagtagggttttaaagctcaatctgttatctgctaaaattgattattgttgatatgagag

SEQ ID NO: 128114 - DNA, 1344 bp, Artificial Sequence
  derived and/or modified sequence
atgcggttccggatctacaagcggaaggtgctgatcctgaccctggttgtcgctgcctgcggattcgttctatggagcagcaatggccgccagagaaagaatgaagcattggccccacctctcctggacgctgaaccagcaagaggagccgggggaagaggcggggatcatccctccgtggctgtcggcatccggagagtaagcaacgtcagcgccgcctccctggtgcctgcggttccgcagccggaggccgacaatctgactttgcgctaccggtcattagtgtaccaactgaatttcgaccagactctccgtaatgtggacaaagcagggacttgggcccctcgcgaactggtattggtggtgcaggtgcacaatcggccggaatacttaaggcttttgctggactccctcaggaaggcacagggaattgataacgtactggtgatcttcagtcacgacttttggtctacagagatcaaccaactgatcgccggggtcaacttttgtcccgttcttcaggtctttttcccattctcaatccaactgtatcccaacgagttcccgggctcggacccacgggactgcccaagggacctgcctaagaacgctgccctcaaactgggttgcatcaatgccgaatatccggattcatttggccactatcgagaagccaaattctcacaaacgaagcaccattggtggtggaagttgcatttcgtgtgggagcgagtaaaaattctacgggattacgcgggcctcatcttgttcctagaggaggatcactacctggcgcccgatttttatcatgttttcaagaaaatgtggaaactgaagcagcaggagtgccctgaatgcgatgtcctatcactggggacctacagtgcttcgaggtccttttacgggatggcagacaaggttgatgtaaagacgtggaaatcgaccgagcataacatgggccttgcactgacaaggaatgcctaccagaagctgattgaatgcacagataccttttgcacttacgacgactataattgggattggactctccagtatttaactgtgtcttgcctgcccaagttttggaaggtgctggtgccccagatcccccggattttccatgccggggattgtggaatgcaccacaagaaaacatgtcgcccgtcaacccaaagtgctcagatcgaatcgctgctcaataataacaagcagtacatgtttcccgagacactgactatctccgagaaatttaccgtcgtggcaatcagcccccctcgcaagaatggtggttggggcgacatccgggaccacgaattatgtaagagttatcggcgattgcagtag

SEQ ID NO: 128115 - DNA, 1362 bp, Artificial Sequence
  derived and/or modified sequence
atggagcggaccgagaccatgcggttccggatctacaagcggaaggttctcatccttactcttgtagtcgccgcgtgcggatttgtgctgtggagtagtaacggtaggcagagaaagaatgaagcactcgctccccctctgctagacgccgagcccgcccgcggggctggtggtcgtggcggagatcacccttctgtggcggtgggcatcaggagggtgtccaacgtgagcgctgcgtcacttgtgccggcggtaccccagcctgaggctgataatctgactctcagataccgtagcctggtctatcagctgaatttcgatcaaacattgcgcaacgtcgataaggcgggcacatgggccccgcgcgaactggtcctcgtggtgcaagtgcacaaccgccctgaatatttgcggttgctcctggattccctccgtaaagctcagggcatcgataacgtattggtcattttttctcatgacttttggtcaacagagatcaaccagctcattgccggcgttaacttctgccccgttttgcaggtcttttttccattctcaattcagctgtaccctaatgaattcccgggaagcgatccccgagattgccctagggatctgcccaagaatgcggccctcaagttgggctgcatcaacgcagagtacccagacagcttcggccattacagagaagcaaagttctcgcagaccaagcatcactggtggtggaaattacacttcgtgtgggagcgagttaagatcctccgggattacgccggtctgatccttttcctcgaggaggatcattatctggctcctgacttctaccatgtattcaagaaaatgtggaagctgaagcaacaggagtgccctgagtgtgacgtgctcagcctgggcacgtacagcgcctcacgaagcttttatggcatggctgacaaggtggatgtaaaaacctggaaaagtaccgaacacaatatgggcttggccctcacccgcaacgcatatcaaaaactcattgaatgcaccgacactttctgtacttacgatgattacaactgggactggacactccaatacctaacggtgtcctgcctgcccaaattctggaaggtgcttgtgccgcagataccgagaattttccacgcaggcgattgcggtatgcatcacaagaagacctgccgtcctagcacccagtcagctcagattgaaagtctgttgaataacaataagcaatatatgtttcccgagactttgaccatcagtgagaagttcactgtggtggccatttctccaccgcgcaaaaatggaggatggggagacattagagatcatgagctgtgcaaatcttataggcgcctgcagtag

SEQ ID NO: 128116 - DNA, 1344 bp, Artificial Sequence
  derived and/or modified sequence
atgcgcttccggatctacaaacggaaggtgctgattctcactctggttgtggccgcttgcggctttgtgttgtggtcttctaacggaagacaaagaaaaaatgaggcgctcgcccctcccttgctggacgccgaacccgcacgcggagcagggggacggggaggagatcatcctagtgtcgctgttggcatccggagggtgtctaatgtttccgccgcttcgctagtccccgcagtaccccaacccgaagctgacaacctgaccctacgctatcggtcgctggtctaccagcttaattttgatcagactctgcgaaacgtggataaagcaggaacctgggcacctagagagttggtgctggtagtgcaggtacacaaccgtccagagtatctgagattgctgctcgactccctgagaaaagcccagggcattgataacgtactggttatcttctctcacgatttttggtcaactgagataaaccaacttatcgcgggagtgaatttctgtcccgtgctacaagtattcttcccctttagcatacagttatatccaaacgaattcccgggatcagacccccgagactgccccagagatctgcctaagaatgctgctctcaagctgggatgtattaatgccgaataccccgattcattcggccactatagagaggccaagttctcccaaacaaagcaccattggtggtggaaactgcactttgtttgggaacgggtgaaaatactgagggactatgcaggactaattctgttcctggaggaagatcattatttagcgccagatttttatcatgtgtttaagaagatgtggaagttgaaacagcaggagtgtcccgaatgcgacgtgttaagtctcgggacctatagtgcgtcccgatctttttacggcatggcagataaggtggatgtcaaaacctggaaatccaccgagcacaacatgggcttggctctcactagaaatgcctaccaaaagctaattgagtgcaccgacacattctgcacatacgacgattacaattgggactggactttgcagtaccttactgtgtcttgcctgccaaagttctggaaagtgctagtgccccaaatccctaggatttttcacgccggtgattgtggcatgcaccataagaaaacttgcaggccctccacgcagagcgcccagatagagagcctgctgaacaacaataagcagtacatgttcccggagacgctgacaatctccgaaaagttcaccgtggttgcaatctctccgcctaggaagaacggaggctggggagatatccgagaccatgagctgtgtaaatcttatcgaagactccagtag

SEQ ID NO: 128117 - DNA, 1362 bp, Artificial Sequence
  derived and/or modified sequence
atggagagaactgaaacaatgcgctttcgcatctataaaaggaaggtgctgatcctgacacttgtggtggccgcttgcggctttgtgctttggtcctccaatgggaggcagcggaagaacgaggccctggcccctcctttactggacgccgagcccgctcgcggagccggaggacgcggaggcgaccatccgtccgttgccgtgggcattcgccgtgtcagtaacgtctcagccgcaagcctggtcccagcagtaccacagcctgaggccgacaatctgaccctgaggtaccggtcgttagtgtatcagctgaatttcgaccagactctcagaaatgtggacaaagccggtacgtgggctccccgagaactagtcctcgtggtccaggtgcataatcgtcctgagtatctgcggttgttactcgacagcctgcggaaggcacaggggatcgataacgtcctggtcatcttctcacacgacttttggtctactgagattaatcagctgattgctggtgttaatttctgcccagtcctgcaggtgtttttccccttctccattcagctataccccaatgagttcccagggtctgatccgcgtgattgtcccagggacctgccaaaaaacgcagccctgaaactcggctgcatcaacgccgagtaccccgactcattcggccattaccgtgaggcaaaatttagccaaactaaacaccactggtggtggaaactgcacttcgtgtgggaacgggtcaaaattctgagagactatgccggactcattctgttcttagaggaggaccactacctcgcgccagatttctaccacgtattcaagaaaatgtggaagcttaaacagcaggagtgtcccgaatgtgacgttctgagcctgggaacttacagcgcctcaagaagtttctatggcatggctgataaggttgacgtcaagacatggaagagcaccgaacacaacatgggtttggcactgaccagaaacgcttaccagaagctgattgagtgcacagacaccttttgtacttatgacgactacaattgggattggacactacagtatctcacagtctcttgtctccctaagttttggaaggtgctggttccacaaataccaagaatctttcatgctggcgactgtggcatgcatcataagaagacttgtcggcctagcacccagtctgcccaaatcgagagtctgctgaacaacaataaacagtacatgttcccagagactcttacaatatccgaaaagtttaccgtggttgcaatctcaccgcctcggaaaaacgggggatggggtgatatcagggaccatgaactctgcaagtcctaccgacggcttcagtag

SEQ ID NO: 128118 - DNA, 1344 bp, Artificial Sequence
  derived and/or modified sequence
atgagattcagaatctacaagagaaaggtgctgatcctgaccctggtggtggccgcctgcggcttcgtgctgtggagcagcaacggcagacagagaaagaacgaggccctggccccccccctgctggacgccgagcccgccagaggcgccggcggcagaggcggcgaccaccccagcgtggccgtgggcatcagaagagtgagcaacgtgagcgccgccagcctggtgcccgccgtgccccagcccgaggccgacaacctgaccctgagatacagaagcctggtgtaccagctgaacttcgaccagaccctgagaaacgtggacaaggccggcacctgggcccccagagagctggtgctggtggtgcaggtgcacaacagacccgagtacctgagactgctgctggacagcctgagaaaggcccagggcatcgacaacgtgctggtgatcttcagccacgacttctggagcaccgagatcaaccagctgatcgccggcgtgaacttctgccccgtgctgcaggtgttcttccccttcagcatccagctgtaccccaacgagttccccggcagcgaccccagagactgccccagagacctgcccaagaacgccgccctgaagctgggctgcatcaacgccgagtaccccgacagcttcggccactacagagaggccaagttcagccagaccaagcaccactggtggtggaagctgcacttcgtgtgggagagagtgaagatcctgagagactacgccggcctgatcctgttcctggaggaggaccactacctggcccccgacttctaccacgtgttcaagaagatgtggaagctgaagcagcaggagtgccccgagtgcgacgtgctgagcctgggcacctacagcgccagcagaagcttctacggcatggccgacaaggtggacgtgaagacctggaagagcaccgagcacaacatgggcctggccctgaccagaaacgcctaccagaagctgatcgagtgcaccgacaccttctgcacctacgacgactacaactgggactggaccctgcagtacctgaccgtgagctgcctgcccaagttctggaaggtgctggtgccccagatccccagaatcttccacgccggcgactgcggcatgcaccacaagaagacctgcagacccagcacccagagcgcccagatcgagagcctgctgaacaacaacaagcagtacatgttccccgagaccctgaccatcagcgagaagttcaccgtggtggccatcagcccccccagaaagaacggcggctggggcgacatcagagaccacgagctgtgcaagagctacagaagactgcagtag

SEQ ID NO: 128119 - DNA, 1362 bp, Artificial Sequence
  derived and/or modified sequence
atggagagaaccgagaccatgagattcagaatctacaagagaaaggtgctgatcctgaccctggtggtggccgcctgcggcttcgtgctgtggagcagcaacggcagacagagaaagaacgaggccctggccccccccctgctggacgccgagcccgccagaggcgccggcggcagaggcggcgaccaccccagcgtggccgtgggcatcagaagagtgagcaacgtgagcgccgccagcctggtgcccgccgtgccccagcccgaggccgacaacctgaccctgagatacagaagcctggtgtaccagctgaacttcgaccagaccctgagaaacgtggacaaggccggcacctgggcccccagagagctggtgctggtggtgcaggtgcacaacagacccgagtacctgagactgctgctggacagcctgagaaaggcccagggcatcgacaacgtgctggtgatcttcagccacgacttctggagcaccgagatcaaccagctgatcgccggcgtgaacttctgccccgtgctgcaggtgttcttccccttcagcatccagctgtaccccaacgagttccccggcagcgaccccagagactgccccagagacctgcccaagaacgccgccctgaagctgggctgcatcaacgccgagtaccccgacagcttcggccactacagagaggccaagttcagccagaccaagcaccactggtggtggaagctgcacttcgtgtgggagagagtgaagatcctgagagactacgccggcctgatcctgttcctggaggaggaccactacctggcccccgacttctaccacgtgttcaagaagatgtggaagctgaagcagcaggagtgccccgagtgcgacgtgctgagcctgggcacctacagcgccagcagaagcttctacggcatggccgacaaggtggacgtgaagacctggaagagcaccgagcacaacatgggcctggccctgaccagaaacgcctaccagaagctgatcgagtgcaccgacaccttctgcacctacgacgactacaactgggactggaccctgcagtacctgaccgtgagctgcctgcccaagttctggaaggtgctggtgccccagatccccagaatcttccacgccggcgactgcggcatgcaccacaagaagacctgcagacccagcacccagagcgcccagatcgagagcctgctgaacaacaacaagcagtacatgttccccgagaccctgaccatcagcgagaagttcaccgtggtggccatcagcccccccagaaagaacggcggctggggcgacatcagagaccacgagctgtgcaagagctacagaagactgcagtag

SEQ ID NO: 128120 - protein, 93 aa, Artificial Sequence
  derived and/or modified sequence
MKLLMVLMLAALSQHCYAGSGCPLLENVISKTINPQVSKTEYKELLQEFIDDNATTNAIDELKECFLNQTDETLSNVEVFMQLIYDSSLCDLF

SEQ ID NO: 128121 - DNA, 282 bp, Artificial Sequence
  derived and/or modified sequence
atgaagctcttgatggtgctgatgctggctgccctgtcccagcattgctacgctggctccgggtgtccactgctggaaaacgttattagcaagaccataaatccacaggtctcaaagacagaatataaggagttactccaagagttcattgatgataatgcgacaacgaatgccattgacgagctgaaagagtgttttctgaaccagaccgatgagacactatccaatgtcgaggtgttcatgcagcttatctacgatagttcactgtgcgatctgttctag

SEQ ID NO: 128122 - DNA, 282 bp, Artificial Sequence
  derived and/or modified sequence
atgaagctgctgatggtgctgatgctggccgccctgagccagcactgctacgccggcagcggctgccccctgctggagaatgtcatcagcaagaccatcaacccccaggtgtccaagacagagtacaaggagctgctgcaggagttcattgatgacaatgccaccaccaatgccattgatgagctgaaggagtgcttcctgaaccagacagatgagaccctgagcaatgtggaggtgttcatgcagctgatctatgacagcagcctgtgtgacctcttctag

SEQ ID NO: 128123 - DNA, 282 bp, Artificial Sequence
  derived and/or modified sequence
atgaagctgctgatggtgctgatgctggccgccctgagccagcactgctatgccgggtctgggtgcccacttctcgaaaatgttatctcaaagaccatcaaccctcaggtttcaaagactgaatacaaagagctgctacaagaatttatcgatgacaacgcaactacgaacgctatcgatgaactgaaggaatgcttcctgaatcaaaccgacgaaacacttagcaacgtcgaggtctttatgcagctgatctacgattcttctctgtgcgacctgttctag

SEQ ID NO: 128124 - DNA, 282 bp, Artificial Sequence
  derived and/or modified sequence
atgaagctgctgatggtcctgatgctagccgctctatcgcaacattgttatgcaggctcaggttgccctttgctggaaaacgtaataagtaaaacaataaatccccaggtgtccaaaaccgagtataaggagctgctgcaggagttcattgacgataatgctacaaccaatgctatcgatgagttgaaagagtgtttcctgaatcagacggacgaaaccctgagcaatgttgaggtgtttatgcaattgatatatgattcttccctttgtgacctcttctag

SEQ ID NO: 128125 - DNA, 282 bp, Artificial Sequence
  derived and/or modified sequence
atgaaacttttgatggtgctcatgttagccgctctctctcaacattgttatgctggttctggatgtcctcttctcgagaacgtgatcagcaaaaccattaacccccaagtcagcaagaccgaatacaaagaactgcttcaagagttcatcgacgataatgctactaccaatgctatagacgagctgaaagagtgttttttgaaccagactgatgaaaccctgtctaatgtcgaagtgtttatgcagctgatttatgattcaagcctgtgcgacctcttttag

SEQ ID NO: 128126 - DNA, 282 bp, Artificial Sequence
  derived and/or modified sequence
atgaagctgctgatggtgctgatgctggccgccctgagccagcactgctacgccggcagcggctgccccctgctggagaacgtgatcagcaagaccatcaacccccaggtgagcaagaccgagtacaaggagctgctgcaggagttcatcgacgacaacgccaccaccaacgccatcgacgagctgaaggagtgcttcctgaaccagaccgacgagaccctgagcaacgtggaggtgttcatgcagctgatctacgacagcagcctgtgcgacctgttctag

SEQ ID NO: 128127 - RNA, 282 nt, Artificial Sequence
  derived and/or modified sequence
augaaacuuuugauggugcucauguuagccgcucucucucaacauuguuaugcugguucuggauguccucuucucgagaacgugaucagcaaaaccauuaacccccaagucagcaagaccgaauacaaagaacugcuucaagaguucaucgacgauaaugcuacuaccaaugcuauagacgagcugaaagaguguuuuuugaaccagacugaugaaacccugucuaaugucgaaguguuuaugcagcugauuuaugauucaagccugugcgaccucuuuuag

SEQ ID NO: 128128 - protein, 238 aa, Artificial Sequence
  derived and/or modified sequence
MLGQPAPLERFASRRPQVLAVRTVCDLVLGKMDKDCEMKRTTLDSPLGKLELSGCEQGLHEIKLLGKGTSAADAVEVPAPAAVLGGPEPLMQCTAWLNAYFHQPEAIEEFPVPALHHPVFQQESFTRQVLWKLLKVVKFGEVISYQQLAALAGNPKAARAVGGAMRGNPVPILIPCHRVVCSSGAVGNYSGGLAVKEWLLAHEGHRLGKPGLGGSSGLAGAWLKGAGATSGSPPAGRN

SEQ ID NO: 128129 - DNA, 717 bp, Artificial Sequence
  derived and/or modified sequence
atgctgggccagcccgcccccctggagagattcgccagcagaagaccccaggtgctggccgtgagaaccgtgtgcgacctggtgctgggcaagatggacaaggactgcgagatgaagagaaccaccctggacagccccctgggcaagctggagctgagcggctgcgagcagggcctgcacgagatcaagctgctgggcaagggcaccagcgccgccgacgccgtggaggtgcccgcccccgccgccgtgctgggcggccccgagcccctgatgcagtgcaccgcctggctgaacgcctacttccaccagcccgaggccatcgaggagttccccgtgcccgccctgcaccaccccgtgttccagcaggagagcttcaccagacaggtgctgtggaagctgctgaaggtggtgaagttcggcgaggtgatcagctaccagcagctggccgccctggccggcaaccccaaggccgccagagccgtgggcggcgccatgagaggcaaccccgtgcccatcctgatcccctgccacagagtggtgtgcagcagcggcgccgtgggcaactacagcggcggcctggccgtgaaggagtggctgctggcccacgagggccacagactgggcaagcccggcctgggcggcagcagcggcctggccggcgcctggctgaagggcgccggcgccaccagcggcagcccccccgccggcagaaactag

SEQ ID NO: 128130 - DNA, 717 bp, Artificial Sequence
  derived and/or modified sequence
atgctgggacagccagcaccactggagagatttgccagcagaaggccccaggtcctggccgtgcgaacagtttgcgatcttgtgttagggaagatggataaggactgcgaaatgaagagaaccaccctagacagtccattgggaaagctggagcttagcggctgcgagcagggactccatgaaataaagctcctgggcaagggtaccagcgctgccgatgctgtcgaggtccctgcgcctgctgccgtgttgggcgggcctgaacccctgatgcagtgtaccgcatggctgaacgcttacttccaccagccagaggctatagaggaatttcccgtccccgcccttcatcaccccgtgtttcagcaggagagcttcactaggcaggtgctgtggaagcttctaaaggttgttaaatttggggaggtgatcagttatcagcagctcgccgccctcgccggcaaccctaaggccgctcgcgccgtaggcggggcaatgcgtggcaatcctgtgcccatcctcataccatgtcatagggtagtgtgttccagtggggctgtgggtaattacagcgggggactagccgtgaaagaatggctactggcacatgaagggcatcggcttggcaaacccgggctgggaggcagctccgggctggctggagcctggctgaaaggggccggtgcaacttcaggaagcccgccagctggccgcaactag

SEQ ID NO: 128131 - DNA, 717 bp, Artificial Sequence
  derived and/or modified sequence
atgctgggccagcctgcccccctggagagatttgccagccggcggccccaggtgctggccgtgaggacagtgtgtgacctggtgctgggcaagatggacaaggactgtgagatgaagaggaccaccctggacagccccctgggcaagctggagctgagcggctgtgagcagggcctgcacgagatcaagctgctgggcaagggcaccagcgctgctgatgctgtggaggtgcctgccccagctgctgtgctgggcggccctgagcccctgatgcagtgcacagcctggctgaatgcctacttccaccagcctgaggccatcgaggagttccctgtgcctgccctgcaccaccctgtgttccagcaggagagcttcacccggcaggtgctgtggaagctgctgaaggtggtgaagtttggagaggtgatctcctaccagcagctggccgccctggccggcaaccccaaggccgcccgggctgtgggcggggccatgaggggcaaccctgtgcccatcctgatcccctgccaccgggtggtgtgcagcagtggagctgtgggcaactacagcggcggcctggccgtgaaggagtggctgctggcccacgagggccaccggctgggcaagccaggcctgggcggcagcagcggcctggccggggcctggctgaagggggccggggccaccagcggcagccccccagctggaagaaattag

SEQ ID NO: 128132 - DNA, 717 bp, Artificial Sequence
  derived and/or modified sequence
atgctgggccagcccgcccccctggagcggttcgccagccggcggcctcaggtgctggccgtcaggacagtctgcgaccttgtcctcgggaagatggacaaggactgtgaaatgaagcgtacaaccctggattcacccctgggtaagctggaactgtccgggtgtgaacagggactgcacgaaattaaactccttggcaaaggcaccagcgctgccgacgcagttgaagtccctgccccagcagctgttctcggggggcccgaaccactgatgcaatgcaccgcctggctaaacgcctactttcaccaacctgaagccatcgaagagtttccagtgccagccctccaccacccagtcttccagcaggaaagctttacgcgtcaagttctttggaagctgctgaaagttgtcaagtttggtgaggtaatctcctaccagcaactagctgctctagctggaaatcctaaagctgcacgcgccgtaggaggggctatgcgcgggaaccccgtgccaattctgattccatgtcacagagtcgtgtgctcttccggtgccgtgggcaactattcagggggcctcgcagttaaagagtggctgctagcccacgagggacataggctgggcaaaccaggtctgggaggatcctccggtctggcaggagcttggctcaagggcgccggcgctacttccggctcccctcctgctggtcgcaactag

SEQ ID NO: 128133 - DNA, 1759 bp, Artificial Sequence
  derived and/or modified sequence
gtgcccctcggccccgcccccgcgccccggatatgctgggacagcccgcgcccctagaacgctttgcgtcccgacgcccgcaggtcctcgcggtgcgcaccgtttgcgacttggtacttggaaaaatggacaaggattgtgaaatgaaacgcaccacactggacagccctttggggaagctggagctgtctggttgtgagcagggtctgcacgaaataaagctcctgggcaaggggacgtctgcagctgatgccgtggaggtcccagcccccgctgcggttctcggaggtccggagcccctgatgcagtgcacagcctggctgaatgcctatttccaccagcccgaggctatcgaagagttccccgtgccggctcttcaccatcccgttttccagcaagagtcgttcaccagacaggtgttatggaagctgctgaaggttgtgaaattcggagaagtgatttcttaccagcaattagcagccctggcaggcaaccccaaagccgcgcgagcagtgggaggagcaatgagaggcaatcctgtccccatcctcatcccgtgccacagagtggtctgcagcagcggagccgtgggcaactactccggaggactggccgtgaaggaatggcttctggcccatgaaggccaccggttggggaagccaggcttgggagggagctcaggtctggcaggggcctggctcaagggagcgggagctacctcgggctccccgcctgctggccgaaactgagtatgtgcagtaggatggatgtttgagcgacacacacgtgtaacactgcatcggatgcggggcgtggaggcaccgctgtattaaaggaagtggcagtgtcctgggaacaagcgtgtctgccctttctgtttccatattttacagcaggatgagttcagacgcccgcggtcctgcacacatttgtttccttctctaacgctgcccttgctctatttttcatgtccattaaaacaggccaagtgagtgtggaaggcctggctcatgttgggccacagcccaggatggggcagtctggcaccctcaggccacagacggctgccatagccgctgtccagggccagctaaggcccatcccaggccgtccacactagaaagctggccctgccccatccccaccatgcctcccttcctggctgtgtccatggctgtgatggcattctccactcagcagttcctagcatcccacacccaggtctcactgaaagaaaggggaacaggccatggcagtcagtgcttacagaggttttctagctttgtttcctacctgccaaaaaggctaatgcaagatgcatccacttatggtctgtatcaggtgaatagaaaataaccatttgccaagatttggaaagacagagagctctctggacacgggttcgatggagcttgcacctctctgagagctgaagtcaagtctcaccctctctccatactccctggcctagtgtgctctgggcagcaggtaggaagggacagggacctctcatctcaagggctgccccaaagggccctcagggaccatgggcctgttaggaccccagcaccccagtgtcgatcctggaagtcaaaggtcacgactgtggggggccagctcatgtcactgatggcagcaggcagggtttccagcatgggcggtgcgctgctgtctgatacttcattattgtgttgtcatcctagctgtataattaactatatccaaaagccggaagggaaacctgtagctctgcatatgg

SEQ ID NO: 128134 - DNA, 717 bp, Artificial Sequence
  derived and/or modified sequence
atgctgggtcagccagcaccactcgaacgcttcgcgtctcggcgaccgcaggtcctagctgtacgaaccgtatgtgacctggtgctaggaaagatggacaaggactgcgagatgaagcgcaccaccctcgatagccctctcggcaagctggaactctctggatgcgaacaaggcctccacgaaataaagctgttgggaaagggaaccagcgctgcagacgccgtggaagtaccagcacccgcagctgtgttgggaggacctgagccccttatgcagtgcactgcctggctcaatgcatactttcaccagcctgaagcaattgaggagttccccgttccggctctccaccacccagtctttcagcaggagagtttcactagacaggtgctttggaagttgctgaaggtagtaaagtttggtgaagttatttcgtaccagcagttggccgctctcgcgggtaatccaaaggcagccagagcagtgggcggtgccatgcgtgggaaccctgttcccatcctgatcccctgccaccgcgtggtttgcagttctggcgcagtgggtaattacagcgggggactggctgtcaaggaatggctgcttgcccatgagggacaccggctaggaaaacctggcctgggcggtagctctgggctcgccggtgcttggctgaaaggtgccggtgccacaagcggaagcccccctgcaggacggaattag

SEQ ID NO: 128135 - protein, 185 aa, Artificial Sequence
  derived and/or modified sequence
MARGAALALLLFGLLGVLVAAPDGGFDLSDALPDNENKKPTAIPKKPSAGDDFDLGDAVVDGENDDPRPPNPPKPMPNPNPNHPSSSGSFSDADLADGVSGGEGKGGSDGGGSHRKEGEEADAPGVIPGIVGAVVVAVAGAISSFIAYQKKKLCFKENAEQGEVDMESHRNANAEPAVQRTLLEK

SEQ ID NO: 128136 - protein, 201 aa, Artificial Sequence
  derived and/or modified sequence
RRWGRPAGTPGASSLPGRTRCAHGGPGPEEAPTFSPTLFLEPFQREKSAFVVGVANSYMWGGLGRDGGFDLSDALPDNENKKPTAIPKKPSAGDDFDLGDAVVDGENDDPRPPNPPKPMPNPNPNHPSSSGSFSDADLADGVSGGEGKGGSDGGGSHRKEGEEADAPGVIPGIVGAVVVAVAGAISSFIAYQKKKLCFKEN

SEQ ID NO: 128137 - DNA, 558 bp, Artificial Sequence
  derived and/or modified sequence
atggccaggggggccgctttagccctgctccttttcggactgctgggggttctcgttgcagccccggacggcggatttgatttgtctgacgcattgcccgacaatgaaaataagaagccaaccgcaattcctaaaaaacccagtgcaggtgatgactttgatctcggggacgcagttgtggacggtgagaacgacgatccacgcccaccgaatcccccaaagccaatgcctaatcccaatcccaatcacccgagctcaagcggcagcttctcggacgcggatctggcagatggggtttctgggggtgaaggaaagggcggatccgacggaggtggctctcacaggaaggagggagaagaggcagacgcacctggagtgattccagggattgtgggggctgtggttgtggcagtcgccggagccatctccagtttcatcgcctaccagaaaaaaaaactctgttttaaggaaaatgccgagcagggagaagtggacatggaatctcaccggaacgccaatgcggaacctgctgtgcagcgcacgcttctcgagaaatag

SEQ ID NO: 128138 - DNA, 558 bp, Artificial Sequence
  derived and/or modified sequence
atggcccggggagctgccctggccctgctgctgtttggcctgctgggcgtgctggtggccgccccagatggcggctttgacctgagtgatgccctgcctgacaatgaaaacaagaagcccacagccatccccaagaagcccagcgctggagatgactttgacctgggagatgctgtggtggatggagaaaatgatgaccccaggcctcccaacccccccaagcccatgcccaaccccaaccccaaccaccccagcagcagcggcagcttcagtgatgctgacctggctgatggagtgtctggaggagagggcaaaggaggcagtgatggcggcggcagccacaggaaggagggggaggaggctgatgcccctggggtcatccctggcatcgtgggcgctgtggtggtggccgtggccggggccatcagcagcttcatcgcctaccagaagaagaagctgtgcttcaaggaaaatgctgagcagggcgaggtggacatggagagccacagaaatgccaatgctgagcctgctgtgcagaggaccctgctggagaagtag

SEQ ID NO: 128139 - DNA, 558 bp, Artificial Sequence
  derived and/or modified sequence
atggcccggggcgccgccctggccctgctgctgttcggcctgctgggagtgctggtggcagcaccagatggagggtttgacctctccgacgcactacctgataatgaaaataagaagcccaccgcaattcctaagaaaccaagcgccggtgacgattttgaccttggcgatgcagtcgtggacggcgagaacgacgatcctcgccccccaaatccccctaagccaatgcccaaccctaatcctaatcatccttcctcaagtggttctttttctgatgctgatcttgcagatggcgtctccgggggcgagggcaaaggcgggtcagacggtggcggctctcacagaaaggaaggcgaagaagctgacgctccaggagtcatccctgggattgtaggtgctgtggttgttgcagtggcaggtgcaatctcctctttcattgcatatcagaaaaagaaactttgctttaaggagaatgctgagcagggcgaggtggatatggaatcccataggaacgccaatgcggaaccagccgttcaacgaactcttcttgagaagtag

SEQ ID NO: 128140 - DNA, 558 bp, Artificial Sequence
  derived and/or modified sequence
atggcacgcggtgccgctctcgcactgctcctgttcgggttattgggcgtactggttgccgctccggacggagggttcgatctcagcgatgccctgcccgataatgagaacaaaaaacccactgctatccctaaaaaaccttccgccggtgacgattttgacctaggagacgctgtggtggacggtgagaatgacgatcctcgccctcctaacccgcctaagcccatgcccaatcccaacccaaaccatccatctagtagtgggagcttctctgacgccgatctagcggacggagtgtctggcggagaaggtaagggaggttctgacggcggaggctctcaccgcaaggagggtgaagaagcagacgctccaggtgttatccctggcattgtgggtgccgttgtggtggccgtggcaggagcaatctcttcatttatagcataccagaagaagaagctttgttttaaggagaatgctgagcagggcgaggtggacatggagagccaccgtaacgcgaacgctgaacctgctgtgcagcggacgctgttagaaaagtag

SEQ ID NO: 128141 - DNA, 1245 bp, Artificial Sequence
  derived and/or modified sequence
gcgcgcgtggaggccggggcggggcgggcgcagccggcgctgagcttgcagggccgctcccctcacccgcccccttcgagtccccgggcttcgccccacccggcccgtgggggagtatctgtcctgccgccttcgcccacgccctgcactccgggaccgtccctgcgcgctctgggcgcaccatggcccgcggggctgcgctggcgctgctgctcttcggcctgctgggtgttctggtcgccgccccggatggtggtttcgatttatccgatgcccttcctgacaatgaaaacaagaaacccactgcaatccccaagaaacccagtgctggggatgactttgacttaggagatgctgttgttgatggagaaaatgacgacccacgaccaccgaacccacccaaaccgatgccaaatccaaaccccaaccaccctagttcctccggtagcttttcagatgctgaccttgcggatggcgtttcaggtggagaaggaaaaggaggcagtgatggtggaggcagccacaggaaagaaggggaagaggccgacgccccaggcgtgatccccgggattgtgggggctgtcgtggtcgccgtggctggagccatctctagcttcattgcttaccagaaaaagaagctatgcttcaaagaaaatgcagaacaaggggaggtggacatggagagccaccggaatgccaacgcagagccagctgttcagcgtactcttttagagaaatagaagattgtcggcagaaacagcccaggcgttggcagcagggttagaacagctgcctgaggctcctccctgaaggacacctgcctgagagcagagatggaggccttctgttcacggcggattctttgttttaatcttgcgatgtgctttgcttgttgctgggcggatgatgtttactaacgatgaattttacatccaaagggggataggcacttggacccccattctccaaggcccgggggggcggtttcccatgggatgtgaaaggctggccattattaagtccctgtaactcaaatgtcaaccccaccgaggcacccccccgtcccccagaatcttggctgtttacaaatcacgtgtccatcgagcacgtctgaaacccctggtagccccgacttctttttaattaaaataaggtaagcccttcaatttgtttcttcaatatttctttcatttgtagggatatttgtttttcatatcagactaataaaaagaaattagaaaccaa

SEQ ID NO: 128142 - DNA, 558 bp, Artificial Sequence
  derived and/or modified sequence
atggccagaggcgccgccctggccctgctgctgttcggcctgctgggcgtgctggtggccgcccccgacggcggcttcgacctgagcgacgccctgcccgacaacgagaacaagaagcccaccgccatccccaagaagcccagcgccggcgacgacttcgacctgggcgacgccgtggtggacggcgagaacgacgaccccagaccccccaacccccccaagcccatgcccaaccccaaccccaaccaccccagcagcagcggcagcttcagcgacgccgacctggccgacggcgtgagcggcggcgagggcaagggcggcagcgacggcggcggcagccacagaaaggagggcgaggaggccgacgcccccggcgtgatccccggcatcgtgggcgccgtggtggtggccgtggccggcgccatcagcagcttcatcgcctaccagaagaagaagctgtgcttcaaggagaacgccgagcagggcgaggtggacatggagagccacagaaacgccaacgccgagcccgccgtgcagagaaccctgctggagaagtag

SEQ ID NO: 128143 - protein, 115 aa, Artificial Sequence
  derived and/or modified sequence
MPMFIVNTNVPRASVPDGFLSELTQQLAQATGKPPQYIAVHVVPDQLMAFGGSSEPCALCSLHSIGKIGGAQNRSYSKLLCGLLAERLRISPDRVYINYYDMNAANVGWNNSTFA

SEQ ID NO: 128144 - DNA, 348 bp, Artificial Sequence
  derived and/or modified sequence
atgcccatgttcattgtgaacactaatgtccctcgggcctccgtgcctgacgggtttttatcagaacttactcagcagctggcgcaggctactggcaagccaccccaatacatcgcggtgcatgttgtcccagaccagttgatggcgtttggcggatcaagcgaaccatgtgccctctgctccctgcattccattggtaaaatcgggggcgcacagaaccgctcctatagcaagctgctgtgtggacttctcgcagagagacttcggatatcccctgatcgcgtctacatcaactactatgacatgaatgcagccaacgtggggtggaataactccaccttcgcttag

SEQ ID NO: 128145 - DNA, 348 bp, Artificial Sequence
  derived and/or modified sequence
atgcccatgtttattgtgaacaccaacgtgccccgggcctctgtgcctgatggcttcctgtctgagctgacccagcagctggcccaggccaccgggaagccaccccagtacatcgctgtgcacgtggtgcctgaccagctgatggccttcggcggcagcagcgagccctgtgccctgtgcagcctgcacagcatcggcaagattggaggagcccagaacagaagctacagcaagctgctgtgtggcctgctggccgagcggctgcgcatcagcccagacagagtgtacatcaactactatgacatgaatgctgccaacgtgggctggaacaacagcacctttgcctag

SEQ ID NO: 128146 - DNA, 939 bp, Artificial Sequence
  derived and/or modified sequence
acaggggctcagtgcgtgcagtggaatgaactgggcttcatctctggaagggtaaggggccatcttccgggttcaccgccgcatccccacccccggcacagcgcctcctggcgactaacatcggtgacttagtgaaaggactaagaaagacccgaggcgaggccggaacaggccgatttctagccgccaagtggagaacaggttggagcggtgcgccgggcttagcggcggttgctggaggaacgggcggagtcgcccagggtcctgccctgcgggggtcgagccgaggcaggcggtgacttccccactcggggcggagccgcagcctcgcgggggcggggcctggcgccggcggtggcgtcacaaaaggcgggaccacagtggtgtccgagaagtcaggcacgtagctcagcggcggccgcggcgcgtgcgtctgtgcctctgcgcgggtctcctggtccttctgccatcatgccgatgttcatcgtaaacaccaacgtgccccgcgcctccgtgccggacgggttcctctccgagctcacccagcagctggcgcaggccaccggcaagcccccccagtacatcgcggtgcacgtggtcccggaccagctcatggccttcggcggctccagcgagccgtgcgcgctctgcagcctgcacagcatcggcaagatcggcggcgcgcagaaccgctcctacagcaagctgctgtgcggcctgctggccgagcgcctgcgcatcagcccggacagggtctacatcaactattacgacatgaacgcggccaatgtgggctggaacaactccaccttcgcctaagagccgcagggacccacgctgtctgcgctggctccacccgggaacccgccgcacgctgtgttctaggcccgcccaccccaaccttctggtggggagaaataaacggtttagagactagga

SEQ ID NO: 128147 - DNA, 348 bp, Artificial Sequence
  derived and/or modified sequence
atgcccatgttcatcgtgaacaccaacgtgccccgggccagcgtgcccgatgggttcctgagcgagctcacacagcagctcgcccaagccacaggcaaaccgccgcaatacattgcggtccacgtcgtgccagaccagctgatggcattcggcggcagtagcgagccttgcgctctgtgcagcttacattctatcggaaaaatagggggagctcagaaccggtcttactccaaattgctgtgtgggcttttagccgaaaggctccgcattagtccagaccgcgtttacattaattattacgacatgaatgctgcaaatgtcggatggaacaattctacctttgcctag

SEQ ID NO: 128148 - DNA, 348 bp, Artificial Sequence
  derived and/or modified sequence
atgcccatgttcatcgtgaacaccaacgtgccccgagcctccgtacccgacgggttcctgagcgaactgacacagcagctggctcaagccaccgggaaacctcctcaatacattgctgttcacgtagtacccgaccagctcatggcttttggaggttcctcagagccatgcgccctgtgctcgctgcacagcatcgggaagattggaggggcacagaacaggagttactcgaaacttttgtgcggtttgctcgctgagagacttagaatatctcccgatcgcgtctacattaattactacgatatgaacgccgcaaatgtgggctggaataacagcaccttcgcttag

SEQ ID NO: 128149 - DNA, 348 bp, Artificial Sequence
  derived and/or modified sequence
atgcccatgttcatcgtgaacaccaacgtgcccagagccagcgtgcccgacggcttcctgagcgagctgacccagcagctggcccaggccaccggcaagcccccccagtacatcgccgtgcacgtggtgcccgaccagctgatggccttcggcggcagcagcgagccctgcgccctgtgcagcctgcacagcatcggcaagatcggcggcgcccagaacagaagctacagcaagctgctgtgcggcctgctggccgagagactgagaatcagccccgacagagtgtacatcaactactacgacatgaacgccgccaacgtgggctggaacaacagcaccttcgcctag

SEQ ID NO: 128150 - protein, 125 aa, Artificial Sequence
  derived and/or modified sequence
MKKSGVLFLLGIILLVLIGVQGTPVVRKGRCSCISTNQGTIHLQSLKDLKQFAPSPSCEKIEIIATLKNGVQTCLNPDSADVKELIKKWEKQVSQKKKQKNGKKHQKKKVLKVRKSQRSRQKKTT

SEQ ID NO: 128151 - DNA, 378 bp, Artificial Sequence
  derived and/or modified sequence
atgaagaagagcggcgtgctgttcctgctgggcatcatcctgctggtgctgatcggcgtgcagggcacccccgtggtgagaaagggcagatgcagctgcatcagcaccaaccagggcaccatccacctgcagagcctgaaggacctgaagcagttcgcccccagccccagctgcgagaagatcgagatcatcgccaccctgaagaacggcgtgcagacctgcctgaaccccgacagcgccgacgtgaaggagctgatcaagaagtgggagaagcaggtgagccagaagaagaagcagaagaacggcaagaagcaccagaagaagaaggtgctgaaggtgagaaagagccagagaagcagacagaagaagaccacctag

SEQ ID NO: 128152 - DNA, 2740 bp, Artificial Sequence
  derived and/or modified sequence
atccaatacaggagtgacttggaactccattctatcactatgaagaaaagtggtgttcttttcctcttgggcatcatcttgctggttctgattggagtgcaaggaaccccagtagtgagaaagggtcgctgttcctgcatcagcaccaaccaagggactatccacctacaatccttgaaagaccttaaacaatttgccccaagcccttcctgcgagaaaattgaaatcattgctacactgaagaatggagttcaaacatgtctaaacccagattcagcagatgtgaaggaactgattaaaaagtgggagaaacaggtcagccaaaagaaaaagcaaaagaatgggaaaaaacatcaaaaaaagaaagttctgaaagttcgaaaatctcaacgttctcgtcaaaagaagactacataagagaccacttcaccaataagtattctgtgttaaaaatgttctattttaattataccgctatcattccaaaggaggatggcatataatacaaaggcttattaatttgactagaaaatttaaaacattactctgaaattgtaactaaagttagaaagttgattttaagaatccaaacgttaagaattgttaaaggctatgattgtctttgttcttctaccacccaccagttgaatttcatcatgcttaaggccatgattttagcaatacccatgtctacacagatgttcacccaaccacatcccactcacaacagctgcctggaagagcagccctaggcttccacgtactgcagcctccagagagtatctgaggcacatgtcagcaagtcctaagcctgttagcatgctggtgagccaagcagtttgaaattgagctggacctcaccaagctgctgtggccatcaacctctgtatttgaatcagcctacaggcctcacacacaatgtgtctgagagattcatgctgattgttattgggtatcaccactggagatcaccagtgtgtggctttcagagcctcctttctggctttggaagccatgtgattccatcttgcccgctcaggctgaccactttatttctttttgttcccctttgcttcattcaagtcagctcttctccatcctaccacaatgcagtgcctttcttctctccagtgcacctgtcatatgctctgatttatctgagtcaactcctttctcatcttgtccccaacaccccacagaagtgctttcttctcccaattcatcctcactcagtccagcttagttcaagtcctgcctcttaaataaacctttttggacacacaaattatcttaaaactcctgtttcacttggttcagtaccacatgggtgaacactcaatggttaactaattcttgggtgtttatcctatctctccaaccagattgtcagctccttgagggcaagagccacagtatatttccctgtttcttccacagtgcctaataatactgtggaactaggttttaataattttttaattgatgttgttatgggcaggatggcaaccagaccattgtctcagagcaggtgctggctctttcctggctactccatgttggctagcctctggtaacctcttacttattatcttcaggacactcactacagggaccagggatgatgcaacatccttgtctttttatgacaggatgtttgctcagcttctccaacaataagaagcacgtggtaaaacacttgcggatattctggactgtttttaaaaaatatacagtttaccgaaaatcatataatcttacaatgaaaaggactttatagatcagccagtgaccaaccttttcccaaccatacaaaaattccttttcccgaaggaaaagggctttctcaataagcctcagctttctaagatctaacaagatagccaccgagatccttatcgaaactcattttaggcaaatatgagttttattgtccgtttacttgtttcagagtttgtattgtgattatcaattaccacaccatctcccatgaagaaagggaacggtgaagtactaagcgctagaggaagcagccaagtcggttagtggaagcatgattggtgcccagttagcctctgcaggatgtggaaacctccttccaggggaggttcagtgaattgtgtaggagaggttgtctgtggccagaatttaaacctatactcactttcccaaattgaatcactgctcacactgctgatgatttagagtgctgtccggtggagatcccacccgaacgtcttatctaatcatgaaactccctagttccttcatgtaacttccctgaaaaatctaagtgtttcataaatttgagagtctgtgacccacttaccttgcatctcacaggtagacagtatataactaacaaccaaagactacatattgtcactgacacacacgttataatcatttatcatatatatacatacatgcatacactctcaaagcaaataatttttcacttcaaaacagtattgacttgtataccttgtaatttgaaatattttctttgttaaaatagaatggtatcaataaatagaccattaatcagaaaacagatcttgattttttttctcttgaatgtacccttcaactgttgaatgtttaatagtaaatcttatatgtccttatttactttttagctttctctcaaataaagtgtaacactagttgagataacacatgaaagctctttaaagggtcgatcgggaacaggaaaaaaaacctatggaaaatatgacaacac

SEQ ID NO: 128153 - DNA, 378 bp, Artificial Sequence
  derived and/or modified sequence
atgaagaaaagcggcgtcctgttcttgttgggcatcattctgttggtgctgataggtgtacagggtactccagtcgttagaaagggccggtgctcctgcattagtactaaccaaggaaccatccacctgcaatccctgaaggacctcaagcagttcgccccatcaccatcatgcgaaaagattgagataattgctaccctgaagaacggagtgcagacttgtcttaaccctgactcggccgacgtgaaagagctgatcaagaagtgggagaagcaggtgtctcagaagaagaaacaaaagaacgggaagaagcatcagaaaaaaaaggtgctgaaagtgagaaagtcccagaggagccgccaaaagaagaccacgtag

SEQ ID NO: 128154 - DNA, 378 bp, Artificial Sequence
  derived and/or modified sequence
atgaagaagagcggcgtgctcttcctgctgggcatcatcctgctggtgctgattggagtgcagggcacccctgtggtgaggaagggccgctgcagctgcatcagcaccaaccagggcaccatccacctgcagagcctgaaggacctgaagcagtttgcccccagccccagctgtgagaagattgagatcatcgccaccctgaagaatggagtgcagacctgcctgaacccagattctgcagatgtgaaggagctgatcaagaagtgggagaagcaggtgtcccagaagaagaagcagaagaatggcaagaagcaccagaagaagaaggtgctgaaggtgaggaagagccagaggagccggcagaagaagaccacctag

SEQ ID NO: 128155 - DNA, 378 bp, Artificial Sequence
  derived and/or modified sequence
atgaagaagagcggcgtgctgttcctgctgggcatcatcctgctggtgcttatcggggtgcagggaacgcccgtcgtgcgcaagggcagatgttcgtgcatctcaaccaaccaagggacgatacacctgcagagcctgaaagatctgaagcaatttgctccctccccttcctgcgaaaagatagaaataatagcgaccctaaaaaatggagttcagacatgtctcaatcctgactctgcagacgtgaaggagctgatcaagaaatgggaaaaacaggtctctcagaagaaaaaacagaagaacggaaaaaagcatcagaaaaagaaggtgctgaaagtgcggaaaagccaacgctcccgacagaaaaaaactacttag

SEQ ID NO: 128156 - DNA, 378 bp, Artificial Sequence
  derived and/or modified sequence
atgaagaagtcaggagtgctcttccttctgggcattatcctgttggttctcattggggttcaggggactcccgtggtgagaaaggggaggtgttcctgcatctctaccaatcaaggcaccattcacctacagtccttaaaagaccttaagcaattcgccccttcccccagttgtgaaaaaattgagatcatcgcaactttaaagaacggggtgcagacttgtctgaaccctgattccgccgatgtgaaggagttaatcaaaaagtgggagaagcaagtgtctcagaaaaagaagcaaaagaacggaaagaaacaccagaagaagaaagtcttgaaggtacgaaagtcacagcgtagtaggcagaagaaaactacatag

SEQ ID NO: 128157 - protein, 3256 aa, Artificial Sequence
  derived and/or modified sequence
MWPTRRLVTIKRSGVDGPHFPLSLSTCLFGRGIECDIRIQLPVVSKQHCKIEIHEQEAILHNFSSTNPTQVNGSVIDEPVRLKHGDVITIIDRSFRYENESLQNGRKSTEFPRKIREQEPARRVSRSSFSSDPDEKAQDSKAYSKITEGKVSGNPQVHIKNVKEDSTADDSKDSVAQGTTNVHSSEHAGRNGRNAADPISGDFKEISSVKLVSRYGELKSVPTTQCLDNSKKNESPFWKLYESVKKELDVKSQKENVLQYCRKSGLQTDYATEKESADGLQGETQLLVSRKSRPKSGGSGHAVAEPASPEQELDQNKGKGRDVESVQTPSKAVGASFPLYEPAKMKTPVQYSQQQNSPQKHKNKDLYTTGRRESVNLGKSEGFKAGDKTLTPRKLSTRNRTPAKVEDAADSATKPENLSSKTRGSIPTDVEVLPTETEIHNEPFLTLWLTQVERKIQKDSLSKPEKLGTTAGQMCSGLPGLSSVDINNFGDSINESEGIPLKRRRVSFGGHLRPELFDENLPPNTPLKRGEAPTKRKSLVMHTPPVLKKIIKEQPQPSGKQESGSEIHVEVKAQSLVISPPAPSPRKTPVASDQRRRSCKTAPASSSKSQTEVPKRGGRKSGNLPSKRVSISRSQHDILQMICSKRRSGASEANLIVAKSWADVVKLGAKQTQTKVIKHGPQRSMNKRQRRPATPKKPVGEVHSQFSTGHANSPCTIIIGKAHTEKVHVPARPYRVLNNFISNQKMDFKEDLSGIAEMFKTPVKEQPQLTSTCHIAISNSENLLGKQFQGTDSGEEPLLPTSESFGGNVFFSAQNAAKQPSDKCSASPPLRRQCIRENGNVAKTPRNTYKMTSLETKTSDTETEPSKTVSTANRSGRSTEFRNIQKLPVESKSEETNTEIVECILKRGQKATLLQQRREGEMKEIERPFETYKENIELKENDEKMKAMKRSRTWGQKCAPMSDLTDLKSLPDTELMKDTARGQNLLQTQDHAKAPKSEKGKITKMPCQSLQPEPINTPTHTKQQLKASLGKVGVKEELLAVGKFTRTSGETTHTHREPAGDGKSIRTFKESPKQILDPAARVTGMKKWPRTPKEEAQSLEDLAGFKELFQTPGPSEESMTDEKTTKIACKSPPPESVDTPTSTKQWPKRSLRKADVEEEFLALRKLTPSAGKAMLTPKPAGGDEKDIKAFMGTPVQKLDLAGTLPGSKRQLQTPKEKAQALEDLAGFKELFQTPGHTEELVAAGKTTKIPCDSPQSDPVDTPTSTKQRPKRSIRKADVEGELLACRNLMPSAGKAMHTPKPSVGEEKDIIIFVGTPVQKLDLTENLTGSKRRPQTPKEEAQALEDLTGFKELFQTPGHTEEAVAAGKTTKMPCESSPPESADTPTSTRRQPKTPLEKRDVQKELSALKKLTQTSGETTHTDKVPGGEDKSINAFRETAKQKLDPAASVTGSKRHPKTKEKAQPLEDLAGLKELFQTPVCTDKPTTHEKTTKIACRSQPDPVDTPTSSKPQSKRSLRKVDVEEEFFALRKRTPSAGKAMHTPKPAVSGEKNIYAFMGTPVQKLDLTENLTGSKRRLQTPKEKAQALEDLAGFKELFQTRGHTEESMTNDKTAKVACKSSQPDPDKNPASSKRRLKTSLGKVGVKEELLAVGKLTQTSGETTHTHTEPTGDGKSMKAFMESPKQILDSAASLTGSKRQLRTPKGKSEVPEDLAGFIELFQTPSHTKESMTNEKTTKVSYRASQPDLVDTPTSSKPQPKRSLRKADTEEEFLAFRKQTPSAGKAMHTPKPAVGEEKDINTFLGTPVQKLDQPGNLPGSNRRLQTRKEKAQALEELTGFRELFQTPCTDNPTTDEKTTKKILCKSPQSDPADTPTNTKQRPKRSLKKADVEEEFLAFRKLTPSAGKAMHTPKAAVGEEKDINTFVGTPVEKLDLLGNLPGSKRRPQTPKEKAKALEDLAGFKELFQTPGHTEESMTDDKITEVSCKSPQPDPVKTPTSSKQRLKISLGKVGVKEEVLPVGKLTQTSGKTTQTHRETAGDGKSIKAFKESAKQMLDPANYGTGMERWPRTPKEEAQSLEDLAGFKELFQTPDHTEESTTDDKTTKIACKSPPPESMDTPTSTRRRPKTPLGKRDIVEELSALKQLTQTTHTDKVPGDEDKGINVFRETAKQKLDPAASVTGSKRQPRTPKGKAQPLEDLAGLKELFQTPICTDKPTTHEKTTKIACRSPQPDPVGTPTIFKPQSKRSLRKADVEEESLALRKRTPSVGKAMDTPKPAGGDEKDMKAFMGTPVQKLDLPGNLPGSKRWPQTPKEKAQALEDLAGFKELFQTPGTDKPTTDEKTTKIACKSPQPDPVDTPASTKQRPKRNLRKADVEEEFLALRKRTPSAGKAMDTPKPAVSDEKNINTFVETPVQKLDLLGNLPGSKRQPQTPKEKAEALEDLVGFKELFQTPGHTEESMTDDKITEVSCKSPQPESFKTSRSSKQRLKIPLVKVDMKEEPLAVSKLTRTSGETTQTHTEPTGDSKSIKAFKESPKQILDPAASVTGSRRQLRTRKEKARALEDLVDFKELFSAPGHTEESMTIDKNTKIPCKSPPPELTDTATSTKRCPKTRPRKEVKEELSAVERLTQTSGQSTHTHKEPASGDEGIKVLKQRAKKKPNPVEEEPSRRRPRAPKEKAQPLEDLAGFTELSETSGHTQESLTAGKATKIPCESPPLEVVDTTASTKRHLRTRVQKVQVKEEPSAVKFTQTSGETTDADKEPAGEDKGIKALKESAKQTPAPAASVTGSRRRPRAPRESAQAIEDLAGFKDPAAGHTEESMTDDKTTKIPCKSSPELEDTATSSKRRPRTRAQKVEVKEELLAVGKLTQTSGETTHTDKEPVGEGKGTKAFKQPAKRKLDAEDVIGSRRQPRAPKEKAQPLEDLASFQELSQTPGHTEELANGAADSFTSAPKQTPDSGKPLKISRRVLRAPKVEPVGDVVSTRDPVKSQSKSNTSLPPLPFKRGGGKDGSVTGTKRLRCMPAPEEIVEELPASKKQRVAPRARGKSSEPVVIMKRSLRTSAKRIEPAEELNSNDMKTNKEEHKLQDSVPENKGISLRSRRQNKTEAEQQITEVFVLAERIEINRNEKKPMKTSPEMDIQNPDDGARKPIPRDKVTENKRCLRSARQNESSQPKVAEESGGQKSAKVLMQNQKGKGEAGNSDSMCLRSRKTKSQPAASTLESKSVQRVTRSVKRCAENPKKAEDNVCVKKIRTRSHRDSEDI

SEQ ID NO: 128158 - protein, 3255 aa, Artificial Sequence
  derived and/or modified sequence
MWPTRRLVTIKRSGVDGPHFPLSLSTCLFGRGIECDIRIQLPVVSKQHCKIEIHEQEAILHNFSSTNPTQVNGSVIDEPVRLKHGDVITIIDRSFRYENESLQNGRKSTEFPRKIREQEPARRVSRSSFSSDPDEKAQDSKAYSKITEGKVSGNPQVHIKNVKEDSTADDSKDSVAQGTTNVHSSEHAGRNGRNAADPISGDFKEISSVKLVSRYGELKSVPTTQCLDNSKKNESPFWKLYESVKKELDVKSQKENVLQYCRKSGLQTDYATEKESADGLQGETQLLVSRKSRPKSGGSGHAVAEPASPEQELDQNKGKGRDVESVQTPSKAVGASFPLYEPAKMKTPVQYSQQQNSPQKHKNKDLYTTGRRESVNLGKSEGFKAGDKTLTPRKLSTRNRTPAKVEDAADSATKPENLSSKTRGSIPTDVEVLPTETEIHNEPFLTLWLTQVERKIQKDSLSKPEKLGTTAGQMCSGLPGLSSVDINNFGDSINESEGIPLKRRRVSFGGHLRPELFDENLPPNTPLKRGEAPTKRKSLVMHTPPVLKKIIKEQPQPSGKQESGSEIHVEVKAQSLVISPPAPSPRKTPVASDQRRRSCKTAPASSSKSQTEVPKRGGERVATCLQRVSISRSQHDILQMICSKRRSGASEANLIVAKSWADVVKLGAKQTQTKVIKHGPQRSMNKRQRRPATPKKPVGEVHSQFSTGHANSPCTIIIGKAHTEKVHVPARPYRVLNNFISNQKMDFKEDLSGIAEMFKTPVKEQPQLTSTCHIAISNSENLLGKQFQGTDSGEEPLLPTSESFGGNVFFSAQNAAKQPSDKCSASPPLRRQCIRENGNVAKTPRNTYKMTSLETKTSDTETEPSKTVSTANRSGRSTEFRNIQKLPVESKSEETNTEIVECILKRGQKATLLQQRREGEMKEIERPFETYKENIELKENDEKMKAMKRSRTWGQKCAPMSDLTDLKSLPDTELMKDTARGQNLLQTQDHAKAPKSEKGKITKMPCQSLQPEPINTPTHTKQQLKASLGKVGVKEELLAVGKFTRTSGETTHTHREPAGDGKSIRTFKESPKQILDPAARVTGMKKWPRTPKEEAQSLEDLAGFKELFQTPGPSEESMTDEKTTKIACKSPPPESVDTPTSTKQWPKRSLRKADVEEEFLALRKLTPSAGKAMLTPKPAGGDEKDIKAFMGTPVQKLDLAGTLPGSKRQLQTPKEKAQALEDLAGFKELFQTPGHTEELVAAGKTTKIPCDSPQSDPVDTPTSTKQRPKRSIRKADVEGELLACRNLMPSAGKAMHTPKPSVGEEKDIIIFVGTPVQKLDLTENLTGSKRRPQTPKEEAQALEDLTGFKELFQTPGHTEEAVAAGKTTKMPCESSPPESADTPTSTRRQPKTPLEKRDVQKELSALKKLTQTSGETTHTDKVPGGEDKSINAFRETAKQKLDPAASVTGSKRHPKTKEKAQPLEDLAGLKELFQTPVCTDKPTTHEKTTKIACRSQPDPVDTPTSSKPQSKRSLRKVDVEEEFFALRKRTPSAGKAMHTPKPAVSGEKNIYAFMGTPVQKLDLTENLTGSKRRLQTPKEKAQALEDLAGFKELFQTRGHTEESMTNDKTAKVACKSSQPDPDKNPASSKRRLKTSLGKVGVKEELLAVGKLTQTSGETTHTHTEPTGDGKSMKAFMESPKQILDSAASLTGSKRQLRTPKGKSEVPEDLAGFIELFQTPSHTKESMTNEKTTKVSYRASQPDLVDTPTSSKPQPKRSLRKADTEEEFLAFRKQTPSAGKAMHTPKPAVGEEKDINTFLGTPVQKLDQPGNLPGSNRRLQTRKEKAQALEELTGFRELFQTPCTDNPTTDEKTTKKILCKSPQSDPADTPTNTKQRPKRSLKKADVEEEFLAFRKLTPSAGKAMHTPKAAVGEEKDINTFVGTPVEKLDLLGNLPGSKRRPQTPKEKAKALEDLAGFKELFQTPGHTEESMTDDKITEVSCKSPQPDPVKTPTSSKQRLKISLGKVGVKEEVLPVGKLTQTSGKTTQTHRETAGDGKSIKAFKESAKQMLDPANYGTGMERWPRTPKEEAQSLEDLAGFKELFQTPDHTEESTTDDKTTKIACKSPPPESMDTPTSTRRRPKTPLGKRDIVEELSALKQLTQTTHTDKVPGDEDKGINVFRETAKQKLDPAASVTGSKRQPRTPKGKAQPLEDLAGLKELFQTPICTDKPTTHEKTTKIACRSPQPDPVGTPTIFKPQSKRSLRKADVEEESLALRKRTPSVGKAMDTPKPAGGDEKDMKAFMGTPVQKLDLPGNLPGSKRWPQTPKEKAQALEDLAGFKELFQTPGTDKPTTDEKTTKIACKSPQPDPVDTPASTKQRPKRNLRKADVEEEFLALRKRTPSAGKAMDTPKPAVSDEKNINTFVETPVQKLDLLGNLPGSKRQPQTPKEKAEALEDLVGFKELFQTPGHTEESMTDDKITEVSCKSPQPESFKTSRSSKQRLKIPLVKVDMKEEPLAVSKLTRTSGETTQTHTEPTGDSKSIKAFKESPKQILDPAASVTGSRRQLRTRKEKARALEDLVDFKELFSAPGHTEESMTIDKNTKIPCKSPPPELTDTATSTKRCPKTRPRKEVKEELSAVERLTQTSGQSTHTHKEPASGDEGIKVLKQRAKKKPNPVEEEPSRRRPRAPKEKAQPLEDLAGFTELSETSGHTQESLTAGKATKIPCESPPLEVVDTTASTKRHLRTRVQKVQVKEEPSAVKFTQTSGETTDADKEPAGEDKGIKALKESAKQTPAPAASVTGSRRRPRAPRESAQAIEDLAGFKDPAAGHTEESMTDDKTTKIPCKSSPELEDTATSSKRRPRTRAQKVEVKEELLAVGKLTQTSGETTHTDKEPVGEGKGTKAFKQPAKRKLDAEDVIGSRRQPRAPKEKAQPLEDLASFQELSQTPGHTEELANGAADSFTSAPKQTPDSGKPLKISRRVLRAPKVEPVGDVVSTRDPVKSQSKSNTSLPPLPFKRGGGKDGSVTGTKRLRCMPAPEEIVEELPASKKQRVAPRARGKSSEPVVIMKRSLRTSAKRIEPAEELNSNDMKTNKEEHKLQDSVPENKGISLRSRRQNKTEAEQQITEVFVLAERIEINRNEKKPMKTSPEMDIQNPDDGARKPIPRDKVTENKRCLRSARQNESSQPKVAEESGGQKSAKVLMQNQKGKGEAGNSDSMCLRSRKTKSQPAASTLESKSVQRVTRSVKRCAENPKKAEDNVCVKKIRTRSHRDSEDI

SEQ ID NO: 128159 - protein, 46 aa, Artificial Sequence
  derived and/or modified sequence
MWPTRRLVTIKRSGVDGPHFPLSLSTCLFGRRKCVLQCTECSKTAI

SEQ ID NO: 128160 - DNA, 9771 bp, Artificial Sequence
  derived and/or modified sequence
atgtggccaactaggcgactggtgacaataaagaggtcaggggtggatggaccccattttcctctctccctaagtacctgtctgttcggccgggggatcgaatgcgatatccggattcagcttcctgtggtgtcaaaacaacactgcaagatcgaaattcacgagcaggaagccatcctgcacaactttagttccaccaatccaactcaggtcaatggctccgtcatagatgaaccagtgaggcttaagcatggggatgtcataacgataatcgaccgctctttcagatacgagaatgagtcgcttcagaacggccgtaaatccaccgagtttcccagaaaaattcgggagcaggagcctgctcgcagggtgtcaaggtcttccttctcttcagaccccgacgaaaaggcccaagattctaaagcttacagcaagatcaccgagggcaaagtctcaggtaatccacaggtgcacattaaaaacgtcaaggaggactcaacggctgacgactccaaggactctgtagcccagggaaccacaaatgtgcactcttctgaacatgcaggtcgtaacggccgcaatgcagctgaccctatttctggggacttcaaggagatctcaagtgtcaaattagtatctcgctatggggaactcaagtcagtgccgacaactcagtgcctggataatagtaagaagaatgagagtccattctggaaactctatgaatctgtgaagaaggaactcgatgttaagtcccagaaagaaaatgtgctgcaatactgcagaaaaagcgggttgcagacagattatgctacagaaaaagaaagtgccgatggcctacagggggaaacacagcttctcgtgtcacgcaaaagccgtccgaaatccggggggtctgggcacgcggttgcagaaccagcctcaccggaacaggagctggaccagaacaagggaaaaggaagggacgtggaatccgtacagaccccaagcaaggccgtgggcgctagttttcctctgtacgaacctgccaaaatgaaaaccccagtgcagtacagccaacaacagaattctccccaaaagcataaaaacaaggacctgtataccactggacggcgcgagtctgttaatttgggtaagtctgaaggattcaaagctggggacaaaacactgaccccacgcaagctgtctacccgtaatcgaactcctgccaaagtggaggatgctgccgacagcgcaactaagccagaaaacttgagctcaaagacccgcggatccatccccaccgatgttgaggtcctgcctactgaaaccgagatccacaacgagccatttctcacactgtggctaacgcaggtcgagcggaagatccaaaaagactctctgtcaaagcccgaaaagctaggcacaaccgctggccagatgtgcagcggcctgcctgggctgtcctcagtggatatcaacaactttggtgattccatcaatgaatccgagggaatcccattaaaacggcgcagggtctcatttggtggtcaccttcgaccagagctgtttgatgagaaccttccccctaatacacccctgaagcgcggggaggcaccaacaaagagaaaatctttagtgatgcataccccacccgtgctcaagaaaattatcaaggaacaacctcagccttccgggaagcaggagtcaggctcggagatccacgttgaagttaaggctcagtctttggtgatctccccaccggccccgtccccccggaaaaccccggtggcttctgatcagcggcgtcggagctgcaagactgctcctgccagctccagtaaaagtcaaacggaggttcccaagagaggaggcagaaaatccggaaacctgccctccaagcgcgtttctatttctcgcagccagcacgatatcctccagatgatctgtagtaaaaggcgcagcggagcttctgaagccaaccttatcgtcgccaaatcatgggctgatgttgtgaagcttggtgctaaacagacgcagactaaggtcatcaaacatggcccccagcggtccatgaataaacggcagaggaggccagccacgccgaagaagcctgttggggaggttcactcccagttctcaactggccatgccaactcaccttgcactatcatcatcggcaaggcccacaccgagaaggtgcacgtccccgccaggccttacagagtgctgaacaactttatctcaaaccagaagatggacttcaaagaggacctgagcggtatcgccgaaatgtttaaaacacctgtcaaagaacagcctcagctgaccagcacatgccacatcgccatttccaactctgagaatcttctggggaaacagtttcaggggacagattccggggaggagcccctgcttcccacctccgaaagcttcggtggtaacgtcttcttcagcgcccaaaacgctgccaaacagccatccgacaagtgttctgctagcccacctctgcgacgccaatgcattcgggagaacggtaatgtagccaagacaccccggaacacatataaaatgacgtcactcgaaacaaagacttctgacactgagactgaaccatccaagacagtgagtactgcaaacaggtccggacggagtaccgaatttagaaacatccagaaactgcccgttgagtccaaaagtgaggagaccaatacagagatagtcgaatgtatcctgaaacgagggcagaaggcgaccctcctgcaacagcggagagaaggcgagatgaaagaaattgagagacctttcgaaacatataaagagaatatcgaactgaaagagaacgatgagaagatgaaagccatgaagcgtagtagaacgtggggacagaaatgtgcgcctatgagcgacctcacagacctgaagtctctgcctgacactgagctcatgaaggacacggcccgcggacagaatctgctgcagacccaggatcatgctaaagcccccaaaagcgaaaaggggaagataacgaagatgccgtgtcagagtctgcaacccgaacccattaacacccccacccatacgaaacagcagctgaaggcatccctgggcaaagtgggagtaaaggaggagctgttagcggtgggcaagttcacacggacaagcggcgagaccactcacactcaccgggagccagcaggggatggcaaaagcattaggacattcaaagagtcccccaagcagatcctcgaccctgctgcccgagtgactggtatgaaaaagtggcctagaacacctaaagaggaggcccaaagcttagaggatctggccggattcaaagagctcttccagacaccaggcccctctgaagagtctatgaccgatgaaaaaaccactaaaattgcgtgtaaatccccccccccggagtcagtagatacgccaacatccaccaaacagtggccaaagcgctcgctgcgcaaagctgacgtggaagaagaattcctggcgctacgaaagttaaccccatcagccggcaaggctatgttaacaccaaaacctgctggcggggatgagaaggacataaaagcatttatgggcaccccggttcaaaaattggaccttgcagggacgctgcccggctccaagcggcaacttcagacacctaaagaaaaggctcaggcactggaagaccttgcaggattcaaagagctgttccagacccccggacacacagaggaactcgtggccgccggtaaaacgaccaaaattccgtgcgattcccctcagagtgacccagtggataccccgacaagcaccaaacagagacccaaacggtcgattcgtaaggcagacgtggagggtgaactgctggcctgccgcaacctcatgccgagcgccgggaaggctatgcacaccccgaaaccttcagttggtgaggagaaggacataatcatctttgtggggacaccagtgcagaaactcgatttgacagagaacttgactgggagtaagcggcggcctcagacacccaaggaggaggcacaggcccttgaggacttaacgggttttaaagagcttttccaaaccccgggacacaccgaagaagcagtggctgcaggaaagacaacaaaaatgccttgtgaatcttcaccaccagagtctgccgatactcccacaagtacccggagacagcctaaaactccgctcgagaagagagatgtgcagaaagagctctccgctctgaaaaaactgacccagacgtcgggcgaaacaacacataccgacaaggtgcctgggggagaggataaaagcatcaatgcattcagggagacggctaagcagaaactggacccagcagcctcagtgaccgggtctaagagacatcccaaaacaaaagaaaaagcgcaacccctggaggatctggctgggctcaaagagctctttcagactcctgtgtgcaccgacaagcctactacacacgaaaagaccactaaaatcgcctgtcgatcacaaccggatcctgtggatacccccacatctagcaagccacagtccaaaaggagtttgcggaaggtggatgttgaagaggaattttttgccctgcgcaaaaggaccccttctgccggcaaagcaatgcacacaccaaaaccagctgtgagcggtgagaagaacatctacgccttcatgggaacaccggtccaaaagttagatctgaccgagaacctgacaggaagtaagaggaggttgcaaacccctaaggaaaaagctcaagccctggaagatctcgctgggtttaaggagctgttccagacacgaggccacactgaagaatctatgactaacgataagacagccaaagtcgcatgtaagagctcccaaccagaccccgataaaaatcctgcctcatctaagaggagattgaaaaccagtctgggcaaagtaggagttaaggaggaactgttggcagtgggtaaattgacccagaccagcggcgaaacaactcatacccacacagagcccactggagatggaaagagcatgaaagcgtttatggaatcccccaagcagattctggactctgcggctagccttaccggtagcaagcgacaactacggacccctaagggaaaaagtgaggtccccgaagacttagctgggttcatcgagctttttcagacgccctcccacactaaggagagcatgacaaacgaaaagacaacaaaagttagctacagagcctctcagcccgacctggtggacacccccacaagtagtaagcctcaaccgaagcggtctctgcggaaagcggacactgaagaggaattccttgcctttaggaagcaaacaccaagcgctgggaaggctatgcatacgcccaagcctgccgttggcgaagagaaagacattaacaccttcctcggcaccccagtgcaaaaactggaccagcccggcaacctgccaggatccaatagacgtctgcaaacacggaaagagaaggcgcaagctctggaggagctcaccgggtttcgcgagctgttccaaaccccatgcaccgacaatccaacaacagatgagaagaccacgaagaaaatattatgcaagagtcctcagagtgaccctgcagacacaccgactaatactaaacagagaccaaagaggtccctgaagaaggcagatgtcgaggaagaattcctcgctttccgaaagcttaccccctcagctgggaaggccatgcacacacctaaagccgctgtgggggaagagaaagatatcaacacattcgtcggcacccccgtggagaagctcgatctcctgggcaaccttccaggtagtaaacgcagaccccagacccccaaggagaaggctaaagcccttgaggacctagctggcttcaaggagctgttccagacacccgggcacacagaggagagtatgaccgatgacaaaattaccgaagtttcctgcaagtctccacagcccgaccctgtcaagacacccaccagcagcaagcaaaggctaaagatttctctcggaaaggtgggtgtgaaggaagaagtgctccctgtcgggaagctgacgcagacctcaggtaagaccactcaaacccatagagagacagccggcgatggcaagtccattaaggcatttaaagagtcggccaaacagatgctggacccggccaactacggaactggaatggagagatggccccgtactcccaaagaagaagctcaatcactggaggatctggccggatttaaggagctatttcagacgcctgatcatacagaggaatcaacaactgacgacaaaacgactaagatcgcctgtaagtcccccccaccggagtctatggataccccgactagtacgcgcaggagacccaagacaccgctaggaaaacgggatattgtggaagagctatctgcgttgaaacagctgacgcaaaccacccacaccgacaaggtgccaggtgacgaagataaaggcatcaatgtattccgtgagacagcgaaacaaaaactggatcccgccgccagcgtgacaggtagcaaacgccagcctcgcacccccaagggcaaagctcagccactcgaggaccttgcaggcctgaaagagctttttcagacgcccatttgcaccgataagccaaccacccatgagaagacaaccaagatcgcttgtaggagccctcagccagatccagtcgggactcctaccatcttcaaaccacagtccaagcgatcccttagaaaagcagacgtcgaggaggagagtctcgccctcaggaaaagaacaccctccgtcggcaaggccatggatacccccaagcccgctggaggtgatgagaaagatatgaaagcttttatgggaactccagtgcagaaacttgatctccctggaaacctccccggcagcaagagatggccacagacccccaaagagaaggcccaggcactggaagacctggctggcttcaaggaattgttccagactcccgggacagataagcctaccactgatgagaagacaacaaagatagcctgtaagtcaccccagcccgacccagttgacaccccagctagcaccaagcagagacctaagaggaatttgaggaaggctgacgtggaagaagagttccttgcactcagaaaacgcactccctccgcaggtaaagccatggatacaccaaaaccggccgtcagcgacgagaagaacattaacaccttcgtggagaccccagttcagaagctggatctgctcggtaacctccccggctccaaacgccagccccagacgccaaaggagaaggcagaagctcttgaagacctcgtggggtttaaagagctgttccagacccccggtcatacagaggaatcaatgaccgacgataagattaccgaagtgagttgtaagtccccacagcctgaatcatttaagacttcaagatcttccaagcagcggctgaagattcccctagtgaaggtggacatgaaagaggaaccgttggctgtgtctaagctgaccaggacaagcggagaaacaactcagacccacacagagcccaccggcgatagtaaatcaatcaaagcattcaaggagtcaccaaagcagatcctcgaccccgctgccagcgtgacagggtccaggcggcagctacggacaagaaaagaaaaagcccgcgctctcgaggatcttgtagacttcaaggaactattttccgcccctggacatacagaggaatcgatgactatcgataagaacacgaagataccctgcaagagcccgccacctgaattaactgatactgctacaagtaccaagcgttgtcccaaaacccggcccaggaaggaagtgaaggaagaactgagcgccgttgagcgcctcacccagacttcagggcagagcactcatacacacaaagaacctgcaagcggagatgagggaatcaaagtgctcaaacagcgtgccaagaagaagccgaatcccgtggaggaggagcctagtaggcgacgaccaagagctcctaaagagaaagcgcaacctctggaagaccttgctggattcaccgagctgtcagagactagtggacacacccaggagtctctcaccgccggtaaggcaacaaagattccctgcgaaagcccaccactggaagttgtcgacaccactgccagcaccaaaagacaccttaggacccgggtacagaaggtccaagtgaaggaagagccgtccgcagtgaagttcacccagacaagcggtgagaccacggacgcagacaaagagcctgcgggggaggacaaagggatcaaggcgttaaaggagtccgctaaacagacccctgcccccgctgcttctgtgaccgggtccaggcgccgaccacgcgccccacgcgagtcagcacaggccatcgaagatctcgccggctttaaggatcccgccgccggacataccgaggaaagtatgaccgacgataaaacaactaagataccatgcaagagctcgccagagcttgaggacacagcgacatcgtcaaagcggcgacctagaaccagggcgcagaaggtggaggtaaaggaagaactgcttgcagttggaaagctcacacaaacttctggcgaaacgacccatacagacaaagagccagtgggcgagggcaagggcaccaaagcctttaaacagcccgcaaagaggaaactagacgcggaggacgtgatcggttctcggagacagcctagggccccgaaggagaaagcccagcctctggaggacctagcatccttccaagaactttcccaaacaccagggcacacggaagaattggctaacggtgccgctgatagctttacaagcgcaccgaaacagacaccagacagtggcaagccgctgaaaatttcgcgccgcgtgttacgggcacctaaggttgaaccggttggagacgtggtgtccactagggatcctgttaaatcccagagtaagtctaacaccagtcttccacccctgccatttaaaagagggggcgggaaggacggcagcgtgactggaaccaagcgcttgagatgcatgcctgcacccgaggagatcgttgaggagctcccagccagcaagaaacaacgggtggcgccaagagccagaggcaaatccagcgaacccgtcgtcattatgaagcgttctctgaggaccagcgcgaaacggattgaaccagctgaggaactaaacagcaatgatatgaaaaccaataaggaggaacacaaactgcaggattcagtgcccgaaaataagggaatcagcctgcgttccaggagacagaataagactgaagccgagcagcagattacagaagtcttcgttctcgccgagagaattgagatcaatcggaacgagaagaagccaatgaagaccagcccagagatggacatccaaaatcctgacgatggagcgagaaagccaataccgagagataaagtgacagaaaataagcggtgcctgcgtagcgccaggcagaacgagagtagccaaccgaaagttgctgaagaatcaggtggacagaaatccgctaaggtgctgatgcagaaccagaaaggtaaaggcgaagccggtaattctgattcaatgtgcctgcggtctagaaaaaccaaaagccagcccgcggccagcaccctcgaatcaaagagtgtccagcgggtcactaggtccgttaaacggtgtgccgagaatccaaaaaaggcggaagacaatgtctgtgtcaaaaagattagaacaaggagccatcgcgactctgaggatatttag

SEQ ID NO: 128161 - DNA, 9768 bp, Artificial Sequence
  derived and/or modified sequence
atgtggccaactaggagactggtcactatcaagcgatcaggggtcgatgggccccatttcccgctgtctctgtctacgtgtctcttcgggagaggcatcgagtgcgatatccgtatccaattgccagttgtaagcaagcagcactgcaaaatcgagattcatgagcaagaggccatactgcacaatttttcgagtacgaaccctactcaggttaatggatctgtcattgacgaacctgtgaggctgaaacacggagacgtgataaccatcattgatagatcttttaggtacgaaaacgagagtcttcagaatggcaggaaaagtaccgagtttccgcggaagattcgggagcaggagccggcccgccgggtcagtaggtccagtttttcatctgacccagatgaaaaagcgcaggactctaaagcctactcaaagattactgagggtaaggtgtcaggtaacccgcaagtgcacatcaagaatgttaaggaggattccaccgcagacgactcgaaagattcagtggcccaggggactaccaacgtacatagcagtgagcacgcaggacgaaatggtcggaacgccgccgatccgatttcaggcgattttaaggaaatttcttcagtcaagcttgtgtccaggtacggcgagttgaaatctgtccccacgacgcagtgtctagacaatagtaagaagaacgagtctccattttggaaactgtacgagtctgtgaagaaggaactggacgttaagtcccagaaggaaaatgtactgcagtattgccggaaatccggactccagactgactatgccaccgaaaaagagtccgccgacggtttacaaggggagacccaactgctcgtcagtagaaagtcaagaccaaagtccggaggcagcggccacgctgttgccgagcctgcctctccagaacaggaattggatcaaaataagggtaagggccgcgatgtggagtcagtccagacgccctctaaagcagtgggggctagcttccctctgtacgagcccgccaagatgaagactcctgttcagtatagccagcaacagaatagcccacaaaaacataaaaacaaggatctgtacacaacaggccggcgcgagtccgtgaacttgggaaagtcagaggggtttaaggctggcgataaaactctaaccccaaggaagctgtccacgcgaaatcgcactcctgctaaggttgaggatgccgcagactcggccacgaagccggaaaacctgtcctccaaaacacgcggtagtattcctacagatgtggaggtgcttcctacagaaaccgaaatacacaacgaaccattccttacactatggctcacacaggttgaacggaagatccagaaggactccctgtcaaagcccgagaaactgggaacaacagctggccagatgtgcagcggactgcctgggttgtcttccgtcgatattaacaactttggggacagcattaatgaaagtgagggtatcccactaaaacgccgtagggtttctttcggcggccatctacggcctgaactgtttgacgagaatcttccacccaataccccactcaagaggggggaagcgccgacaaaaaggaagagcctggttatgcacacaccgccagtactgaaaaaaattattaaggaacagccccaacccagcggcaagcaggagtcaggatccgaaatccacgtagaggtaaaagcccagtccctcgtcatcagcccacctgcgcccagcccccggaagacacctgttgccagcgatcaaaggcggagaagctgcaagactgccccagcttcgtcctctaagagtcaaaccgaagtccctaaacggggcggcgaaagggttgcaacatgtttgcagagggtctcaatttcgcggtctcagcatgacattcttcagatgatatgctcaaaaagaaggagcggagcatctgaagccaacctgatcgtcgctaaaagctgggctgacgttgtcaagctaggtgcaaagcaaactcagacgaaggtcataaagcatggcccacaacgcagtatgaataaacgacagcgaaggcccgccactccaaagaaaccggttggagaggtccactcacagttctctaccggacacgctaattcgccgtgtacaatcatcattggaaaggcccatacggagaaagttcacgttcccgccagaccctaccgggttctgaacaatttcatttcaaatcaaaaaatggactttaaggaggatctgagcggcatcgccgagatgtttaagacacctgtaaaggagcagccccagctcacttctacttgccacatagcgattagcaattctgaaaatttgcttggcaagcagttccagggaactgactctggcgaagagccccttctgcccacttctgaatcattcggggggaacgtgttcttcagtgctcagaacgccgccaagcagccaagtgacaaatgcagcgcatcacctcccctgagacggcagtgtatccgcgaaaatggcaacgtggccaagactcccagaaacacatacaagatgacctcactggagactaaaacaagcgataccgagacagagcctagcaagacagtcagcaccgctaatcgcagtgggcgttctaccgaatttagaaatatccagaaactccctgtggaatctaagtccgaagagaccaacacagaaatcgtcgagtgtatcctgaaacgtggccaaaaagccactctgctgcagcagcgacgcgagggagaaatgaaggagatcgaaagaccttttgagacttataaagagaacattgaactaaaagagaatgacgaaaagatgaaggctatgaagagatcaagaacttgggggcagaaatgcgccccaatgtccgacctcaccgatctaaagagccttccagataccgagctgatgaaggacacagcccgggggcagaatttgctgcagacccaggatcatgctaaggcacctaaaagcgagaaggggaaaattaccaaaatgccctgtcagtccctgcagcccgaacccatcaatactcccacacacaccaaacagcagttaaaggccagcctaggcaaggtcggcgtgaaagaggagctgcttgcagtcggcaagttcacgagaacttccggagaaaccactcacacccaccgtgaacccgccggtgacggaaaatctattcgcacttttaaggagagtccaaaacagattttagatcctgccgccagggtcactggtatgaaaaaatggccgcgtaccccgaaggaggaggcccagagcttggaagatctcgccgggttcaaggaactatttcagacaccggggccgagcgaggagtccatgactgacgaaaagacaactaaaatcgcttgcaaatctcctccccccgagtctgtcgatacacccacgtctacaaagcagtggcctaagcggtctctcagaaaggctgacgttgaggaagagttcctggctttacgcaagttgacaccttctgccggaaaggccatgctgactcctaagcccgccggcggagatgaaaaagatattaaagcattcatggggactcccgtccagaaactggaccttgccggaacactgcctggttcaaagcggcaacttcagactcctaaagaaaaggctcaggctctggaagatctggcaggatttaaggagctgtttcagactcctgggcatacggaggagctggtggcggctggaaaaactactaaaataccatgtgacagtccacagtccgatcccgtggacactcccacctctactaaacagcgccccaaaagaagcatacggaaggcagacgtggagggcgagctcttggcatgcaggaacctgatgccatctgccgggaaggctatgcatacacccaaaccctcggttggagaggaaaaggacatcattattttcgtaggtaccccggtgcagaagttagacctgaccgaaaatttgacagggtccaagcgaagacctcaaactcccaaggaggaggcgcaagctttggaggatctgaccgggtttaaagaattgttccagacgccgggtcatacggaggaggccgtggctgccggaaaaaccactaagatgccttgcgagtctagtccgcccgagtcagctgatacacccaccagtaccagaagacaaccaaaaacacctttggagaagagagatgtgcagaaggaattgagcgctctcaagaagctgacacaaactagtggagaaacaacacatactgacaaggtacccggtggggaagacaagtccattaatgcattccgcgagaccgcaaagcaaaaactggacccagcagcttcagtgacagggtctaaacgccaccccaagactaaggaaaaagcacagcccctggaggacctggccggcctgaaagagctgttccagacacctgtgtgcacggacaaaccaacaactcacgagaagaccacgaagatcgcatgtcgctcccaaccagatccagtcgacactccaacgtcttccaagcctcagtcaaagcggtctctgcgaaaggtcgatgtcgaggaggaatttttcgctctgcgcaagagaaccccatctgctggcaaggcaatgcatacacccaaaccagcagttagtggggagaaaaacatctacgcatttatgggtaccccagtccaaaaactggatttgacggagaacctgacaggttctaaacgacgactccaaacaccaaaagagaaagctcaggcgctcgaggacctggccggattcaaggaactattccaaactagaggccatactgaggagtccatgactaacgacaaaaccgcaaaagtggcttgtaagtcttcacagcctgacccagacaaaaatcctgccagtagcaaacgccggttgaagaccagtctaggtaaggtgggcgtgaaggaggaactgcttgcagtaggaaagctcacgcagacaagtggggagaccacacacactcatactgaacccacaggggacggtaagtctatgaaagcatttatggagagtcccaagcagattctggattccgcagcttccctgaccgggtccaagagacagctgaggacgcccaagggaaagagtgaagttcccgaggatctggctgggttcatcgaattgttccagacaccgtctcatacaaaggaatctatgacaaatgagaaaaccaccaaagtctcgtatcgcgccagtcagcctgacttagtcgatactccaacatcctctaaaccccagccaaagaggtcactcagaaaagctgataccgaggaagagttcctggcttttaggaagcagactcctagtgccggcaaagccatgcatacgcctaaacctgccgtgggcgaggagaaagacattaacactttcctcggcacaccggtgcagaaattggaccagccaggcaacttgcccggaagcaaccgacgcctccagactagaaaggagaaagcccaagccctggaagagttgaccggattccgggagttatttcagaccccttgcacagataaccccacgactgatgaaaagacaaccaaaaagatactgtgcaaatcaccccagagcgatccagccgacacccccactaacactaagcagcgcccaaagcggtctttgaagaaggctgacgtggaggaagaattcttggcatttcgcaagttgactccatccgctggcaaggcaatgcataccccaaaagccgccgtgggagaagaaaaggatatcaataccttcgttggaaccccagttgagaagctggacctgctcggaaatctgccaggctcaaaaaggaggccacagacacccaaggagaaagctaaagcccttgaagacctcgcaggtttcaaagaattgtttcagaccccaggtcacactgaagagagtatgaccgatgacaagattacagaagtgtcctgcaagtcgcctcagcccgaccctgtgaagacccccaccagttcgaagcagcgactgaaaatttctctagggaaagttggagtcaaagaggaagtgttgcccgtcggaaagctgactcagactagcggtaagaccacccagacacacagggagacagcaggagacggtaaatctatcaaggccttcaaggagtctgctaagcagatgctcgatcctgctaactatggtacgggaatggagcgctggccccgcactccaaaggaggaggctcaaagtctggaggatctcgcaggctttaaggagctcttccagacccccgatcacactgaagaatctaccacggacgacaagaccaccaagattgcctgtaaatcccctcctccagaatcaatggacactccaacctcaacacggcgccggccgaaaaccccactgggcaaacgggatatagtggaggagctctctgccctcaagcagttgacccagactacccacacggataaagtacctggagacgaggacaagggaataaacgtttttagggaaactgccaaacagaagctcgatccagccgccagtgttaccggatccaagcggcagccaaggacgcccaaagggaaagcccagccactcgaggacctcgcaggccttaaagagctcttccagaccccgatatgtaccgataaacctaccacccatgagaagaccacaaaaattgcgtgccggtcccctcagccagatccagtcggcacccctaccatatttaaaccccagagcaagagatctctccggaaagccgatgtggaggaagaatcactcgcacttcggaaaaggactcctagcgtcggaaaagcaatggacacccccaaacctgctggcggagatgaaaaggacatgaaggccttcatggggacacccgtgcaaaagctcgatttgcctggtaacctgcccgggtcaaagagatggccccagacccctaaagagaaggcccaggcgctggaagacctggcaggtttcaaagagctctttcaaactccgggaacagataagccaacgactgatgagaagacaacaaaaatcgcctgtaagtctccacagcctgacccagtggatacacctgcttccacaaaacaaaggccaaaacggaatcttcgcaaagcggatgttgaggaggaatttctcgctctgcggaagcggaccccttcagccggtaaggccatggacactcctaagcctgctgtatcagatgagaagaatatcaatacattcgtcgaaacaccagtccaaaaactggacctgttaggaaacctacctggatctaagcgtcaaccacagactccaaaagaaaaggctgaggccctagaagacctcgttggcttcaaggagttgttccagacccccggacacacagaggagagcatgaccgacgataagattacagaggtgtcatgcaagtctccccagcccgaatcctttaaaacatctcggtcatcaaagcagcggttaaagattcctctggtaaaggttgacatgaaggaagaacctctcgccgtgtcaaaactaacccggacctcaggcgaaactacgcaaactcataccgagccaaccggtgactcaaaaagcattaaggccttcaaagagtcccccaagcaaatactggacccagcagcctctgtcacagggtcgaggcggcagctaagaacacggaaagagaaggcccgggccttggaggacttggtggattttaaagaactgttctccgcaccaggtcacacagaggagtctatgacgatagacaagaacaccaaaatcccctgtaaaagtcccccgcctgaattgacggacaccgcaactagtactaaaaggtgcccgaagactcgacctagaaaagaggtaaaggaggagctgtctgccgtcgagcggctgacgcagaccagcggtcaatctactcacactcacaaagagcctgcctcaggcgacgaggggattaaggtgttgaagcaacgggcgaagaagaaaccaaatccggttgaagaagaaccatcccgccggcgacctagggccccgaaggagaaggcccagcccctggaagatctcgccggatttactgaactgagcgagacatccggccatacccaagaatccctaacggccggcaaagccactaaaattccatgtgagtctcctcctctagaagtggtggatacaaccgcgtccaccaaacgccacctgcgcacacgcgtgcagaaggtgcaagttaaggaagagcccagcgccgtgaagtttacgcagacatccggcgagactaccgacgcagacaaagagcctgctggagaggacaaaggaataaaggcactgaaggagtccgccaagcagactccggctccggcagcctcggtaacaggaagccgacgcagaccacgggcccccagggagagcgcccaagctatagaagacctagccggctttaaggatcctgctgccggccacaccgaggagagcatgaccgatgacaaaacgacaaagatcccttgcaagtcctcacctgaactcgaagacactgctaccagttctaaaagacgcccacgtacacgtgctcaaaaggtcgaggtgaaggaggaactgttggccgtggggaagctgacacagacctctggtgagactactcacacggacaaagaaccagtcggggaaggaaagggaaccaaagccttcaagcaaccagccaagcgtaaactggacgctgaagacgtgataggaagcaggcggcagcctcgagctcccaaggaaaaggctcaaccgctggaagatctggcctccttccaggagctatctcagacgcctggacacacagaggagctcgccaacggggctgccgactcatttacatccgcacctaaacagacacctgactccgggaagcctctgaagatctcacggagagtgctgagagccccaaaagtggagccagtcggggacgtggtgtcaactagagatcccgttaagagccagagcaagtctaacacaagcctacctcctttgcctttcaagcggggtggaggcaaagacggcagcgttacgggcactaagcgtttgcggtgtatgcccgcgccagaagaaattgtcgaagaactgcctgccagtaagaagcagcgcgtcgcacccagagcccggggtaagtctagtgaacctgttgtcatcatgaagaggtccctgagaacctctgccaagaggatcgaaccggcagaggagctgaactctaacgatatgaagactaataaggaagaacataagttgcaagattcagtgccagagaacaagggaattagcctacgtagtaggcgacagaacaagacggaggcagagcagcagatcaccgaggtttttgtgctcgctgagagaattgagataaatcgtaacgaaaagaagcccatgaagacaagtcccgaaatggatattcagaatcctgacgatggggcacgcaaacctatccctagggacaaggttactgagaacaaacgttgtcttcgctcagcacgccagaacgaatcctcgcagccaaaagtggcagaagagtccgggggacagaagtccgcgaaagtgctgatgcagaaccaaaaaggcaagggtgaagccggcaacagcgatagtatgtgtctccggagtaggaaaaccaagtcccagccagcggctagtactctggaaagcaaatccgttcagagagtcacccggagcgttaagcgttgtgccgagaatcctaagaaggctgaggacaatgtgtgtgtgaaaaagattaggaccagatcccatagggattcggaagatatctag

SEQ ID NO: 128162 - DNA, 141 bp, Artificial Sequence
  derived and/or modified sequence
atgtggcctaccagaagactggtgaccatcaagcggagcggagtagacggcccgcatttcccccttagtctcagcacatgtctctttggacgacggaaatgtgtgcttcagtgcaccgagtgctccaaaacggctatttag

SEQ ID NO: 128163 - DNA, 9771 bp, Artificial Sequence
  derived and/or modified sequence
atgtggcccacccggcggctggtgaccatcaagaggtctggagtggatggcccccacttccccctgagcctgagcacctgcctgtttggccggggcattgaatgtgacatccgcatccagctgcctgtggtgtccaagcagcactgcaagattgagatccacgagcaggaggccatcctgcacaacttcagcagcaccaaccccacccaggtgaatggatctgtgattgatgagcctgtgcggctgaagcatggagatgtgatcaccatcatcgacaggagcttccgctatgaaaatgaaagcctgcagaatggaaggaagagcacagagttccccaggaagatccgggagcaggagcccgcccggcgggtgagccgcagcagcttcagcagtgaccctgatgagaaggcccaggacagcaaggcctacagcaagatcacagagggcaaggtgtctggcaacccccaggtgcacatcaagaatgtgaaggaggacagcacagcagatgacagcaaggacagcgtggcccagggcaccaccaacgtgcacagcagcgagcacgccggcagaaatggaagaaatgctgctgaccccatcagcggggacttcaaggagatcagctctgtgaagctggtgagccgctatggagagctgaagtctgtgcccaccacccagtgcctggacaacagcaagaagaatgaaagccccttctggaagctgtatgaatctgtgaagaaggagctggatgtgaagagccagaaggaaaatgtgctgcagtactgcaggaagagcggcctgcagacagattatgccacagagaaggagagcgcagatggcctgcagggcgagacccagctgctggtgtccaggaagagccggcccaagagcggcggcagcggccatgctgtggccgagcccgccagccctgagcaggagctggaccagaacaagggcaagggcagagatgtggagagcgtgcagacccccagcaaggctgtgggcgccagcttccccctgtatgagcccgccaagatgaagacccctgtgcagtacagccagcagcagaacagcccccagaagcacaagaacaaggacctgtacaccactggaagaagagagagcgtgaacctgggcaagtctgagggcttcaaggccggggacaagaccctgacccccaggaagctgagcaccaggaacagaacaccagccaaggtggaggatgctgctgacagcgccaccaagccagagaacctgagcagcaagacccggggcagcatccccacagatgtggaggtgctgcccacagaaacagagatccacaatgagcccttcctgaccctgtggctgacccaggtggagaggaagatccagaaggacagcctgagcaagccagagaagctgggcaccacagctggccagatgtgcagcggcctgcccggcctgagctctgtggacatcaacaactttggagacagcatcaatgaaagtgagggcatccccctgaagagaagaagagtgtcctttggaggccacctgcggcctgagctgtttgatgagaacctgccccccaacacccccctgaagagaggagaggcccccaccaagaggaagagcctggtgatgcacaccccacctgtgctgaagaagatcatcaaggagcagccccagcccagcggcaagcaggagagcggcagcgagatccacgtggaggtgaaggcccagagcctggtgatcagccccccagcccccagccccaggaagacccctgtggccagtgaccagaggcggcgcagctgcaagacagccccagccagcagcagcaagagccagacagaggtgcccaagagaggaggcaggaagagcggcaacctgcccagcaagagggtgtccatcagccgcagccagcacgacatcctgcagatgatctgcagcaagagaagaagtggggccagcgaggccaacctgattgtggccaagtcctgggcagatgtggtgaagctgggcgccaagcagacccagaccaaggtgatcaagcacggcccccagaggtccatgaacaagaggcagaggaggcctgccacccccaagaagcctgtgggggaggtgcacagccagttcagcacaggccacgccaacagcccctgcaccatcatcatcggcaaggcccacacagagaaggtgcacgtgcctgcccggccctacagagtgctgaacaacttcatcagcaaccagaagatggacttcaaggaggacctgtctggaattgctgagatgttcaagacccctgtgaaggagcagccccagctgaccagcacctgccacatcgccatcagcaacagcgagaacctgctgggcaagcagttccagggcacagattctggagaggagcccctgctgcccaccagcgagagctttggaggaaatgtgttcttcagcgcccagaatgctgccaagcagcccagcgacaagtgcagcgccagcccccccctgcggcggcagtgcatcagagaaaatggaaatgtggccaagacccccaggaacacctacaagatgaccagcctggagaccaagaccagtgacacagaaacagagcccagcaagacagtgtccacagccaacagaagtggccgcagcacagagttcaggaacatccagaagctgcctgtggagagcaagtctgaggagaccaacacagagatcgtggagtgcatcctgaagaggggccagaaggccaccctgctgcagcagaggcgggagggggagatgaaggagattgagcggccctttgagacctacaaggagaacatcgagctgaaggaaaatgatgagaagatgaaggccatgaagaggagcaggacctggggccagaagtgtgcccccatgtctgacctgacagacctgaagagcctgcctgacacagagctgatgaaggacacagcccggggccagaacctgctgcagacccaggaccacgccaaggcccccaagtctgagaagggcaagatcaccaagatgccctgccagagcctgcagcctgagcccatcaacacccccacccacaccaagcagcagctgaaggccagcctgggcaaggtgggcgtgaaggaggagctgctggccgtgggcaagttcaccaggaccagcggggagaccacccacacccaccgggagcctgctggagatggcaagagcatccgcaccttcaaggagagccccaagcagatcctggaccctgctgcccgggtgacaggcatgaagaagtggcccaggacccccaaggaggaggcccagagcctggaggacctggccggcttcaaggagctgttccagaccccaggccccagcgaggagagcatgacagatgagaagaccaccaagatcgcctgcaagagccccccacctgagagcgtggacacccccaccagcaccaagcagtggcccaagaggagcctgaggaaggcagatgtggaggaggagttcctggccctgaggaagctgaccccatctgctgggaaggccatgctgacccccaagccagctggaggagatgagaaggacatcaaggccttcatgggcacccctgtgcagaagctggacctggccggcaccctgcccggcagcaagaggcagctgcagacccccaaggagaaggcccaggccctggaggacctggccggcttcaaggagctgttccagaccccaggccacacagaggagctggtggccgccggcaagaccaccaagatcccctgtgacagcccccagagcgaccctgtggacacccccaccagcaccaagcagaggcccaagaggagcatcaggaaggcagatgtggagggggagctgctggcctgcaggaacctgatgcccagcgctgggaaggccatgcacacccccaagcccagcgtgggggaggagaaggacatcatcatctttgtgggcacccctgtgcagaagctggacctgacagagaacctgaccggcagcaagagaagaccccagacccccaaggaggaggcccaggccctggaggacctgaccggcttcaaggagctgttccagaccccaggccacacagaggaggccgtggccgccggcaagaccaccaagatgccctgtgagagcagccccccagagagcgctgacacccccaccagcacccggcggcagcccaagacccccctggagaagagagatgtgcagaaggagctgagcgccctgaagaagctgacccagaccagcggggagaccacccacacagacaaggtgcctggaggagaggacaagagcatcaatgccttccgggagacagccaagcagaagctggaccctgctgcctctgtgacaggcagcaagaggcaccccaagaccaaggagaaggcccagcccctggaggacctggccggcctgaaggagctgttccagacccctgtgtgcacagacaagcccaccacccatgagaagaccaccaagatcgcctgccgcagccagcctgaccctgtggacacccccaccagcagcaagccccagagcaagaggagcctgaggaaggtggatgtggaggaggagttctttgccctgaggaagaggaccccatctgctgggaaggccatgcacacccccaagccagctgtgtctggagagaagaacatctatgccttcatgggcacccctgtgcagaagctggacctgacagagaacctgaccggcagcaagaggcggctgcagacccccaaggagaaggcccaggccctggaggacctggccggcttcaaggagctgttccagacccggggccacacagaggagagcatgaccaatgacaagacagccaaggtggcctgcaagagcagccagcctgaccctgacaagaacccagccagcagcaagaggcggctgaagaccagcctgggcaaggtgggcgtgaaggaggagctgctggccgtgggcaagctgacccagaccagcggggagaccacccacacccacacagagcccactggagatggcaagtccatgaaggccttcatggagagccccaagcagatcctggacagcgctgccagcctgaccggcagcaagaggcagctgcggacccccaagggcaagtctgaggtgcctgaggacctggccggcttcatcgagctgttccagacccccagccacaccaaggagagcatgaccaatgagaagaccaccaaggtgtcctaccgggccagccagcctgacctggtggacacccccaccagcagcaagccccagcccaagaggagcctgaggaaggctgacacagaggaggagttcctggccttcaggaagcagaccccatctgctgggaaggccatgcacacccccaagccagctgtgggggaggagaaggacatcaacaccttcctgggcacccctgtgcagaagctggaccagcccggcaacctgcccggcagcaacagaaggctgcagaccaggaaggagaaggcccaggccctggaggagctgaccggcttccgggagctgttccagaccccctgcacagacaaccccaccacagatgagaagaccaccaagaagatcctgtgcaagagcccccagagcgaccctgctgacacccccaccaacaccaagcagaggcccaagaggagcctgaagaaggcagatgtggaggaggagttcctggccttcaggaagctgaccccatctgctgggaaggccatgcacacccccaaggctgctgtgggggaggagaaggacatcaacacctttgtgggcacccctgtggagaagctggacctgctgggcaacctgcccggcagcaagagaagaccccagacccccaaggagaaggccaaggccctggaggacctggccggcttcaaggagctgttccagaccccaggccacacagaggagagcatgacagatgacaagatcacagaggtgtcctgcaagagcccccagcctgaccctgtgaagacccccaccagcagcaagcagaggctgaagatcagcctgggcaaggtgggcgtgaaggaggaggtgctgcctgtgggcaagctgacccagaccagcggcaagaccacccagacccaccgggagacagctggagatggcaagagcatcaaggccttcaaggagagcgccaagcagatgctggaccctgccaactatggaacaggcatggagcgctggcccaggacccccaaggaggaggcccagagcctggaggacctggccggcttcaaggagctgttccagaccccagaccacacagaggagagcaccacagatgacaagaccaccaagatcgcctgcaagagccccccacctgagagcatggacacccccaccagcaccaggagaagacccaagacccccctgggcaagagggacatcgtggaggagctgagcgccctgaagcagctgacccagaccacccacacagacaaggtgcctggagatgaagataaaggcatcaacgtgttccgggagacagccaagcagaagctggaccctgctgcctctgtgacaggcagcaagaggcagcccaggacccccaagggcaaggcccagcccctggaggacctggccggcctgaaggagctgttccagacccccatctgcacagacaagcccaccacccatgagaagaccaccaagatcgcctgccgcagcccccagcctgaccctgtgggcacccccaccatcttcaagccccagagcaagaggagcctgaggaaggcagatgtggaggaggagagcctggccctgaggaagaggaccccatctgtgggcaaggccatggacacccccaagccagctggaggagatgagaaggacatgaaggccttcatgggcacccctgtgcagaagctggacctgcccggcaacctgcccggcagcaagcgctggccccagacccccaaggagaaggcccaggccctggaggacctggccggcttcaaggagctgttccagaccccaggcacagacaagcccaccacagatgagaagaccaccaagatcgcctgcaagagcccccagcctgaccctgtggacaccccagccagcaccaagcagaggcccaagaggaacctgaggaaggcagatgtggaggaggagttcctggccctgaggaagaggacccccagcgctgggaaggccatggacacccccaagccagctgtgtctgatgagaagaacatcaacacctttgtggagacccctgtgcagaagctggacctgctgggcaacctgcccggcagcaagaggcagccccagacccccaaggagaaggccgaggccctggaggacctggtgggcttcaaggagctgttccagaccccaggccacacagaggagagcatgacagatgacaagatcacagaggtgtcctgcaagagcccccagcctgagagcttcaagaccagccgcagcagcaagcagaggctgaagatccccctggtgaaggtggacatgaaggaggagcccctggccgtgtccaagctgaccaggaccagcggggagaccacccagacccacacagagcccaccggggacagcaagagcatcaaggccttcaaggagagccccaagcagatcctggaccctgctgcctctgtgacaggcagccggcggcagctgcggaccaggaaggagaaggcccgggccctggaggacctggtggacttcaaggagctgttcagcgcccctggccacacagaggagagcatgaccatcgacaagaacaccaagatcccctgcaagagccccccacctgagctgacagacacagccaccagcaccaagcgctgccccaagacccggcccaggaaggaggtgaaggaggagctgtctgctgtggagcggctgacccagaccagcggccagagcacccacacccacaaggagcccgccagcggagatgagggcatcaaggtgctgaagcagagggccaagaagaagcccaaccctgtggaggaggagcccagcagaagaagaccccgggcccccaaggagaaggcccagcccctggaggacctggccggcttcacagagctgtctgagaccagcggccacacccaggagagcctgacagctgggaaggccaccaagatcccctgtgagagcccccccctggaggtggtggacaccacagccagcaccaagaggcacctgcggaccagggtgcagaaggtgcaggtgaaggaggagcccagcgctgtgaagttcacccagaccagcggggagaccacagatgctgacaaggagcctgctggagaagataaaggcatcaaggccctgaaggagagcgccaagcagaccccagccccagctgcctctgtgacaggcagcagaagaagaccccgggccccccgggagagcgcccaggccatcgaggacctggccggcttcaaggaccctgctgctggccacacagaggagagcatgacagatgacaagaccaccaagatcccctgcaagagcagccctgagctggaggacacagccaccagcagcaagaggcggcccaggacccgggcccagaaggtggaggtgaaggaggagctgctggccgtgggcaagctgacccagaccagcggggagaccacccacacagacaaggagcctgtgggggagggcaagggcaccaaggccttcaagcagcctgccaagaggaagctggatgctgaagatgtgattggcagccggcggcagccccgggcccccaaggagaaggcccagcccctggaggacctggccagcttccaggagctgagccagaccccaggccacacagaggagctggccaacggggctgctgacagcttcaccagcgcccccaagcagaccccagacagcggcaagcccctgaagatcagccggcgggtgctgcgggcccccaaggtggagcctgtgggagatgtggtgtccacccgggaccctgtgaagagccagagcaagagcaacaccagcctgccccccctgcccttcaagagaggaggcggcaaggatggctctgtgacaggcaccaagaggctgcgctgcatgcctgcccctgaggagatcgtggaggagctgcctgccagcaagaagcagagggtggccccccgggcccggggcaagagcagcgagcctgtggtgatcatgaagaggagcctgcggaccagcgccaagagaattgagcctgctgaggagctgaacagcaatgacatgaagaccaacaaggaggagcacaagctgcaggacagcgtgcctgaaaataaaggcatcagcctgcggagccggcggcagaacaagacagaagctgagcagcagatcacagaggtgtttgtgctggccgagagaattgagatcaacagaaatgagaagaagcccatgaagaccagccctgagatggacatccagaacccagatgatggagccaggaagcccatcccccgggacaaggtgacagagaacaagcgctgcctgcggagcgcccggcagaatgaaagcagccagcccaaggtggccgaggagagcggcggccagaagagcgccaaggtgctgatgcagaaccagaagggcaaaggagaggccggcaacagcgacagcatgtgcctgcggagcaggaagaccaagagccagcctgctgccagcaccctggagagcaagtctgtgcagagggtgaccaggtctgtgaagagatgtgccgagaaccccaagaaggcagaagataatgtgtgtgtgaagaagatccgcaccaggagccaccgggacagcgaggacatctag

SEQ ID NO: 128164 - DNA, 9768 bp, Artificial Sequence
  derived and/or modified sequence
atgtggcccacccggcggctggtgaccatcaagaggtctggagtggatggcccccacttccccctgagcctgagcacctgcctgtttggccggggcattgaatgtgacatccgcatccagctgcctgtggtgtccaagcagcactgcaagattgagatccacgagcaggaggccatcctgcacaacttcagcagcaccaaccccacccaggtgaatggatctgtgattgatgagcctgtgcggctgaagcatggagatgtgatcaccatcatcgacaggagcttccgctatgaaaatgaaagcctgcagaatggaaggaagagcacagagttccccaggaagatccgggagcaggagcccgcccggcgggtgagccgcagcagcttcagcagtgaccctgatgagaaggcccaggacagcaaggcctacagcaagatcacagagggcaaggtgtctggcaacccccaggtgcacatcaagaatgtgaaggaggacagcacagcagatgacagcaaggacagcgtggcccagggcaccaccaacgtgcacagcagcgagcacgccggcagaaatggaagaaatgctgctgaccccatcagcggggacttcaaggagatcagctctgtgaagctggtgagccgctatggagagctgaagtctgtgcccaccacccagtgcctggacaacagcaagaagaatgaaagccccttctggaagctgtatgaatctgtgaagaaggagctggatgtgaagagccagaaggaaaatgtgctgcagtactgcaggaagagcggcctgcagacagattatgccacagagaaggagagcgcagatggcctgcagggcgagacccagctgctggtgtccaggaagagccggcccaagagcggcggcagcggccatgctgtggccgagcccgccagccctgagcaggagctggaccagaacaagggcaagggcagagatgtggagagcgtgcagacccccagcaaggctgtgggcgccagcttccccctgtatgagcccgccaagatgaagacccctgtgcagtacagccagcagcagaacagcccccagaagcacaagaacaaggacctgtacaccactggaagaagagagagcgtgaacctgggcaagtctgagggcttcaaggccggggacaagaccctgacccccaggaagctgagcaccaggaacagaacaccagccaaggtggaggatgctgctgacagcgccaccaagccagagaacctgagcagcaagacccggggcagcatccccacagatgtggaggtgctgcccacagaaacagagatccacaatgagcccttcctgaccctgtggctgacccaggtggagaggaagatccagaaggacagcctgagcaagccagagaagctgggcaccacagctggccagatgtgcagcggcctgcccggcctgagctctgtggacatcaacaactttggagacagcatcaatgaaagtgagggcatccccctgaagagaagaagagtgtcctttggaggccacctgcggcctgagctgtttgatgagaacctgccccccaacacccccctgaagagaggagaggcccccaccaagaggaagagcctggtgatgcacaccccacctgtgctgaagaagatcatcaaggagcagccccagcccagcggcaagcaggagagcggcagcgagatccacgtggaggtgaaggcccagagcctggtgatcagccccccagcccccagccccaggaagacccctgtggccagtgaccagaggcggcgcagctgcaagacagccccagccagcagcagcaagagccagacagaggtgcccaagagaggaggagagcgggtggccacctgcctgcagagggtgtccatcagccgcagccagcacgacatcctgcagatgatctgcagcaagagaagaagtggggccagcgaggccaacctgattgtggccaagtcctgggcagatgtggtgaagctgggcgccaagcagacccagaccaaggtgatcaagcacggcccccagaggtccatgaacaagaggcagaggaggcctgccacccccaagaagcctgtgggggaggtgcacagccagttcagcactggacatgccaacagcccctgcaccatcatcatcggcaaggcccacacagagaaggtgcacgtgcctgcccggccctacagagtgctgaacaacttcatcagcaaccagaagatggacttcaaggaggacctgagcggcattgctgagatgttcaagacccctgtgaaggagcagccccagctgaccagcacctgccacatcgccatcagcaacagcgagaacctgctgggcaagcagttccagggcacagacagcggggaggagcccctgctgcccaccagcgagagctttggaggaaatgtgttcttcagcgcccagaatgctgccaagcagcccagcgacaagtgcagcgccagcccccccctgcggcggcagtgcatccgggagaatggaaatgtggccaagaccccaagaaacacctacaagatgaccagcctggagaccaagaccagtgacacagaaacagagcccagcaagacagtgtccacagccaacagaagtggccgcagcacagagttcaggaacatccagaagctgcctgtggagagcaagtctgaggagaccaacacagaaattgtggagtgcatcctgaagaggggccagaaggccaccctgctgcagcagaggcgggagggggagatgaaggagattgaaagaccatttgagacctacaaggaaaatattgagctgaaggaaaatgatgagaagatgaaggccatgaagaggagcaggacctggggccagaagtgtgcccccatgtctgacctgacagacctgaagagcctgcctgacacagagctgatgaaggacacagcccggggccagaacctgctgcagacccaggaccacgccaaggcccccaagtctgagaagggcaagatcaccaagatgccctgccagagcctgcagcctgagcccatcaacacccccacccacaccaagcagcagctgaaggccagcctgggcaaggtgggcgtgaaggaggagctgctggccgtgggcaagttcaccaggaccagcggggagaccacccacacccaccgggagcctgctggagatggcaagagcatccgcaccttcaaggagagccccaagcagatcctggaccctgctgcccgggtgacaggcatgaagaagtggcccaggacccccaaggaggaggcccagagcctggaggacctggccggcttcaaggagctgttccagaccccaggccccagcgaggagagcatgacagatgagaagaccaccaagatcgcctgcaagagccccccacctgagagcgtggacacccccaccagcaccaagcagtggcccaagaggagcctgaggaaggcagatgtggaggaggagttcctggccctgaggaagctgacccccagcgctgggaaggccatgctgacccccaagccagctggaggagatgagaaggacatcaaggccttcatgggcacccctgtgcagaagctggacctggccggcaccctgcccggcagcaagaggcagctgcagacccccaaggagaaggcccaggccctggaggacctggccggcttcaaggagctgttccagaccccaggccacacagaggagctggtggccgccggcaagaccaccaagatcccctgtgacagcccccagagcgaccctgtggacacccccaccagcaccaagcagaggcccaagaggagcatcaggaaggcagatgtggagggggagctgctggcctgcaggaacctgatgcccagcgctgggaaggccatgcacacccccaagcccagcgtgggggaggagaaggacatcatcatctttgtgggcacccctgtgcagaagctggacctgacagagaacctgaccggcagcaagaggcggccccagacccccaaggaggaggcccaggccctggaggacctgaccggcttcaaggagctgttccagaccccaggccacacagaggaggccgtggccgccggcaagaccaccaagatgccctgtgagagcagccccccagagagcgctgacacccccaccagcacccggcggcagcccaagacccccctggagaagagagatgtgcagaaggagctgagcgccctgaagaagctgacccagaccagcggggagaccacccacacagacaaggtgcctggaggagaggacaagagcatcaatgccttccgggagacagccaagcagaagctggaccctgctgcctctgtgacaggcagcaagaggcaccccaagaccaaggagaaggcccagcccctggaggacctggccggcctgaaggagctgttccagacccctgtgtgcacagacaagcccaccacccatgagaagaccaccaagatcgcctgccgcagccagcctgaccctgtggacacccccaccagcagcaagccccagagcaagaggagcctgaggaaggtggatgtggaggaggagttctttgccctgaggaagaggacccccagcgctgggaaggccatgcacacccccaagccagctgtgtctggagagaagaacatctatgccttcatgggcacccctgtgcagaagctggacctgacagagaacctgaccggcagcaagaggcggctgcagacccccaaggagaaggcccaggccctggaggacctggccggcttcaaggagctgttccagacccggggccacacagaggagagcatgaccaatgacaagacagccaaggtggcctgcaagagcagccagcctgaccctgacaagaacccagccagcagcaagaggcggctgaagaccagcctgggcaaggtgggcgtgaaggaggagctgctggccgtgggcaagctgacccagaccagcggggagaccacccacacccacacagagcccactggagatggcaagtccatgaaggccttcatggagagccccaagcagatcctggacagcgctgccagcctgaccggcagcaagaggcagctgcggacccccaagggcaagtctgaggtgcctgaggacctggccggcttcatcgagctgttccagacccccagccacaccaaggagagcatgaccaatgagaagaccaccaaggtgtcctaccgggccagccagcctgacctggtggacacccccaccagcagcaagccccagcccaagaggagcctgaggaaggctgacacagaggaggagttcctggccttcaggaagcagacccccagcgctgggaaggccatgcacacccccaagccagctgtgggggaggagaaggacatcaacaccttcctgggcacccctgtgcagaagctggaccagcccggcaacctgcccggcagcaacagaaggctgcagaccaggaaggagaaggcccaggccctggaggagctgaccggcttccgggagctgttccagaccccctgcacagacaaccccaccacagatgagaagaccaccaagaagatcctgtgcaagagcccccagagcgaccctgctgacacccccaccaacaccaagcagaggcccaagaggagcctgaagaaggcagatgtggaggaggagttcctggccttcaggaagctgacccccagcgctgggaaggccatgcacacccccaaggctgctgtgggggaggagaaggacatcaacacctttgtgggcacccctgtggagaagctggacctgctgggcaacctgcccggcagcaagaggcggccccagacccccaaggagaaggccaaggccctggaggacctggccggcttcaaggagctgttccagaccccaggccacacagaggagagcatgacagatgacaagatcacagaggtgtcctgcaagagcccccagcctgaccctgtgaagacccccaccagcagcaagcagaggctgaagatcagcctgggcaaggtgggcgtgaaggaggaggtgctgcctgtgggcaagctgacccagaccagcggcaagaccacccagacccaccgggagacagctggagatggcaagagcatcaaggccttcaaggagagcgccaagcagatgctggaccctgccaactacggcaccggcatggagcgctggcccaggacccccaaggaggaggcccagagcctggaggacctggccggcttcaaggagctgttccagaccccagaccacacagaggagagcaccacagatgacaagaccaccaagatcgcctgcaagagccccccacctgagagcatggacacccccaccagcacccggcggcggcccaagacccccctgggcaagagggacatcgtggaggagctgagcgccctgaagcagctgacccagaccacccacacagacaaggtgcctggagatgaggacaagggcatcaacgtgttccgggagacagccaagcagaagctggaccctgctgcctctgtgacaggcagcaagaggcagcccaggacccccaagggcaaggcccagcccctggaggacctggccggcctgaaggagctgttccagacccccatctgcacagacaagcccaccacccatgagaagaccaccaagatcgcctgccgcagcccccagcctgaccctgtgggcacccccaccatcttcaagccccagagcaagaggagcctgaggaaggcagatgtggaggaggagagcctggccctgaggaagaggacccccagcgtgggcaaggccatggacacccccaagccagctggaggagatgagaaggacatgaaggccttcatgggcacccctgtgcagaagctggacctgcccggcaacctgcccggcagcaagcgctggccccagacccccaaggagaaggcccaggccctggaggacctggccggcttcaaggagctgttccagaccccaggcacagacaagcccaccacagatgagaagaccaccaagatcgcctgcaagagcccccagcctgaccctgtggacaccccagccagcaccaagcagaggcccaagaggaacctgaggaaggcagatgtggaggaggagttcctggccctgaggaagaggaccccatctgctgggaaggccatggacacccccaagccagctgtgtctgatgagaagaacatcaacacctttgtggagacccctgtgcagaagctggacctgctgggcaacctgcccggcagcaagaggcagccccagacccccaaggagaaggccgaggccctggaggacctggtgggcttcaaggagctgttccagaccccaggccacacagaggagagcatgacagatgacaagatcacagaggtgtcctgcaagagcccccagcctgagagcttcaagaccagccgcagcagcaagcagaggctgaagatccccctggtgaaggtggacatgaaggaggagcccctggccgtgtccaagctgaccaggaccagcggggagaccacccagacccacacagagcccactggagacagcaagagcatcaaggccttcaaggagagccccaagcagatcctggaccctgctgcctctgtgacaggcagccggcggcagctgcggaccaggaaggagaaggcccgggccctggaggacctggtggacttcaaggagctgttcagcgcccctggccacacagaggagagcatgaccatcgacaagaacaccaagatcccctgcaagagccccccacctgagctgacagacacagccaccagcaccaagcgctgccccaagacccggcccaggaaggaggtgaaggaggagctgtctgctgtggagcggctgacccagaccagcggccagagcacccacacccacaaggagcccgccagcggagatgagggcatcaaggtgctgaagcagagggccaagaagaagcccaaccctgtggaggaggagcccagcagaagaagaccccgggcccccaaggagaaggcccagcccctggaggacctggccggcttcacagagctgtctgagaccagcggccacacccaggagagcctgacagctgggaaggccaccaagatcccctgtgagagcccccccctggaggtggtggacaccacagccagcaccaagaggcacctgcggaccagggtgcagaaggtgcaggtgaaggaggagcccagcgctgtgaagttcacccagaccagcggggagaccacagatgctgacaaggagcctgctggggaggacaagggcatcaaggccctgaaggagagcgccaagcagaccccagccccagctgcctctgtgacaggcagcagaagaagaccccgggccccccgggagagcgcccaggccatcgaggacctggccggcttcaaggaccctgctgctggccacacagaggagagcatgacagatgacaagaccaccaagatcccctgcaagagcagccctgagctggaggacacagccaccagcagcaagagaagacccaggacccgggcccagaaggtggaggtgaaggaggagctgctggccgtgggcaagctgacccagaccagcggggagaccacccacacagacaaggagcctgtgggggagggcaagggcaccaaggccttcaagcagcctgccaagaggaagctggatgctgaagatgtgattggcagccggcggcagccccgggcccccaaggagaaggcccagcccctggaggacctggccagcttccaggagctgagccagaccccaggccacacagaggagctggccaatggagctgctgacagcttcaccagcgcccccaagcagaccccagattctgggaagcccctgaagatcagcagaagagtgctgcgggcccccaaggtggagcctgtgggagatgtggtgtccacccgggaccctgtgaagagccagagcaagagcaacaccagcctgccccccctgcccttcaagaggggcggcggcaaggatggctctgtgacaggcaccaagaggctgcgctgcatgcctgcccctgaggagatcgtggaggagctgcctgccagcaagaagcagagggtggccccccgggcccggggcaagagcagcgagcctgtggtgatcatgaagaggagcctgcggaccagcgccaagagaattgagcctgctgaggagctgaacagcaatgacatgaagaccaacaaggaggagcacaagctgcaggacagcgtgcctgagaacaagggcatcagcctgcggagccggcggcagaacaagacagaggccgagcagcagatcacagaggtgtttgtgctggccgagcgcatcgagatcaacagaaatgagaagaagcccatgaagaccagccctgagatggacatccagaacccagatgatggagccaggaagcccatcccccgggacaaggtgacagagaacaagcgctgcctgcggagcgcccggcagaatgaaagcagccagcccaaggtggccgaggagagcggcggccagaagagcgccaaggtgctgatgcagaaccagaagggcaagggggaggccggcaacagcgacagcatgtgcctgcggagcaggaagaccaagagccagcctgctgccagcaccctggagagcaagtctgtgcagagggtgaccaggtctgtgaagagatgtgccgagaaccccaagaaggccgaggacaacgtgtgtgtgaagaagatccgcaccaggagccaccgggacagcgaggacatctag

SEQ ID NO: 128165 - DNA, 141 bp, Artificial Sequence
  derived and/or modified sequence
atgtggcccacccggcggctggtgaccatcaagaggtctggagtggatggcccccacttccccctgagcctgagcacctgcctgtttggaagaagaaaatgtgtgctgcagtgcacagagtgcagcaagacagccatctag

SEQ ID NO: 128166 - DNA, 9771 bp, Artificial Sequence
  derived and/or modified sequence
atgtggcccacccggcggctggtgaccatcaagcggagcggcgtggatgggccacatttccccctgtctctgagtacatgtttgtttggccggggcatcgagtgcgatattaggattcagttaccagtggtgtccaagcagcactgcaagattgaaattcatgagcaggaggccatattgcataatttctcgagtacaaatcctacacaggtgaatggaagcgtaatcgacgagcccgtaaggctcaaacacggtgacgtgattactataatcgacaggtcatttcgatatgagaatgagtccctgcagaacggacggaagtcaaccgagttccccaggaaaatccgggagcaggagccggcccgtcgggtgagcagatcttccttttcatctgacccagatgagaaggcgcaggactctaaggcctactccaagatcaccgagggcaaagtttcaggcaaccctcaggtgcacatcaaaaatgtaaaggaggattccacagcggatgacagcaaagattcagtcgcccaaggcacaacaaacgtccatagctccgaacacgccggccggaacggcaggaatgccgccgatccgatcagcggagattttaaggagatttcatccgttaagttagtgtccaggtacggcgagctcaagagtgtcccaactacccaatgcctggataatagtaagaagaacgaatcacctttttggaagctttacgagtccgttaagaaagaattggatgttaagagtcaaaaagaaaacgtgcttcagtactgtaggaagtccggcctgcagaccgattatgcaaccgaaaaggaatcggccgacggcttacagggagaaacacaattgctggttagtagaaaaagtaggcctaaatcaggagggagcggacacgccgtggcggagcccgcatcacccgaacaagagctcgatcagaacaaggggaagggcagggacgtggaatctgtccagaccccctcaaaggccgtaggcgcatcgtttccattatacgagcctgctaagatgaagacacccgtgcaatactctcagcagcaaaacagccctcaaaagcataagaataaggatttgtatactacaggtcgccgtgagagtgtgaatcttggaaagagcgagggctttaaggctggagacaagaccttgaccccccggaaactcagcacgcgcaacagaactcctgcaaaagtagaagatgccgccgactctgctaccaaacccgaaaatctttcgtctaaaacacgcggctctattcctaccgatgtggaggtactcccaacagaaacagagatccacaatgaacccttcttaaccctctggctgacgcaggtggagcggaaaatacagaaggatagcttgtccaaacccgagaaattgggtacgactgccggccagatgtgttccgggctccctggactgagctccgtcgacatcaacaatttcggagactccatcaacgaatccgaaggcatcccattgaaaaggcgacgggtgtcctttggtggtcacctgagacccgagttgtttgacgagaatctgccacccaacactccactgaagcgaggtgaggctccaaccaagaggaagtccttagtcatgcacacaccccccgtcttaaaaaagatcatcaaagaacagccacagcccagcggaaaacaagaaagcggaagcgaaatccacgtcgaggtcaaagctcagtccttagtcatatcaccccccgcgccctcaccgaggaagactcctgtggcgtccgaccagcgcaggagaagctgcaaaacagcaccagcatctagctctaagagccagaccgaagtccccaaacgcggggggaggaaatccggaaacctgcctagtaagcgcgtgagtatcagtcggtcacagcatgatatcctgcagatgatctgctctaagagacgcagtggtgcaagcgaagccaacttaatcgtggccaagagctgggctgatgtggtgaagctgggcgcaaaacagacccagacaaaggtaatcaagcatgggcctcagagatcgatgaacaaacgtcaacgccggcccgctacccccaagaaacccgtaggcgaagtgcactctcagttttccacagggcatgctaatagtccgtgcacaatcattatcggcaaggctcacacggagaaagtgcacgtccctgcacgaccgtatcgggttcttaataatttcatttccaatcagaagatggatttcaaggaggatctgtctggaatcgccgaaatgttcaagactcctgtgaaagagcagccacaactcaccagcacctgccacattgctatttctaattccgagaatctcttggggaagcaattccaaggtacggattccggcgaggagccactgctgcccacctctgaaagctttggcggcaacgttttttttagcgcgcagaacgccgcgaagcagcccagtgataaatgcagcgcaagccctccactaagaaggcaatgtataagggagaacgggaatgtggcgaagactccacggaacacgtataagatgacaagccttgaaaccaaaacaagcgacaccgagacggaaccgtccaagactgtcagcaccgccaatagatcaggaagatctacagagtttcgcaatatccaaaagctcccagtcgagtctaaatctgaggaaacaaacacagagatcgtggaatgcatcctcaagcgcggacagaaggccaccttgctgcagcagcgtcgcgaaggcgagatgaaagaaatcgagcgcccattcgagacttataaggaaaacattgaactcaaggagaatgatgaaaagatgaaggcaatgaagagatcaagaacctggggtcagaaatgtgcccctatgagcgatctcaccgacctgaagagcctgccagacaccgagctcatgaaggatacggctcgcgggcagaatcttctgcagacacaggatcacgcaaaggcacctaagtctgagaagggaaagatcactaaaatgccttgtcaaagtttacagcctgagcccatcaacacgcctacccataccaaacaacagctcaaggcaagtcttgggaaagtgggggtgaaagaggagttactggctgttggtaagtttacaaggacgtcgggcgagaccacccatacccatcgtgagcccgcgggagatggtaaatctattcgtaccttcaaggaatctccaaagcaaatacttgatcccgcagctcgagtgacaggaatgaagaaatggcccaggaccccaaaagaggaggcccagtctttagaagacttggcaggttttaaggagctcttccaaacgcccggaccctccgaggaatctatgaccgacgagaagaccactaagattgcttgcaagtctcccccccctgaatccgtcgacactccaacatcaacaaaacaatggcccaaaaggagtcttcggaaagcggacgtggaggaggagttcctggcactaagaaagctgacgccatccgctggaaaggctatgttgacccctaaaccagccggaggggacgaaaaggacataaaagccttcatggggactcccgtgcagaagctggatctagcagggacactgcccggaagtaagcggcagttgcagacacccaaggaaaaagcgcaggcactggaagacctcgctggctttaaggagttatttcagacacccggccacaccgaagaactcgtcgcggccggaaagaccacgaagatcccttgtgattccccccagtcagatcccgttgacacccccactagtactaagcaacggcccaaacgtagtatccgaaaagccgatgtggaaggcgaactgttggcctgcaggaacctgatgccctctgcaggaaaagctatgcacacccctaaaccctcagtgggggaggagaaggacataatcatctttgtgggtacacctgtacagaagcttgaccttactgagaatctgactggtagtaagcgccggccgcagactcccaaggaggaagcacaggccttagaagatctgacaggatttaaagagctgttccagacacctggacatactgaagaggcagtcgcggccgggaaaacgaccaagatgccctgtgagagtagtcctccagaatcagccgacacacctaccagtaccagaagacagccaaagacccccctggaaaagcgcgacgttcagaaagagctgtctgctttgaagaagctcacccagacctcaggcgaaacgactcacactgacaaggtgccggggggtgaggacaaatccattaatgcattcagagagaccgcaaaacagaagttagaccctgccgcctctgtcactggaagtaagagacaccctaagaccaaagagaaagcccagccattggaggacctggccggcctcaaagagctcttccaaacgcctgtctgcaccgataaacctaccactcatgagaagacaacaaagattgcatgccgttcccaaccggaccctgtggacactcccaccagtagcaagccccaaagcaaaagatccttgagaaaagtggacgtggaggaagagttcttcgctctgcgaaagcgtactcccagcgctgggaaagccatgcacactcctaagcccgcagtctctggggagaaaaatatctacgcattcatgggtacaccagtacagaagctggatctcactgagaatctcacagggagtaaaagacgcttgcagactcccaaagagaaggcccaagccctcgaagatctcgccggcttcaaggaactgttccaaacccggggacataccgaagaaagcatgaccaatgacaaaaccgccaaagtcgcctgtaaaagcagccagcctgatcctgacaagaatccggcttcctccaaaagaagactcaagacatcccttggaaaggtcggggtgaaggaggaactgcttgccgttggcaaacttacccagacctccggcgagacaacccacacacacactgaacccaccggagacggcaaatcaatgaaggcgttcatggagtcaccaaagcagatattagattccgctgcaagcctcacaggaagcaaacggcagctgaggacccctaaagggaaaagtgaggttcctgaggatctggccggcttcattgagcttttccaaaccccgtcacacaccaaagaaagtatgactaacgaaaagacaactaaagttagctacagggcttcccagccggacctggtggatacaccaactagcagtaaacctcagcctaagcggtctctgcgcaaggcagatactgaagaggagttcctagccttccgaaagcaaacaccctctgctggcaaggccatgcacactcccaaacctgcagtcggggaagagaaggatatcaacacatttcttggaacaccagtgcaaaagctggaccagccagggaatctgccagggtccaatcgccgcttgcagacccgtaaagagaaggctcaggctttggaagagctaacagggttcagagagttgtttcagaccccttgcaccgacaaccccacaacagatgagaaaacaaccaagaagatcctgtgcaaatccccccaatcagaccccgctgacactcccaccaacaccaaacagcggccaaagcgttccctgaagaaagccgatgtggaggaagagttcctcgcattcaggaagttaactccctccgcaggtaaagctatgcatacccccaaggccgcagtgggtgaagaaaaggacatcaatacatttgttggtacacccgttgaaaagcttgatctgttggggaatctccctgggagcaaacggcggccccaaactcctaaggaaaaggctaaggccctggaggacctcgccggcttcaaagaactctttcagaccccaggccatactgaagaatcaatgacggacgacaaaatcaccgaggtcagctgcaagtccccccagccagaccccgtgaagacacctacatcatcgaaacaacgacttaaaatatccttgggaaaggtgggcgttaaggaggaagtccttcctgtgggaaagctcactcaaaccagcgggaaaacaactcagacacatagagaaactgccggcgatggcaaaagcattaaagcctttaaggaaagcgcgaagcaaatgttggaccccgcaaattatggtactgggatggagcgctggccccgaactcccaaggaggaggcccagtcactggaagacctggcagggtttaaagagttgttccagacacccgaccacacagaggaaagcaccacagacgataaaactacgaagatcgcctgtaagagcccgcctcctgagtcaatggatacgcccacaagtactcgccgcaggccaaaaactccccttggaaaacgggatatagtcgaggagctctccgctcttaaacagttaacgcagaccacccacactgataaggtgcctggagacgaggacaaaggcatcaatgtttttcgggaaaccgccaaacagaagctggatcccgccgcatctgtgactgggtctaagagacaacctcgtacacccaaaggcaaagcgcagcccttggaagatctggccgggcttaaagagctgttccagacaccaatctgtacggataaacccactactcacgaaaagaccacgaagatcgcgtgtaggtcgccacagcctgaccctgttggcaccccaacaatctttaagccacagtccaagcgctcccttagaaaggctgacgtcgaagaggaatccctggccctaagaaaaaggacaccttccgtgggtaaagctatggacactccaaaacccgctggtggtgacgagaaggacatgaaggcctttatgggaaccccggtgcagaagctggacctgcccggaaatctgcccggaagcaaaaggtggccccagacccccaaggaaaaagcacaagctctggaggatctagcaggatttaaggagttattccagacgcctggtactgacaagcccactaccgatgagaaaaccaccaaaatcgcatgtaagagccctcagcccgacccggtagatactcccgccagcactaaacaacgtcccaaacgaaacttgcggaaggctgacgttgaggaagaatttttggcgctgaggaagcgtacgccctcggcgggcaaggccatggacacccccaagccagcagtgtccgacgagaagaacattaacaccttcgtagaaactccagtgcagaaacttgatctcctgggaaacctcccagggagcaagcggcagccacaaacgcccaaggagaaggctgaagccctggaagatctagtggggttcaaagagttgttccagacacctggccatacagaggaatctatgaccgacgacaagataaccgaagtgtcctgtaagagtccacagcccgagtcatttaagaccagtagatcatcgaagcagcgcctgaagatacctctggtgaaagttgatatgaaggaggaaccactggctgtctcaaagctgacgcgcaccagtggcgagaccacacagacccacaccgagcccactggcgactctaagtccattaaagccttcaaggaatcccctaagcagatacttgatcccgctgccagtgttaccgggagccgaagacagttgcgcactcggaaagagaaggccagagcactggaggacctggtggatttcaaggagctcttctcagccccgggccacaccgaagagagcatgacaattgacaaaaacactaaaatcccctgtaagtctccgccccccgagctgaccgacactgccacaagcaccaaaaggtgtccgaagactagaccccgcaaagaggtcaaggaggagctgagcgctgtcgagagactgacccagaccagcgggcagtccactcacacccataaagagccggcatctggtgacgagggcatcaaggtgctcaagcaaagggcgaagaaaaagccaaatcccgttgaagaagagccgtcgaggcgccgaccaagggctccaaaggaaaaggcccagcccctggaggacctggccggatttactgaactatccgaaacctctggacacactcaggagagtctgacggctgggaaggccaccaagatcccctgcgaaagcccgcccctggaggtcgtggacacaactgcttccactaagcgtcatctgcgaactagggtgcagaaggttcaagtaaaggaggaaccctctgcggtgaagtttactcagacgagtggggagaccacagacgccgacaaggaaccagccggtgaagataaaggcatcaaagctctaaaagaaagcgctaaacagacccccgcaccggcagcctcagttaccggcagtcgacgacgcccacgagctcctcgcgagtccgctcaggccattgaagatctcgccgggttcaaagaccctgctgctggtcacactgaggagtctatgacagacgataaaaccaccaagatcccatgtaaatcttcaccagaactggaggacactgcgaccagcagcaaacgtcggccgagaactagggcgcaaaaagttgaagtgaaagaagagcttctggcggtgggcaagctcacacagaccagcggcgagaccacacacaccgacaaagagccagtcggggaaggtaagggcacaaaggccttcaaacagcccgccaaaaggaagcttgatgccgaagacgtcatcggctccaggagacagccaagagctcccaaagaaaaggctcaacctctggaagatctggcttcttttcaagaactctcacagacaccaggccacactgaagaactggccaacggcgccgctgatagttttacatctgcccctaagcagacacccgactcggggaaaccattgaagatttcccgcagagtgttgcgggcccccaaggtggagcctgtgggagatgtggtgagtacacgggaccccgtgaaatcccaatctaaaagtaacacgagcctccctcccctgcccttcaagcgcggcggtggaaaagacggcagcgtaacagggaccaagcgcctcaggtgcatgccggcccccgaagagatcgtcgaggagctgcctgcgtcaaagaaacagcgggtggccccaagagcccgtggtaagagttccgagccagtggtaataatgaagcgctcactgaggaccagtgctaaaagaatagaaccggccgaagagctgaatagcaacgacatgaaaacgaacaaggaagagcacaagctccaggattcagtaccggaaaacaaaggcatttcgctgcgcagcagacgccagaataaaactgaagccgaacagcaaatcaccgaagtctttgtgctcgctgagagaattgagatcaacaggaacgagaaaaagcctatgaaaaccagccctgagatggacatccaaaatcctgacgacggtgccaggaaacctataccacgagacaaggtaaccgagaataagcgctgtctacgcagcgccaggcagaacgagtcttctcagcctaaagtggccgaggagtcgggcgggcaaaagagtgctaaagtgctgatgcagaaccagaaggggaagggagaggccgggaactccgactccatgtgcctgcgctcacgaaagacaaagagccaacccgccgctagtacactggaatccaagtccgttcagcgggtaactcggagtgttaagcggtgcgcagagaaccctaaaaaagccgaagacaacgtatgcgtgaagaagatccgaaccagatcacaccgtgattctgaggacatctag

SEQ ID NO: 128167 - DNA, 9768 bp, Artificial Sequence
  derived and/or modified sequence
atgtggcccacccggcggctggtgaccatcaagcggagcggcgtggacggccctcatttcccgctgtccctgagcacgtgtctcttcggacgtggaattgagtgtgatattagaatccaactacccgtcgtaagcaaacagcattgcaaaatcgagatccacgaacaagaagcaattctccataatttttcgtccacaaatcccacacaggtcaatggctccgttattgacgagccagtgcgtctgaaacacggcgatgtgataaccattattgaccgcagctttaggtacgaaaatgagtctctgcagaacggccgtaagtccacagaattcccccggaaaatccgagagcaagagcccgccaggcgcgtatctcgttcaagcttttccagcgaccccgatgagaaggcccaagactctaaagcctattccaagattacagaaggcaaggtgagcggtaatcctcaagtgcacatcaaaaacgttaaagaagactccacagctgatgattctaaagactcagtcgctcaaggaacaaccaatgtccacagtagcgagcatgcaggaaggaatggacgcaatgcagctgacccaattagcggagactttaaagagatttcatctgtgaagctcgtttcacgttatggtgagctcaaaagcgtccccacaacgcagtgcctggacaattccaaaaaaaacgagtctccgttctggaaactgtacgaaagcgtgaagaaggagcttgacgtgaaatcacaaaaggagaacgtcctacagtactgtaggaagtctgggctgcaaactgattacgcaacagaaaaagaaagtgccgatgggctgcagggcgagacccagttacttgtgagtagaaaatcccgaccaaagtccggcggctcgggccatgcagtcgctgaacccgcttcacctgagcaggagttggatcagaacaagggtaaaggacgtgatgttgagagtgtgcaaacacctagcaaggctgtcggagcgtcgttccccctttacgagccagccaagatgaagacgccagttcagtattcccagcagcaaaactctccacagaaacacaagaacaaagatttgtacactacagggcgcagggagtccgtgaatctcggcaagagtgaaggattcaaggccggggacaagaccttgacccctcgaaagctgagtacgcgcaaccgtacccctgctaaggtggaggacgcagccgactccgcaacaaaaccggagaacctgagcagcaaaacgaggggcagtataccaactgatgttgaagtattacccacagagacagagattcacaatgagccattccttaccctttggcttacccaggtagagaggaagatacagaaggactcattgagcaagccagaaaaattggggacaactgccgggcagatgtgttccggactcccagggctttcctccgtagacatcaacaattttggcgattctattaatgagagcgaagggattcctctgaaaaggcgccgcgtgagttttggcggacacctccgccccgagcttttcgacgagaatctgccacctaatactccccttaagcgaggtgaggccccgaccaaacggaagagtttagtcatgcacacaccaccagttcttaagaaaatcatcaaagagcaaccgcagccctccggaaaacaggagagcgggtcagagattcatgtggaggtaaaagcccagagtttggtcattagcccccctgcccccagcccaagaaaaaccccagtggctagcgatcagcggcgcagatcctgtaagacagctcctgcatcttcaagtaagtctcagaccgaagttcccaagcgcgggggagaacgggttgccacatgcctgcagcgggtttccattagtcggtcccagcacgacatcctgcagatgatatgtagtaagcgaagatcaggcgccagcgaagccaaccttatcgtagccaaaagttgggctgacgtggtaaagcttggagctaagcagactcagacaaaggttattaaacatgggccgcagcgatctatgaacaaacgacagcggcggccagcaacccccaagaaaccagtgggggaggtacactctcagttttctaccggtcacgccaatagcccctgcaccatcatcatcggcaaggcgcacaccgaaaaagtgcacgttccagcaagaccatacagagttctgaacaacttcatctccaaccagaagatggattttaaagaagacctgtctgggattgctgaaatgttcaagacgcccgtaaaggaacagccccagttaacttctacatgtcatatagcgattagtaacagtgagaatttgctcgggaaacagttccaaggaaccgattccggagaggaacccctcctgcctacatccgagtccttcgggggaaatgtgttcttttcggctcaaaacgctgctaagcagccgagcgataagtgctcagcctctcctccactccgtcggcagtgcatcagggaaaacggcaatgtcgcaaagacgccacgcaatacttacaaaatgacctcgttggagactaaaaccagcgacaccgaaactgagccctcaaagaccgtgtccacagctaataggtctgggcggtctaccgagttcaggaatatacagaagctgcctgttgagagcaagtctgaggaaaccaataccgaaatcgtggaatgcattcttaagagggggcaaaaagctaccttgctccagcagagacgggagggggagatgaaagagattgagcggccatttgaaacatacaaagaaaatatcgaactcaaggagaacgatgaaaagatgaaagccatgaaacgcagcagaacatgggggcagaaatgtgcacctatgtcggatttgacagatctaaagagtctaccagataccgagctgatgaaggataccgcccgtggccaaaacctgctgcaaacgcaggatcacgcgaaggcacctaaatcggagaaaggcaaaatcaccaaaatgccctgtcaatctttacagccagaacccatcaatactccaacacacacaaaacagcaattaaaagcttctttaggcaaggtgggcgttaaggaggagctgctcgccgtaggtaaattcacccgcacgtccggagaaaccacccatacgcacagggagccagcaggcgacgggaagtccatcaggacatttaaggagtccccaaaacagatccttgaccccgcagctagggtgacgggcatgaagaagtggccccgcacccccaaggaggaggcacagtccttagaggatctggctggctttaaggaattgttccagactcctgggccgtcggaggaatctatgacagacgaaaagaccaccaagattgcatgcaaatctccccctccagagtccgtcgacactccaacaagcacgaaacaatggcctaaacgcagtctccggaaggccgatgtggaggaagaatttctggccctacgtaagctcacaccgagcgctggaaaggccatgttgacccccaagcccgccggtggggacgaaaaagatattaaggctttcatgggcaccccagtccagaaactggatctggctggcaccctacccggctctaaacggcaactccaaacgcctaaagagaaggcacaggccctggaagatttggctggtttcaaagagttgtttcagacacccggccatacagaagaacttgttgccgctggaaaaaccacgaagatcccctgcgattcgccccagtccgatccagtggacacccccacgtcaactaagcagcgcccaaagagaagtatccgtaaggctgatgtcgagggcgaattgttggcatgtcgcaatctcatgcccagtgcaggtaaagctatgcacacccctaaaccgagcgtaggcgaggaaaaagatatcattatctttgtgggcacacctgtacagaagctggatcttaccgagaacctaacgggttcaaaacggcggccacagactcccaaggaagaggcccaggccctcgaagacttgacaggcttcaaggagctctttcagacgccaggacacaccgaagaagctgttgctgccggcaaaacgacaaagatgccttgcgagtcttcacctccagagagtgccgatactccaacaagtactcgcaggcagcctaagacgccacttgaaaagcgagacgtccagaaagaattgtcagccttaaaaaaactcacacagacttctggggagacgactcatacggacaaggttcccggaggtgaggataagtccatcaacgcatttagggagaccgcaaaacaaaagcttgatcccgctgcctctgtcactgggagcaagcgacaccccaaaactaaggaaaaagcccagccgctggaggacttagccggtttgaaagaattgtttcaaactccagtgtgcaccgacaaacctacgactcacgagaagacaacgaagattgcctgtagatctcagcctgatcctgtcgacacgccgactagttctaaacctcagtccaaaagatccctgcgcaaagtcgatgtagaggaggaattcttcgcactaagaaagcgcacaccatctgccggcaaggccatgcacactccaaagcctgcggtctccggcgaaaagaacatctacgcatttatggggacacctgtacagaagttagatttgactgagaacctgacggggtctaaacgccgattacagaccccaaaggagaaagctcaggcattagaagatctcgcggggtttaaggagctatttcagacccgcgggcacacagaggaatcaatgaccaacgacaagaccgccaaggtcgcttgtaagagctcacaacctgatccggacaagaatccggcttcaagtaagcgtcggctcaaaactagcttgggcaaagtgggtgttaaggaggagcttcttgcagtggggaagttgacccaaacttcaggagaaactacacatactcacactgagccaacaggggatggcaagtccatgaaagccttcatggaatcaccgaaacagatcctggactcggccgcttcactcactggctcaaaaagacagctccggacccctaagggcaaatcggaagtgccagaggacctcgcaggattcatcgagctgttccagaccccgagccataccaaggaatccatgaccaatgaaaagaccactaaggtgagctaccgggcaagtcagcctgacctggtagatactccgacatcttccaaaccgcagcccaaacgaagcctccggaaggctgatacggaagaagagttcctggctttcaggaaacaaacacctagcgcagggaaagctatgcacacccctaaacccgccgtgggtgaggagaaagatatcaacaccttcctggggactcctgttcagaagctggatcaacctggcaaccttccaggctcaaacaggcgattgcagacccgaaaggagaaagcccaggcgcttgaggagctgacagggtttcgggaattattccaaaccccctgcaccgacaacccaacgacagatgaaaaaactactaaaaaaatcctctgtaagtctccacaatcagacccggccgatacccccacaaatacaaaacagagaccaaaacgctctcttaagaaagccgatgtagaggaggagtttttggcgttccgcaaactcaccccctccgcaggaaaggcaatgcatacaccaaaagcagcggtgggcgaggagaaggacattaacacttttgtaggaactccagttgaaaagctggatctactcggtaatctccctggctctaagagaagaccgcagacaccaaaagaaaaagccaaggccctagaagacctggccggatttaaggagttgttccagacaccgggccacaccgaggagagcatgaccgatgataaaatcacagaagtctcctgcaaatctcctcaacctgatcctgttaaaactccaacctcatccaagcagcggcttaaaatctccttgggtaaggttggtgtaaaggaggaagtgcttcctgttggcaagttgacgcagacgtctggcaaaactactcagacacatagggagaccgctggtgacggcaagagtatcaaagctttcaaagaaagcgcgaaacagatgctcgatcctgctaattatgggacaggcatggaacgctggcccaggactccaaaggaagaggctcagtccttggaggacctggctggtttcaaggagctgttccagacgccagatcacacagaagagagtacaacggacgacaagaccacaaagatcgcttgtaagtccccacccccggaaagcatggataccccaacttctacacgtcgtagacccaagactccactgggcaagcgcgacattgtggaggaattatccgctctgaagcagcttacacaaaccactcacaccgacaaggttccgggggacgaggacaaggggatcaatgtcttccgggaaacagctaaacagaagctggaccctgccgcatccgtcacgggtagcaaacgacaaccgagaactcctaagggtaaggcccaacctctggaggatctggcagggctcaaggagctgttccagactcccatatgcacggacaaacctactacacacgaaaaaaccaccaaaattgcctgccgcagtccgcaacccgacccagtggggacccccactatttttaaaccgcaatctaagaggtctctgcgtaaggccgacgtggaagaggaatctctggcactgaggaaaagaactccaagcgtaggaaaagccatggatacgcctaagccagcaggaggggacgaaaaagacatgaaagcctttatggggacaccggtccagaaattggacttgcctggcaatctgcctggttccaaaagatggccccaaactcccaaggaaaaagcccaggcactcgaagatttagcaggattcaaagaattatttcaaactccagggaccgataaacctactaccgatgagaaaaccaccaagatcgcgtgtaagagtccgcagcctgaccccgtggacacccccgcatcgacaaagcagagacctaaaagaaacctccggaaggcagacgtggaggaggagtttctggctctgcgaaagcggacaccttccgctgggaaggctatggacacacctaagcccgctgtcagcgatgagaagaatatcaatactttcgtcgaaacgcccgtccagaaactggaccttctgggcaacctaccaggctcaaaacgacagccccagacaccgaaggaaaaggccgaggccctggaggatttggttggatttaaagagttgttccagacccctggccacaccgaggaaagcatgacagacgacaagatcaccgaagtatcttgcaaatctccccaacccgaatccttcaaaacctcccgttcctcaaaacaacggctcaagatcccactcgttaaagttgatatgaaggaagaaccgctggccgtatcaaagctaacgcgcacttctggtgagactactcagacccatactgaacctactggcgactctaagagtattaaggcgtttaaggagagcccaaagcaaatcttggatccagcagctagcgtcacaggatctagaagacagctccgcacgagaaaagagaaggcccgcgcgttggaagacctggtggactttaaagagctgttctcagctcccggccacacagaagagagtatgaccatcgacaaaaacaccaaaatcccatgtaagagcccaccccccgagctgaccgacacagctacttctacaaaacggtgcccaaagacaagacctcgcaaagaagtgaaggaggagctgtccgcagtggagagattgactcagacaagtggacaatctacacatacccataaggagccggctagtggagatgaaggcatcaaggtgctcaagcagcgcgcgaagaagaagcctaaccccgtggaggaggaaccctcaagacggcggcccagagcccctaaggagaaagcccagcccctggaagatttagcgggattcacagaactgtctgaaacaagcggacacacacaggagagtctaactgccggaaaggctaccaagataccttgcgaaagcccaccactcgaggtggtggacaccaccgcctcaacaaagcgacaccttcgaactagagttcaaaaagttcaggtaaaggaggagccctctgccgtgaagttcactcagacctccggagaaaccaccgatgcggataaagagccagccggggaggacaaggggatcaaagctctgaaggaatccgcaaaacagaccccagctcctgctgcctctgtgacggggagcagaagaaggccacgggcccccagagagagtgcccaggcaattgaggacttagcagggttcaaggatcctgcggccggccatacagaagagtcaatgactgacgataagacaaccaagatcccatgtaagtcttctccagagctggaagacaccgccacctctagcaaaaggcgaccccggaccagggctcaaaaggtggaagtgaaagaggagttgctggctgtgggcaagctgactcagacgtctggcgaaacaacccacacagataaggaacccgtaggagagggaaagggtacaaaagcctttaagcagcctgccaaacgtaaattagacgccgaagatgtgatcggctctcgacggcagccaagggcccctaaggaaaaggctcagcccctggaagatctagcgtcatttcaagaactgtctcaaacccccggacacacagaggaactcgcgaacggagctgccgactcttttaccagcgcacccaagcagacgcccgacagtggaaagcctctcaaaatctctcggcgcgtgcttcgtgctccaaaggtggaacctgtgggcgacgtagtatctactcgagacccagtcaagtcgcagagtaaatccaacacttcactgccacccttgccctttaagcgtgggggcggcaaagatggctctgttacaggcacaaaacggctgcggtgtatgcccgcacctgaagagatcgtggaagagcttcccgcttctaagaaacagcgggtcgcaccacgagccagagggaagtcatccgagccagtggttatcatgaagaggagcttgcgcaccagtgccaaaagaatcgagcccgcagaagagctgaacagtaacgacatgaaaaccaataaagaggagcacaaactccaggattccgtccccgaaaataaggggatctcactccgttcacgcaggcaaaacaaaacggaagcggagcaacagatcaccgaagttttcgtactcgccgagagaatagagattaatagaaatgagaagaaacctatgaagacctctccagagatggacattcagaatcccgatgacggtgcacgaaaacctattcctcgggacaaggtgaccgaaaataaaagatgtctgaggtccgccagacagaacgagtcctctcagcctaaggtcgccgaggagtccggggggcaaaagtcagccaaggtcctcatgcagaaccagaagggaaagggggaagcgggtaattcagatagtatgtgtcttaggtcacgcaagactaaatcacagcctgctgcaagcacactggaaagcaaaagtgtgcagcgtgtcacacgctctgttaaacgctgcgctgagaatccaaagaaggcagaagacaatgtgtgtgtcaaaaaaatccgaactaggagccacagagacagcgaggacatctag

SEQ ID NO: 128168 - DNA, 141 bp, Artificial Sequence
  derived and/or modified sequence
atgtggcccacccggcggctggtgaccatcaagcggagcggcgtggacggccctcatttccctctgtctctgagtacttgcctgttcggccggcgcaagtgtgtacttcagtgcaccgagtgcagtaaaacagctatctag

SEQ ID NO: 128169 - DNA, 9770 bp, Artificial Sequence
  derived and/or modified sequence
atgtggcctactcggcgactggtgacaattaagagatcaggcgtggacggccctcacttcccactgtcactgtctacctgtctttttggcaggggcattgagtgcgatatcaggattcagcttccagtcgtaagcaaacaacactgcaagatcgaaatccacgaacaggaagccatcctgcacaatttttcatcaaccaacccgacgcaggttaacggctcagttatcgatgagcccgtgaggctaaaacacggggatgtcatcaccataatcgatagaagctttagatacgagaacgagagcctgcagaatggtagaaagagcaccgaatttccccgtaaaatcagggagcaggagcctgcccgacgcgtgtctcggtcttctttcagttctgaccccgatgaaaaagctcaggacagcaaagcctatagcaaaattaccgagggtaaagtatcgggcaatccacaggttcacatcaaaaatgtgaaagaggactcaactgccgacgattctaaagactcagtagcccagggtaccacaaacgtccactcttcagagcatgccggtcgcaatgggagaaatgctgctgatcccatctcaggggacttcaaggaaatatccagcgtgaagctagtctccaggtacggcgaacttaagtcagtgccaacaacccaatgcttggacaatagcaagaagaatgagtctcccttttggaagctgtatgaatctgtcaaaaaggagttggatgtgaagtcccagaaggagaacgtgctgcagtactgccgtaagagtgggctccagaccgattatgccaccgagaaagagtccgcggacggtcttcagggtgaaacacagctcctggtgtccaggaagagcagacccaagtctggaggctctggccacgctgtggcagagcccgctagtcctgaacaagaattagaccagaataagggaaagggtcgtgatgtagaatccgtccaaaccccctcaaaggctgtaggagctagtttcccactctacgagcccgctaagatgaagacaccggttcagtattcccagcagcagaactccccacagaaacataagaacaaagatctctacactaccggaagaagagagagcgtgaacctggggaagtcagaaggattcaaagctggggataagaccctgacccctcgaaagctctcaacccgcaaccgaactcccgcaaaggtggaggacgctgccgactcagccaccaaacctgagaaccttagctcaaagacccggggatcaattccaacggacgtcgaggttctgcctacagaaaccgaaattcacaatgagccgttcctgacactgtggttgacacaggtggagcggaagatacagaaggattcgttatccaaaccagagaagctcgggaccaccgctggccagatgtgttctggtctgccaggcctttcctctgtagacattaacaatttcggtgattctatcaacgagagtgaggggattccgctaaagcgtagacgcgtatcctttgggggacacttacgtccagagctgttcgatgagaacttgcccccaaacacccctctgaaaagaggcgaggctcctaccaagcggaaatcccttgtcatgcacactcccccagttctgaaaaaaatcatcaaagagcagccacagccttccggcaaacaggagtcaggcagcgaaatccacgtggaggtcaaagcccaatcacttgtgatcagccccccagctccatcacctcgaaagacccctgtcgcttccgaccagcggcgtcgatcctgcaaaactgctcctgcatcctcctcgaagtctcaaacagaagtgcccaaaagaggcggaaggaagtctgggaatctgccatccaaacgtgtcagcatatcaaggagccagcacgatatcctgcaaatgatttgttctaaaaggcgttctggcgctagcgaggcaaatctgatcgtagctaagtcttgggccgatgtggtcaaattgggcgcaaagcagactcagactaaagtcattaaacatggtccccagcggtccatgaataaacgccagaggaggccagccacccctaagaagccagtcggagaagtgcacagtcagtttagcacaggccacgccaattccccttgtacgattatcatcggtaaagcccatactgagaaagtccacgtgccagcgaggccgtacagagtcttgaataacttcatctcgaatcaaaaaatggatttcaaggaagacctgtcaggcatcgctgagatgttcaagacacccgtcaaggagcaacctcaactcacctcgacgtgccacatagcaatttccaactccgagaacctcctgggcaaacaatttcagggcactgatagtggcgaggagccactacttccgacctctgaaagctttggcggaaacgtgttcttctctgcccaaaatgccgcaaagcagcccagcgacaaatgctccgcatcacctccactgcggagacaatgcatcagagagaatgggaatgtcgccaagaccccacgtaacacctacaagatgacaagcctagagaccaagacatccgataccgagaccgagccctctaagactgtcagtacggctaaccggtcaggcagatcaacagaattccgaaacattcaaaaactgcccgtcgaatcaaagagtgaggaaaccaatactgagatagtcgaatgcatcttgaagcgaggacagaaagcaacattactgcagcagcggagagaaggggagatgaaagaaatcgaacgcccattcgagacatacaaagagaatatcgagctgaaggaaaatgacgaaaagatgaaagcgatgaaacggtcacgcacgtggggtcagaagtgcgccccaatgtcggaccttaccgatcttaagtctcttcccgatacagagctgatgaaggacactgctagggggcagaacctgctgcagactcaagaccatgccaaagctccaaaatccgagaagggtaaaatcaccaaaatgccctgccagtccctacaaccagagcccattaatactccaacccatactaaacagcaactgaaggcctctcttgggaaagtcggggtaaaagaggagctcctggcagtcggtaaatttacgagaaccagcggtgagaccacacatacgcatcgtgaacccgctggcgacgggaaatccatccggacctttaaggagtcgccaaagcagatattggatcccgcagctagagtgacgggaatgaaaaaatggcccaggacacccaaggaggaagctcaaagcctcgaggacttagcaggttttaaagagttgtttcagactccaggtccaagtgaagaatcaatgaccgacgaaaagaccaccaagatcgcctgcaagagtcccccacccgaatccgtggatactcccaccagcaccaagcagtggcccaagcggagcctacgaaaggccgacgtggaggaagaattcctggccctgcgcaaactcacaccgtctgctgggaaagccatgctgacccctaagccggctgggggagatgaaaaggacattaaggcatttatgggcactccagtacagaaactggatctcgccggaacactaccaggctcgaagcgccagctccagaccccaaaagagaaggcccaggccctggaggatttggccggatttaaagaattgtttcagactcctggtcacactgaagaactagtggccgcaggcaagacgaccaagatcccctgcgatagtccccagtcagaccccgtcgacacgccgacaagcaccaagcagcggccaaagaggagtattaggaaggccgatgttgagggagaactgcttgcctgtcgcaatcttatgccaagtgccggaaaggccatgcacactccaaaacctagcgtgggcgaagagaaggatatcattatattcgtggggaccccagtccaaaaactcgacctaacggagaatctgaccgggtcgaaacgtcgcccacaaactcccaaagaggaggctcaggcgctggaagatctgaccggctttaaggagctgttccaaactcccggacacacagaggaggcggtggccgctgggaagactacaaagatgccctgtgaatcctcgcctccagaatccgctgacactcccacgtccactaggcggcaaccgaaaactccgctggaaaaacgagatgtgcagaaggaactgtctgccctgaagaaactgacccagacaagcggagaaaccacacatactgataaggtgccaggtggagaggataagagtatcaatgcattccgagagacagcaaagcagaaactggaccccgctgcatccgtgactggatcgaagagacatcccaaaacaaaagagaaggcacagcctctggaggatctcgcaggccttaaagagcttttccagacccctgtgtgtacggataagcccaccacacacgagaagaccaccaaaatcgcctgcaggtcccagcctgatccggtagacacccctacaagctccaagccacagagcaagcgctcacttcggaaggtcgatgtcgaagaggaattcttcgccctgaggaagcgcactccatctgcaggtaaagccatgcacactccaaagccagcagtctcaggcgaaaagaacatctacgctttcatgggcacccccgtgcagaagctcgatctcacagaaaacctgaccggctcaaagcggcgacttcagaccccaaaagagaaggctcaagcactcgaggaccttgctggctttaaggaactgttccagacaaggggacataccgaggaatcaatgacaaatgataaaacagcaaaggtggcatgcaaatcgagccaaccggatccggataaaaatccggcttcctcaaaacgtcgcctgaagacctctctggggaaggtgggcgtcaaagaggagctgcttgccgtcggtaagttaacccagacgagtggagagactacacatacccacacggaacccactggagatgggaaatccatgaaggctttcatggaatcaccaaagcagatactggactccgcagccagcttgacagggagcaagaggcaactgcggaccccaaagggcaaatccgaagtgcctgaggatctcgctgggttcattgaactcttccagactccatctcatacaaaggagagcatgactaatgaaaagactaccaaggtctcctatagggcctcccagcccgatctggtcgatactcctacatccagcaagccccaacctaagcgctcactgcggaaggccgacaccgaagaggagttcctggccttcagaaagcagaccccttccgcgggtaaagccatgcacacacccaaacccgctgtgggagaggagaaggacataaacaccttcctgggcacaccagtccagaagttggatcagcccggaaacctgccaggatctaacagacggttgcagacccgaaaagagaaagctcaggcactggaggagcttaccgggttcagggagttatttcagaccccatgcaccgataatcctactacagatgagaaaactaccaagaagatcctttgtaagtcaccccaatcagatccagctgacacgcccacaaataccaagcagagacctaagagaagcctcaaaaaggccgacgtcgaagaggaattcctcgcatttcgtaagctcacccctagcgcagggaaagcaatgcatacacctaaggcagcagtaggggaagagaaagatataaacaccttcgttgggactcccgtggagaaactagacctcctaggcaatttacctggcagcaaacgcagacctcagacccccaaagagaaggccaaagctttggaggatctcgcaggctttaaggaactgttccagacgccagggcacaccgaagaatctatgaccgacgataagattaccgaggtctcttgcaaatctccacagccagaccccgtgaagacaccaacttcctcaaagcagcgcttgaagatctccctgggaaaagtgggagtaaaagaagaagtcctgcctgtaggaaagctcactcagacatcaggcaagactacccaaacccaccgggaaaccgccggagatggcaagagtatcaaggcctttaaggaatcagccaaacagatgttagatccggctaactacggcactggtatggaaagatggcccagaactcccaaggaagaggcacagtctctcgaagacctagcaggctttaaagagctctttcaaactccagatcacactgaggaaagtacaactgacgacaaaacaaccaaaattgcttgcaaatcaccaccacccgaaagcatggatacaccaacgtcaacgcgaagaagaccaaagacacctcttggtaaaagggatatagtggaggagttaagtgcgctgaaacagctgacccagaccactcacaccgacaaggtccccggtgatgaggataaaggaatcaatgtcttcagagagaccgctaaacagaaattagatccggcagcttctgtgactggttcaaagagacagccacggacccctaagggtaaggctcagccattagaggatctggctggcctcaaagagttgtttcagacacccatttgcactgacaagccaacgacccacgaaaaaactaccaaaattgcatgtagaagtccacaaccggacccagttggcacaccaaccatcttcaagccccagagcaagagatcgctgaggaaagctgatgtggaggaggagtcgctggcactgcgaaagagaaccccgtcagttgggaaggccatggatactcctaagcctgcgggaggagacgagaaggacatgaaggcatttatgggaacacctgtacagaaattggatctcccgggaaatttacctggcagcaaaaggtggcctcagacacccaaagagaaggcccaagctctggaagacctcgcaggcttcaaagagctgttccagacgccaggtaccgataagccgacaacagatgaaaaaacaacgaagatcgcttgtaaaagtccgcagccggaccctgtggacacgccggcatctacgaaacagcggcctaagcggaaccttaggaaagccgatgttgaggaagagttcctcgcactgcgaaagcgaactccaagtgcaggaaaagccatggacaccccaaaacctgcagttagtgacgaaaagaacatcaacactttcgtggagacgcccgtgcagaagctcgatcttttgggcaacctcccgggatcaaaacggcagcctcaaacgcccaaggagaaagccgaggcactggaggatttggtcggattcaaagagctctttcagacgccaggacacactgaggagtcaatgacagatgacaaaattacagaagtcagctgtaagagccctcagccagagagctttaaaactagcagatcatccaaacagagattgaaaatccccctggttaaggttgatatgaaggaggaacctctggccgtttcaaagcttacgcggacctccggtgaaacgacccaaacccacacggagccaaccggcgattcgaaatccatcaaagcgtttaaagagtcaccaaaacaaattttggatcctgctgcgtcggttacaggcagcaggcgacagctgcggacacgaaaggagaaggccagagctctcgaggacctggtggactttaaggagctctttagcgcaccgggtcacaccgaggagtccatgaccatcgataaaaacaccaagataccctgtaaatccccaccccctgagctcaccgacacagcaacatctacaaagcgctgccccaagacaagaccacgtaaggaggtaaaagaggagctttcggcagtggagcgcttaacacagacgtcggggcagtcaacacatacacacaaggaacccgcaagcggcgatgaagggatcaaggtgctcaagcagcgagctaagaagaaacctaatcctgttgaggaagagccgtcccgacgaaggcccagggcaccaaaagaaaaggcacagccgcttgaggatctggccggattcaccgagcttagcgaaacttcgggtcacacccaggagtccctcactgccggaaaggctacaaaaattccctgcgagtcccctcccctggaggtggtagacactaccgccagcactaaacggcacctgcgcacccgcgttcaaaaggtgcaggtgaaggaggaaccctccgcagtcaagtttactcagacttcgggcgagaccacagatgctgataaggaaccagccggagaagataaagggattaaggcacttaaagagagtgctaagcagacacccgcaccagccgcttccgtgaccgggtcaagacggagaccaagggcacccagggaatcggctcaggccattgaggacctcgccggtttcaaagatcccgcagctggtcacaccgaggaaagcatgaccgacgacaagacgacgaagattccctgcaaatccagccctgagctggaggataccgcgacgagctctaagcggcgaccaagaactagggcccagaaggtggaagtgaaggaagagctcttggccgtgggcaaactgacgcagacaagtggggagacgacccataccgacaaggaaccagttggcgaggggaaaggaacaaaggcctttaaacagccagcgaaacgaaagctggatgccgaagatgtcatagggtcacgcagacaacccagggctcccaaagagaaggcccagccgctggaagacctggcctccttccaggaactgagccagactccaggacacactgaagagctagctaatggcgcagctgacagttttacatccgctcctaagcagactcccgattcaggcaagccgcttaaaatcagtagaagagtgctgcgggcacctaaggtagagcctgtgggagatgttgtttcgactcgtgatcctgtgaaatctcagtctaagagcaacacgtcattaccgcctcttccgttcaaaagagggggtgggaaggatggttctgtgacgggaaccaaaaggctgagatgtatgcctgctccagaagagatcgtggaggagctccccgcttccaaaaagcaaagagtggcccctcgggctcggggaaagtcctcagagccggtggtaattatgaaaagaagcctgagaacatccgccaaaagaattgaaccagccgaagagctaaattccaacgacatgaaaacaaataaggaggagcacaaactgcaggactctgtgcccgaaaataaaggcatttcactgcggagcaggcggcaaaataaaaccgaggccgagcagcagatcacagaagtcttcgtcttggcagagaggatcgagatcaacaggaatgagaaaaagcccatgaaaacttctcccgagatggatatccaaaaccctgacgacggagctcggaagcccattcctagagataaggtcaccgagaataaacggtgtttaaggtcggcccgtcagaatgaaagctcccagcctaaagttgcggaagagagtgggggtcaaaagagtgccaaggtactcatgcaaaatcagaagggtaaaggggaagctgggaattccgactcgatgtgtttacggtcccggaagactaaatcccaacccgctgcatccacattggaatccaagtcggtacagcgcgtcaccagatccgtgaaacgatgcgccgagaacccaaagaaggcagaggacaacgtgtgcgtgaagaagatccgcactaggagtcaccgagatagtgaagacattta

SEQ ID NO: 128170 - DNA, 9767 bp, Artificial Sequence
  derived and/or modified sequence
atgtggccaacacggaggctcgtcacaattaagagaagcggcgtagatggtcctcactttccgcttagcctctctacttgcttgttcggcaggggcatcgagtgcgatattagaatccagctgccagttgtctctaagcagcactgtaagatcgaaatacacgagcaggaagcgatccttcacaacttttcttccactaaccccacccaagtgaacgggtctgttattgacgagcctgtccgcctcaagcacggtgacgtcatcaccataatcgaccggagcttcaggtacgaaaacgaatctctacagaatgggcgaaagagcacagagttcccgagaaaaatccgagagcaggaacccgctcggcgagtgtcccgatccagcttttcatctgaccccgacgaaaaagcgcaggactctaaagcttacagtaaaataaccgaaggcaaggtgtccgggaaccctcaggttcacattaagaacgtcaaagaagattccacagctgacgactcaaaagattccgtcgcacagggcaccactaatgtccattcctctgaacacgctggcaggaacggaagaaacgcggctgatccaatcagcggggatttcaaggaaatcagctcagtgaagctcgtgagccggtacggcgagttgaagagtgtaccgaccacccagtgccttgacaattcaaagaaaaacgagtctcctttctggaaactttacgaaagtgttaaaaaggagctagacgtcaagagccaaaaggaaaatgtcctccagtactgccgaaaatccggcttgcagacggactacgccaccgaaaaggaaagtgcggacggcttgcaaggagagacccagttgttagtgtcccgaaaaagcaggcccaaaagcggcggatccggccatgcagtggctgaacccgcttctcccgagcaagagctggatcagaataaggggaaaggtcgggacgtcgagtcggtgcaaacaccctctaaggcggtgggcgcaagtttcccactgtacgaacctgccaagatgaaaacgcccgtgcaatatagccagcagcagaatagccctcaaaagcacaagaataaagacttatacacaacgggccgaagagagtctgttaaccttggcaaatccgagggattcaaggctggggataagacgctaactcccaggaaactcagcaccagaaatcggactccagcaaaggtcgaagacgctgcggacagcgctacaaagcccgaaaacctcagtagtaaaactcgcggtagcatacctacagacgtcgaggtcttaccgaccgaaaccgagattcataatgaacccttcctaaccctgtggctgacacaggtagagagaaaaatacagaaggatagcctgagtaagcccgaaaagcttggaaccaccgccggacagatgtgtagcggcctcccgggtctcagcagtgttgacataaacaacttcggagacagcatcaatgagtcggaaggaatacctctgaaaagaaggcgcgtgtcattcgggggacaccttcggcctgagttgttcgatgaaaaccttcctccgaatacacctctgaagcgcggtgaggcgccaacaaagcgcaagtctttggtaatgcacactccccctgtgttgaagaaaattatcaaagaacagccccagccctccggtaaacaggagtcgggatccgagatccacgtcgaggtgaaggctcagtcacttgtcatctcaccaccagcccctagcccgagaaagaccccggttgcttctgaccagcgcagacgaagctgcaaaaccgctcctgccagtagctcaaagtcacagaccgaggtgcctaaacggggtggtgagcgcgtggctacatgcctccaacgcgtgtcaatcagtcgcagccagcatgatattttacagatgatatgttcaaaaagacggagtggggcttctgaagccaacctcatcgtagctaagtcctgggccgacgtggtcaaactcggcgctaagcagacgcagacaaaggtgataaaacatggccctcagcggtcaatgaacaaacgccagagacgcccagccacccctaagaagcctgtgggggaagttcactcccagttcagcaccggacatgccaactctccttgtacgatcatcattggcaaggcgcataccgagaaggttcatgttccagctagaccctaccgagtgctcaataatttcataagcaatcaaaaaatggatttcaaggaggacctgtcagggatcgcagaaatgtttaaaactccagtgaaagagcagcctcaactgacgagcacgtgtcacattgccatcagtaacagcgagaatctcctgggcaaacaatttcaaggtacagattcaggagaggaacctctactgcccacaagcgaatcttttggaggaaatgtgttcttctcagcacagaatgcagcaaagcagcccagtgataagtgttcagcctcaccacctttgagacggcagtgtatcagggaaaatgggaatgtggccaaaaccccgagaaacacgtataaaatgacttcattggagacgaaaactagcgacactgagaccgaaccgagtaagacagttagtactgctaaccgttccggcagatcaacagagtttaggaacattcaaaaactccccgtggagtcaaaatccgaagagacaaacactgaaattgtcgagtgtattttgaagcgcggacaaaaagccaccctcctgcagcaacgtagagaaggagagatgaaggagattgagcgacccttcgagacctacaaggaaaatattgagttgaaagagaacgatgaaaaaatgaaagcaatgaagagaagtcgaacctggggacagaaatgcgccccaatgagcgacctgacagacctgaaatctctgccggacaccgagttgatgaaagacaccgccaggggacagaacctgctccagacccaggaccatgccaaggcacccaaaagtgagaaagggaagattaccaaaatgccatgccaatccctacagccagagcctatcaacacaccgacacatacaaagcaacagctgaaagcctcccttgggaaggtgggtgtgaaagaggagctgctggccgttgggaaattcacgagaaccagcggtgagactacacatactcaccgcgaacccgctggagatggcaaatccatccgaaccttcaaagaatcacccaagcagatccttgatccagcagcaagagtgacaggcatgaaaaaatggcctagaacccccaaggaggaagctcagagcctcgaagatctggcagggtttaaggaactattccagacccccggacctagcgaggagtccatgacagatgaaaagacaacaaaaatcgcttgtaaatctccccctccagagagcgtggatacacctacttccacgaagcagtggcctaaaaggagcctcaggaaggcagatgtggaagaggagttcctggcactccgaaaactgacaccctccgccggaaaagcgatgctgacccctaagcctgctgggggtgacgagaaggacattaaagcctttatggggacccctgtgcagaagctggacctcgccggtacccttcccggaagtaaaaggcagctgcaaacccccaaggagaaggcccaggctttggaggaccttgcgggatttaaagagcttttccagacacccggacacactgaagagctggtcgcggcaggcaagaccacgaaaattccgtgcgacagccctcagtctgaccccgttgatacacccactagtaccaaacaacggccaaaaaggtctatccgcaaagctgatgtggaaggagaactgttggcctgcaggaacctaatgccaagtgctggaaaagcgatgcatacgccgaagcccagtgtgggcgaagaaaaagacataatcatttttgttggtacccccgtccagaagctcgatctgactgagaacttaacagggagcaaacgaagaccgcagactcccaaagaggaagcccaggctctagaggacctaacgggatttaaagagctgttccaaacaccaggtcataccgaggaggctgtcgcagccggtaaaaccaccaaaatgccgtgcgagtcttcccctcccgaaagcgccgataccccgacatccactagaagacagcctaagaccccacttgaaaagagagacgtccagaaagagctgagtgcacttaaaaaactgacgcaaacttcgggggaaactactcataccgataaagtaccaggtggggaggataagtcgattaatgcatttcgggagaccgcaaagcaaaagctggacccagctgcctccgtcaccggaagtaagcggcaccctaagactaaggagaaagcccagccactggaagatctcgccggactgaaggaactctttcagactccagtgtgtaccgataaacccacaacccacgagaagaccacaaagatagcctgccgtagtcagcccgatcctgtggacactcctactagctcaaagccccaatccaagaggtcattgcggaaagtggacgttgaggaggagttttttgctctgcgcaagagaaccccctcagctgggaaggccatgcacactccaaaaccagctgtctccggagaaaaaaatatctatgcttttatgggtacccccgtccaaaaactcgacctaaccgagaatctcacaggtagtaagagacgactccaaaccccaaaagaaaaagctcaggccctggaggatttggcaggttttaaggaactgtttcagacccggggacacacagaagagtcaatgacaaacgacaagactgccaaagtcgcttgtaagtcctctcagcccgatcctgacaagaacccagctagcagcaaacgcaggctcaagactagtttgggcaaggtgggcgtgaaagaagagctcctggccgtaggaaaactgactcagacatctggagagacgacccacactcatacggagcctactggggatggtaagtccatgaaggcatttatggagtctccaaagcaaatactggattccgctgcttccctgacgggctctaaaagacagctgcgcacccccaagggcaagtcagaggtacccgaggatctggctggcttcatcgagttgtttcaaacccccagccacacaaaggagagcatgactaatgagaagaccactaaggtgtcttatcgagcgagccagcccgacctcgttgacaccccaacttcctcaaagccacagcccaaacggtcactcagaaaggctgataccgaagaggagtttctagctttccgaaaacagactcctagcgccggtaaggccatgcatactccgaagcccgcagtcggcgaggaaaaagacatcaacacttttttaggcactccagtacagaaacttgaccagcctggcaacctgccaggtagcaaccgcagacttcaaacaagaaaggagaaagctcaggccctggaagaactgacagggtttagagaactgttccagactccctgcaccgacaacccaacaaccgatgagaagactacgaagaagattctttgcaagtcccctcaaagcgacccggctgatacccccaccaacacgaaacaacgaccaaaacgttcgctgaagaaagctgatgtggaagaagaattcttagcatttagaaagctgactccttctgccggtaaggcaatgcacacacccaaggctgcagtcggtgaggaaaaggatataaatacgtttgttggcacccctgtggagaagttggacctgttaggtaatctgcctggcagcaaacggagaccacagacccccaaggagaaagctaaggcactggaggatctcgcagggtttaaagaactctttcagacccccggacacacggaggaatcaatgacagatgacaaaatcacggaggtgagttgcaaatcgcctcagcctgacccagtgaagacacccacatcaagcaagcagcgccttaaaataagccttggtaaagtgggagtgaaagaagaagtgctccccgtaggcaagctgacccaaacaagcggcaagacgactcagactcacagggagactgctggagatgggaagtcgattaaggccttcaaggaaagtgctaagcaaatgttagatcctgctaattacgggacaggcatggaaaggtggccaagaacccccaaggaggaggcacaaagcctcgaggacctcgccggtttcaaagaactattccagacccccgatcacaccgaagagtccactacagacgacaagacaacaaagatagcttgcaaaagcccaccacctgaaagtatggacacccccactagtaccaggaggcgacccaaaacacctctcgggaagcgagacattgtggaggagctatccgcattgaagcagctgacacagaccacgcacaccgacaaagttcccggtgacgaggacaagggaattaacgtgttccgcgaaacagctaaacaaaaactggaccccgcagcctctgtgaccgggtctaagagacagccacggacccccaagggaaaagctcaaccactggaggatctggctgggctcaaggaattgttccagacccccatctgtacagataaacccactacccacgagaaaaccacaaaaatcgcgtgccgcagtccccagccagacccagtcgggaccccaaccatctttaagcctcaaagcaaacgtagtttgaggaaggccgacgtggaggaagagagcctggctctacggaaacggacgccttcggtggggaaggctatggatactcccaagcctgcaggtggggatgagaaggatatgaaagcctttatgggcacccccgtccagaagctggacttaccaggcaatctgccgggttctaagaggtggccccagacacccaaggagaaggctcaggccttggaggatctggccggatttaaggagttgtttcagactcctggtacagataaaccaaccacggacgagaagactactaagatcgcctgcaaaagtcctcagcctgacccggttgacacacctgcgtctactaagcagcggcctaaacgcaacctgcgcaaagccgacgttgaagaagagtttctggccctacgaaagaggacacctagcgctggaaaggctatggatacccctaagccggcagtgagcgacgaaaagaacatcaacaccttcgtcgaaactccagtgcagaagctggacctcctgggcaatctaccaggttccaaacgccagcctcagacacctaaagaaaaggccgaggcgttggaggacctggtcggctttaaagagttgtttcagactccgggacataccgaagagagtatgaccgacgacaaaataactgaggtctcttgcaagtccccccagcctgaatccttcaaaacctcacgcagttctaagcagcgccttaagatcccactggtgaaggtagacatgaaagaagagccacttgccgtgtctaaacttaccaggacaagcggcgaaacgacacagacacatacggagcctacaggggactccaaaagcatcaaggcctttaaggaatcgcctaagcaaatcctcgacccagccgctagtgtcacaggatcccgcagacaactgcgaacacggaaggagaaggcacgggctctggaagacttagttgacttcaaagagctctttagtgcgccaggccataccgaagagtcgatgaccatcgataaaaatactaagatcccttgtaaatcccctccaccagagctgacggacactgccacttccactaagagatgcccgaaaacgcggcctcggaaggaagtgaaggaagagctgagtgcggtcgaaaggctgacgcagacaagtggccagagcacacatacacacaaagaaccagccagcggcgacgaaggcatcaaagtcttgaaacaaagagctaagaagaagccgaaccccgttgaggaggagccaagcagaagaaggccacgggcacccaaagagaaagcacagcccttagaggatttggcgggattcactgagctgtccgaaacctccgggcacacccaggagtccctgacagcagggaaagcaacaaaaatcccttgtgaatcccctcccctggaggttgttgacactactgcgtcgaccaaacgccatctaaggacccgagtgcagaaggtccaagttaaggaggagccaagtgcagttaagttcacgcaaaccagcggagaaacgactgatgctgacaaagagccagcaggtgaggacaagggcatcaaggccctgaaggaatctgcaaagcaaacgccagcccctgcggcttccgttaccggatctcggaggcgcccaagagctcctcgcgaaagtgcgcaggcaattgaagatttagctggattcaaggacccagccgctgggcatacagaagagtctatgactgatgataagacaaccaaaatcccctgcaagagcagtccagaactggaggacactgccactagttccaagcggcgacctaggaccagggcacaaaaggtggaagtgaaggaggagttgctcgcagtaggaaagctgacgcagacatcgggagaaacgactcacacagataaggaacccgtgggagagggaaaggggaccaaggcttttaaacagccggctaagaggaagctcgacgcagaggatgtcattggctcacgccgtcagccccgtgctccaaaagaaaaggcccagccccttgaagacctcgcctcatttcaagagctgtctcagacgcctgggcatacagaagagttggctaatggcgcagccgattcattcacctcggcacccaagcagacccccgactccggcaagcccctgaaaatttcaagacgagtgttaagagctcccaaggtggagcccgtgggagacgtggtgtcaaccagagaccctgtaaagagtcaatcaaagagcaacactagtctcccacctctgcctttcaaacggggaggtggaaaagacggctcggtcactgggaccaaacggctgcggtgtatgcccgcaccagaggaaatcgtcgaggagcttcccgctagcaaaaaacaacgcgtagcccctagagctagaggcaaatcctctgaacctgtggtcatcatgaaacggagcctccgaacttccgccaaacgaatcgaaccggcagaggagctgaacagcaatgacatgaagactaacaaggaggagcacaagctccaagactctgtgcctgagaataaaggaatctcactcagatcgagacgccagaataagacggaggccgagcagcaaattactgaggtgttcgtcttggccgagcgtatagagattaatagaaatgagaaaaagcccatgaaaaccagtccggaaatggatatacagaacccagacgacggagcccgtaaacctatccctcgcgataaggtcaccgaaaataagagatgcctgcgcagcgccagacagaacgaaagcagtcagcccaaggtggcagaagagtccggtggccaaaaatccgctaaggtattgatgcagaatcagaaagggaaaggagaggctggcaactcagacagtatgtgtctgcgaagcaggaaaacgaaatcgcagccagcagcttccactttagaatctaagagcgtgcagcgggtaactagatctgtgaagaggtgtgccgaaaaccccaagaaggcagaggacaacgtctgtgtgaagaagatccgcaccagatcccatcgggacagtgaggatatcta

SEQ ID NO: 128171 - DNA, 141 bp, Artificial Sequence
  derived and/or modified sequence
atgtggccaacgcggcgtctcgtgactattaaaagatctggtgttgacgggccacatttccctttatccctcagtacatgcctcttcggacggcgaaaatgtgtcctccagtgcaccgaatgttctaagacggcaatctag

SEQ ID NO: 128172 - DNA, 12678 bp, Artificial Sequence
  derived and/or modified sequence
gggcgggaggactcgactcggtgggagccgctagagccgggcgcccggggacgtagcctgtagggccaccgggtccccgtcagaggcggcggcgggagcagcggggactgcaggccggggtgcagcgaacgcgaccccgcgggctgcggcccggtgtgtgcggagcgtggcgggcgcagcttaccgggcggaggtgagcgcggcgccggctcctcctgcggcggactttgggtgcgacttgacgagcggtggttcgacaagtggccttgcgggccggatcgtcccagtggaagagttgtaaatttgcttctggccttcccctacggattatacctggccttcccctacggattatactcaacttactgtttagaaaatgtggcccacgagacgcctggttactatcaaaaggagcggggtcgacggtccccactttcccctgagcctcagcacctgcttgtttggaaggggtattgaatgtgacatccgtatccagcttcctgttgtgtcaaaacaacattgcaaaattgaaatccatgagcaggaggcaatattacataatttcagttccacaaatccaacacaagtaaatgggtctgttattgatgagcctgtacggctaaaacatggagatgtaataactattattgatcgttccttcaggtatgaaaatgaaagtcttcagaatggaaggaagtcaactgaatttccaagaaaaatacgtgaacaggagccagcacgtcgtgtctcaagatctagcttctcttctgaccctgatgagaaagctcaagattccaaggcctattcaaaaatcactgaaggaaaagtttcaggaaatcctcaggtacatatcaagaatgtcaaagaagacagtaccgcagatgactcaaaagacagtgttgctcagggaacaactaatgttcattcctcagaacatgctggacgtaatggcagaaatgcagctgatcccatttctggggattttaaagaaatttccagcgttaaattagtgagccgttatggagaattgaagtctgttcccactacacaatgtcttgacaatagcaaaaaaaatgaatctcccttttggaagctttatgagtcagtgaagaaagagttggatgtaaaatcacaaaaagaaaatgtcctacagtattgtagaaaatctggattacaaactgattacgcaacagagaaagaaagtgctgatggtttacagggggagacccaactgttggtctcgcgtaagtcaagaccaaaatctggtgggagcggccacgctgtggcagagcctgcttcacctgaacaagagcttgaccagaacaaggggaagggaagagacgtggagtctgttcagactcccagcaaggctgtgggcgccagctttcctctctatgagccggctaaaatgaagacccctgtacaatattcacagcaacaaaattctccacaaaaacataagaacaaagacctgtatactactggtagaagagaatctgtgaatctgggtaaaagtgaaggcttcaaggctggtgataaaactcttactcccaggaagctttcaactagaaatcgaacaccagctaaagttgaagatgcagctgactctgccactaagccagaaaatctctcttccaaaaccagaggaagtattcctacagatgtggaagttctgcctacggaaactgaaattcacaatgagccatttttaactctgtggctcactcaagttgagaggaagatccaaaaggattccctcagcaagcctgagaaattgggcactacagctggacagatgtgctctgggttacctggtcttagttcagttgatatcaacaactttggtgattccattaatgagagtgagggaatacctttgaaaagaaggcgtgtgtcctttggtgggcacctaagacctgaactatttgatgaaaacttgcctcctaatacgcctctcaaaaggggagaagccccaaccaaaagaaagtctctggtaatgcacactccacctgtcctgaagaaaatcatcaaggaacagcctcaaccatcaggaaaacaagagtcaggttcagaaatccatgtggaagtgaaggcacaaagcttggttataagccctccagctcctagtcctaggaaaactccagttgccagtgatcaacgccgtaggtcctgcaaaacagcccctgcttccagcagcaaatctcagacagaggttcctaagagaggagggagaaagagtggcaacctgccttcaaagagagtgtctatcagccgaagtcaacatgatattttacagatgatatgttccaaaagaagaagtggtgcttcggaagcaaatctgattgttgcaaaatcatgggcagatgtagtaaaacttggtgcaaaacaaacacaaactaaagtcataaaacatggtcctcaaaggtcaatgaacaaaaggcaaagaagacctgctactccaaagaagcctgtgggcgaagttcacagtcaatttagtacaggccacgcaaactctccttgtaccataataatagggaaagctcatactgaaaaagtacatgtgcctgctcgaccctacagagtgctcaacaacttcatttccaaccaaaaaatggactttaaggaagatctttcaggaatagctgaaatgttcaagaccccagtgaaggagcaaccgcagttgacaagcacatgtcacatcgctatttcaaattcagagaatttgcttggaaaacagtttcaaggaactgattcaggagaagaacctctgctccccacctcagagagttttggaggaaatgtgttcttcagtgcacagaatgcagcaaaacagccatctgataaatgctctgcaagccctcccttaagacggcagtgtattagagaaaatggaaacgtagcaaaaacgcccaggaacacctacaaaatgacttctctggagacaaaaacttcagatactgagacagagccttcaaaaacagtatccactgcaaacaggtcaggaaggtctacagagttcaggaatatacagaagctacctgtggaaagtaagagtgaagaaacaaatacagaaattgttgagtgcatcctaaaaagaggtcagaaggcaacactactacaacaaaggagagaaggagagatgaaggaaatagaaagaccttttgagacatataaggaaaatattgaattaaaagaaaacgatgaaaagatgaaagcaatgaagagatcaagaacttgggggcagaaatgtgcaccaatgtctgacctgacagacctcaagagcttgcctgatacagaactcatgaaagacacggcacgtggccagaatctcctccaaacccaagatcatgccaaggcaccaaagagtgagaaaggcaaaatcactaaaatgccctgccagtcattacaaccagaaccaataaacaccccaacacacacaaaacaacagttgaaggcatccctggggaaagtaggtgtgaaagaagagctcctagcagtcggcaagttcacacggacgtcaggggagaccacgcacacgcacagagagccagcaggagatggcaagagcatcagaacgtttaaggagtctccaaagcagatcctggacccagcagcccgtgtaactggaatgaagaagtggccaagaacgcctaaggaagaggcccagtcactagaagacctggctggcttcaaagagctcttccagacaccaggtccctctgaggaatcaatgactgatgagaaaactaccaaaatagcctgcaaatctccaccaccagaatcagtggacactccaacaagcacaaagcaatggcctaagagaagtctcaggaaagcagatgtagaggaagaattcttagcactcaggaaactaacaccatcagcagggaaagccatgcttacgcccaaaccagcaggaggtgatgagaaagacattaaagcatttatgggaactccagtgcagaaactggacctggcaggaactttacctggcagcaaaagacagctacagactcctaaggaaaaggcccaggctctagaagacctggctggctttaaagagctcttccagactcctggtcacaccgaggaattagtggctgctggtaaaaccactaaaataccctgcgactctccacagtcagacccagtggacaccccaacaagcacaaagcaacgacccaagagaagtatcaggaaagcagatgtagagggagaactcttagcgtgcaggaatctaatgccatcagcaggcaaagccatgcacacgcctaaaccatcagtaggtgaagagaaagacatcatcatatttgtgggaactccagtgcagaaactggacctgacagagaacttaaccggcagcaagagacggccacaaactcctaaggaagaggcccaggctctggaagacctgactggctttaaagagctcttccagacccctggtcatactgaagaagcagtggctgctggcaaaactactaaaatgccctgcgaatcttctccaccagaatcagcagacaccccaacaagcacaagaaggcagcccaagacacctttggagaaaagggacgtacagaaggagctctcagccctgaagaagctcacacagacatcaggggaaaccacacacacagataaagtaccaggaggtgaggataaaagcatcaacgcgtttagggaaactgcaaaacagaaactggacccagcagcaagtgtaactggtagcaagaggcacccaaaaactaaggaaaaggcccaacccctagaagacctggctggcttgaaagagctcttccagacaccagtatgcactgacaagcccacgactcacgagaaaactaccaaaatagcctgcagatcacaaccagacccagtggacacaccaacaagctccaagccacagtccaagagaagtctcaggaaagtggacgtagaagaagaattcttcgcactcaggaaacgaacaccatcagcaggcaaagccatgcacacacccaaaccagcagtaagtggtgagaaaaacatctacgcatttatgggaactccagtgcagaaactggacctgacagagaacttaactggcagcaagagacggctacaaactcctaaggaaaaggcccaggctctagaagacctggctggctttaaagagctcttccagacacgaggtcacactgaggaatcaatgactaacgataaaactgccaaagtagcctgcaaatcttcacaaccagacccagacaaaaacccagcaagctccaagcgacggctcaagacatccctggggaaagtgggcgtgaaagaagagctcctagcagttggcaagctcacacagacatcaggagagactacacacacacacacagagccaacaggagatggtaagagcatgaaagcatttatggagtctccaaagcagatcttagactcagcagcaagtctaactggcagcaagaggcagctgagaactcctaagggaaagtctgaagtccctgaagacctggccggcttcatcgagctcttccagacaccaagtcacactaaggaatcaatgactaacgaaaaaactaccaaagtatcctacagagcttcacagccagacctagtggacaccccaacaagctccaagccacagcccaagagaagtctcaggaaagcagacactgaagaagaatttttagcatttaggaaacaaacgccatcagcaggcaaagccatgcacacacccaaaccagcagtaggtgaagagaaagacatcaacacgtttttgggaactccagtgcagaaactggaccagccaggaaatttacctggcagcaatagacggctacaaactcgtaaggaaaaggcccaggctctagaagaactgactggcttcagagagcttttccagacaccatgcactgataaccccacgactgatgagaaaactaccaaaaaaatactctgcaaatctccgcaatcagacccagcggacaccccaacaaacacaaagcaacggcccaagagaagcctcaagaaagcagacgtagaggaagaatttttagcattcaggaaactaacaccatcagcaggcaaagccatgcacacgcctaaagcagcagtaggtgaagagaaagacatcaacacatttgtggggactccagtggagaaactggacctgctaggaaatttacctggcagcaagagacggccacaaactcctaaagaaaaggccaaggctctagaagatctggctggcttcaaagagctcttccagacaccaggtcacactgaggaatcaatgaccgatgacaaaatcacagaagtatcctgcaaatctccacaaccagacccagtcaaaaccccaacaagctccaagcaacgactcaagatatccttggggaaagtaggtgtgaaagaagaggtcctaccagtcggcaagctcacacagacgtcagggaagaccacacagacacacagagagacagcaggagatggaaagagcatcaaagcgtttaaggaatctgcaaagcagatgctggacccagcaaactatggaactgggatggagaggtggccaagaacacctaaggaagaggcccaatcactagaagacctggccggcttcaaagagctcttccagacaccagaccacactgaggaatcaacaactgatgacaaaactaccaaaatagcctgcaaatctccaccaccagaatcaatggacactccaacaagcacaaggaggcggcccaaaacacctttggggaaaagggatatagtggaagagctctcagccctgaagcagctcacacagaccacacacacagacaaagtaccaggagatgaggataaaggcatcaacgtgttcagggaaactgcaaaacagaaactggacccagcagcaagtgtaactggtagcaagaggcagccaagaactcctaagggaaaagcccaacccctagaagacttggctggcttgaaagagctcttccagacaccaatatgcactgacaagcccacgactcatgagaaaactaccaaaatagcctgcagatctccacaaccagacccagtgggtaccccaacaatcttcaagccacagtccaagagaagtctcaggaaagcagacgtagaggaagaatccttagcactcaggaaacgaacaccatcagtagggaaagctatggacacacccaaaccagcaggaggtgatgagaaagacatgaaagcatttatgggaactccagtgcagaaattggacctgccaggaaatttacctggcagcaaaagatggccacaaactcctaaggaaaaggcccaggctctagaagacctggctggcttcaaagagctcttccagacaccaggcactgacaagcccacgactgatgagaaaactaccaaaatagcctgcaaatctccacaaccagacccagtggacaccccagcaagcacaaagcaacggcccaagagaaacctcaggaaagcagacgtagaggaagaatttttagcactcaggaaacgaacaccatcagcaggcaaagccatggacacaccaaaaccagcagtaagtgatgagaaaaatatcaacacatttgtggaaactccagtgcagaaactggacctgctaggaaatttacctggcagcaagagacagccacagactcctaaggaaaaggctgaggctctagaggacctggttggcttcaaagaactcttccagacaccaggtcacactgaggaatcaatgactgatgacaaaatcacagaagtatcctgtaaatctccacagccagagtcattcaaaacctcaagaagctccaagcaaaggctcaagatacccctggtgaaagtggacatgaaagaagagcccctagcagtcagcaagctcacacggacatcaggggagactacgcaaacacacacagagccaacaggagatagtaagagcatcaaagcgtttaaggagtctccaaagcagatcctggacccagcagcaagtgtaactggtagcaggaggcagctgagaactcgtaaggaaaaggcccgtgctctagaagacctggttgacttcaaagagctcttctcagcaccaggtcacactgaagagtcaatgactattgacaaaaacacaaaaattccctgcaaatctcccccaccagaactaacagacactgccacgagcacaaagagatgccccaagacacgtcccaggaaagaagtaaaagaggagctctcagcagttgagaggctcacgcaaacatcagggcaaagcacacacacacacaaagaaccagcaagcggtgatgagggcatcaaagtattgaagcaacgtgcaaagaagaaaccaaacccagtagaagaggaacccagcaggagaaggccaagagcacctaaggaaaaggcccaacccctggaagacctggccggcttcacagagctctctgaaacatcaggtcacactcaggaatcactgactgctggcaaagccactaaaataccctgcgaatctcccccactagaagtggtagacaccacagcaagcacaaagaggcatctcaggacacgtgtgcagaaggtacaagtaaaagaagagccttcagcagtcaagttcacacaaacatcaggggaaaccacggatgcagacaaagaaccagcaggtgaagataaaggcatcaaagcattgaaggaatctgcaaaacagacaccggctccagcagcaagtgtaactggcagcaggagacggccaagagcacccagggaaagtgcccaagccatagaagacctagctggcttcaaagacccagcagcaggtcacactgaagaatcaatgactgatgacaaaaccactaaaataccctgcaaatcatcaccagaactagaagacaccgcaacaagctcaaagagacggcccaggacacgtgcccagaaagtagaagtgaaggaggagctgttagcagttggcaagctcacacaaacctcaggggagaccacgcacaccgacaaagagccggtaggtgagggcaaaggcacgaaagcatttaagcaacctgcaaagcggaagctggacgcagaagatgtaattggcagcaggagacagccaagagcacctaaggaaaaggcccaacccctggaagatctggccagcttccaagagctctctcaaacaccaggccacactgaggaactggcaaatggtgctgctgatagctttacaagcgctccaaagcaaacacctgacagtggaaaacctctaaaaatatccagaagagttcttcgggcccctaaagtagaacccgtgggagacgtggtaagcaccagagaccctgtaaaatcacaaagcaaaagcaacacttccctgcccccactgcccttcaagaggggaggtggcaaagatggaagcgtcacgggaaccaagaggctgcgctgcatgccagcaccagaggaaattgtggaggagctgccagccagcaagaagcagagggttgctcccagggcaagaggcaaatcatccgaacccgtggtcatcatgaagagaagtttgaggacttctgcaaaaagaattgaacctgcggaagagctgaacagcaacgacatgaaaaccaacaaagaggaacacaaattacaagactcggtccctgaaaataagggaatatccctgcgctccagacgccaaaataagactgaggcagaacagcaaataactgaggtctttgtattagcagaaagaatagaaataaacagaaatgaaaagaagcccatgaagacctccccagagatggacattcagaatccagatgatggagcccggaaacccatacctagagacaaagtcactgagaacaaaaggtgcttgaggtctgctagacagaatgagagctcccagcctaaggtggcagaggagagcggagggcagaagagtgcgaaggttctcatgcagaatcagaaagggaaaggagaagcaggaaattcagactccatgtgcctgagatcaagaaagacaaaaagccagcctgcagcaagcactttggagagcaaatctgtgcagagagtaacgcggagtgtcaagaggtgtgcagaaaatccaaagaaggctgaggacaatgtgtgtgtcaagaaaataagaaccagaagtcatagggacagtgaagatatttgacagaaaaatcgaactgggaaaaatataataaagttagttttgtgataagttctagtgcagtttttgtcataaattacaagtgaattctgtaagtaaggctgtcagtctgcttaagggaagaaaactttggatttgctgggtctgaatcggcttcataaactccactgggagcactgctgggctcctggactgagaatagttgaacaccgggggctttgtgaaggagtctgggccaaggtttgccctcagctttgcagaatgaagccttgaggtctgtcaccacccacagccaccctacagcagccttaactgtgacacttgccacactgtgtcgtcgtttgtttgcctatgtcctccagggcacggtggcaggaacaactatcctcgtctgtcccaacactgagcaggcactcggtaaacacgaatgaatggatgagcgcacggatgaatggagcttacaagatctgtctttccaatggccgggggcatttggtccccaaattaaggctattggacatctgcacaggacagtcctatttttgatgtcctttcctttctgaaaataaagttttgtgctttggagaatgactcgtgagcacatctttagggaccaagagtgactttctgtaaggagtgactcgtggcttgccttggtctcttgggaatacttttctaactagggttgctctcacctgagacattctccacccgcggaatctcagggtcccaggctgtgggccatcacgacctcaaactggctcctaatctccagctttcctgtcattgaaagcttcggaagtttactggctctgctcccgcctgttttctttctgactctatctggcagcccgatgccacccagtacaggaagtgacaccagtactctgtaaagcatcatcatccttggagagactgagcactcagcaccttcagccacgatttcaggatcgcttccttgtgagccgctgcctccgaaatctcctttgaagcccagacatctttctccagcttcagacttgtagatataactcgttcatcttcatttactttccactttgccccctgtcctctctgtgttccccaaatcagagaatagcccgccatcccccaggtcacctgtctggattcctccccattcacccaccttgccaggtgcaggtgaggatggtgcaccagacagggtagctgtcccccaaaatgtgccctgtgcgggcagtgccctgtctccacgtttgtttccccagtgtctggcggggagccaggtgacatcataaatacttgctgaatgaatgcagaaatcagcggtactgacttgtactatattggctgccatgatagggttctcacagcgtcatccatgatcgtaagggagaatgacattctgcttgagggagggaatagaaaggggcagggaggggacatctgagggcttcacagggctgcaaagggtacagggattgcaccagggcagaacaggggagggtgttcaaggaagagtggctcttagcagaggcactttggaaggtgtgaggcataaatgcttccttctacgtaggccaacctcaaaactttcagtaggaatgttgctatgatcaagttgttctaacactttagacttagtagtaattatgaacctcacatagaaaaatttcatccagccatatgcctgtggagtggaatattctgtttagtagaaaaatcctttagagttcagctctaaccagaaatcttgctgaagtatgtcagcaccttttctcaccctggtaagtacagtatttcaagagcacgctaagggtggttttcattttacagggctgttgatgatgggttaaaaatgttcatttaagggctacccccgtgtttaatagatgaacaccacttctacacaaccctccttggtactgggggagggagagatctgacaaatactgcccattcccctaggctgactggatttgagaacaaatacccacccatttccaccatggtatggtaacttctctgagcttcagtttccaagtgaatttccatgtaataggacattcccattaaatacaagctgtttttactttttcgcctcccagggcctgtgggatctggtcccccagcctctcttgggctttcttacactaactctgtacctaccatctcctgcctcccttaggcaggcacctccaaccaccacacactccctgctgttttccctgcctggaactttccctcctgccccaccaagatcatttcatccagtcctgagctcagcttaagggaggcttcttgcctgtgggttccctcacccccatgcctgtcctccaggctggggcaggttcttagtttgcctggaattgttctgtacctctttgtagcacgtagtgttgtggaaactaagccactaattgagtttctggctcccctcctggggttgtaagttttgttcattcatgagggccgactgcatttcctggttactctatcccagtgaccagccacaggagatgtccaataaagtatgtgatgaaatggtcttaaaa

SEQ ID NO: 128173 - DNA, 12490 bp, Artificial Sequence
  derived and/or modified sequence
taccgggcggaggtgagcgcggcgccggctcctcctgcggcggactttgggtgcgacttgacgagcggtggttcgacaagtggccttgcgggccggatcgtcccagtggaagagttgtaaatttgcttctggccttcccctacggattatacctggccttcccctacggattatactcaacttactgtttagaaaatgtggcccacgagacgcctggttactatcaaaaggagcggggtcgacggtccccactttcccctgagcctcagcacctgcttgtttggaaggggtattgaatgtgacatccgtatccagcttcctgttgtgtcaaaacaacattgcaaaattgaaatccatgagcaggaggcaatattacataatttcagttccacaaatccaacacaagtaaatgggtctgttattgatgagcctgtacggctaaaacatggagatgtaataactattattgatcgttccttcaggtatgaaaatgaaagtcttcagaatggaaggaagtcaactgaatttccaagaaaaatacgtgaacaggagccagcacgtcgtgtctcaagatctagcttctcttctgaccctgatgagaaagctcaagattccaaggcctattcaaaaatcactgaaggaaaagtttcaggaaatcctcaggtacatatcaagaatgtcaaagaagacagtaccgcagatgactcaaaagacagtgttgctcagggaacaactaatgttcattcctcagaacatgctggacgtaatggcagaaatgcagctgatcccatttctggggattttaaagaaatttccagcgttaaattagtgagccgttatggagaattgaagtctgttcccactacacaatgtcttgacaatagcaaaaaaaatgaatctcccttttggaagctttatgagtcagtgaagaaagagttggatgtaaaatcacaaaaagaaaatgtcctacagtattgtagaaaatctggattacaaactgattacgcaacagagaaagaaagtgctgatggtttacagggggagacccaactgttggtctcgcgtaagtcaagaccaaaatctggtgggagcggccacgctgtggcagagcctgcttcacctgaacaagagcttgaccagaacaaggggaagggaagagacgtggagtctgttcagactcccagcaaggctgtgggcgccagctttcctctctatgagccggctaaaatgaagacccctgtacaatattcacagcaacaaaattctccacaaaaacataagaacaaagacctgtatactactggtagaagagaatctgtgaatctgggtaaaagtgaaggcttcaaggctggtgataaaactcttactcccaggaagctttcaactagaaatcgaacaccagctaaagttgaagatgcagctgactctgccactaagccagaaaatctctcttccaaaaccagaggaagtattcctacagatgtggaagttctgcctacggaaactgaaattcacaatgagccatttttaactctgtggctcactcaagttgagaggaagatccaaaaggattccctcagcaagcctgagaaattgggcactacagctggacagatgtgctctgggttacctggtcttagttcagttgatatcaacaactttggtgattccattaatgagagtgagggaatacctttgaaaagaaggcgtgtgtcctttggtgggcacctaagacctgaactatttgatgaaaacttgcctcctaatacgcctctcaaaaggggagaagccccaaccaaaagaaagtctctggtaatgcacactccacctgtcctgaagaaaatcatcaaggaacagcctcaaccatcaggaaaacaagagtcaggttcagaaatccatgtggaagtgaaggcacaaagcttggttataagccctccagctcctagtcctaggaaaactccagttgccagtgatcaacgccgtaggtcctgcaaaacagcccctgcttccagcagcaaatctcagacagaggttcctaagagaggaggagaaagagtggcaacctgccttcaaagagtgtctatcagccgaagtcaacatgatattttacagatgatatgttccaaaagaagaagtggtgcttcggaagcaaatctgattgttgcaaaatcatgggcagatgtagtaaaacttggtgcaaaacaaacacaaactaaagtcataaaacatggtcctcaaaggtcaatgaacaaaaggcaaagaagacctgctactccaaagaagcctgtgggcgaagttcacagtcaatttagtacaggccacgcaaactctccttgtaccataataatagggaaagctcatactgaaaaagtacatgtgcctgctcgaccctacagagtgctcaacaacttcatttccaaccaaaaaatggactttaaggaagatctttcaggaatagctgaaatgttcaagaccccagtgaaggagcaaccgcagttgacaagcacatgtcacatcgctatttcaaattcagagaatttgcttggaaaacagtttcaaggaactgattcaggagaagaacctctgctccccacctcagagagttttggaggaaatgtgttcttcagtgcacagaatgcagcaaaacagccatctgataaatgctctgcaagccctcccttaagacggcagtgtattagagaaaatggaaacgtagcaaaaacgcccaggaacacctacaaaatgacttctctggagacaaaaacttcagatactgagacagagccttcaaaaacagtatccactgcaaacaggtcaggaaggtctacagagttcaggaatatacagaagctacctgtggaaagtaagagtgaagaaacaaatacagaaattgttgagtgcatcctaaaaagaggtcagaaggcaacactactacaacaaaggagagaaggagagatgaaggaaatagaaagaccttttgagacatataaggaaaatattgaattaaaagaaaacgatgaaaagatgaaagcaatgaagagatcaagaacttgggggcagaaatgtgcaccaatgtctgacctgacagacctcaagagcttgcctgatacagaactcatgaaagacacggcacgtggccagaatctcctccaaacccaagatcatgccaaggcaccaaagagtgagaaaggcaaaatcactaaaatgccctgccagtcattacaaccagaaccaataaacaccccaacacacacaaaacaacagttgaaggcatccctggggaaagtaggtgtgaaagaagagctcctagcagtcggcaagttcacacggacgtcaggggagaccacgcacacgcacagagagccagcaggagatggcaagagcatcagaacgtttaaggagtctccaaagcagatcctggacccagcagcccgtgtaactggaatgaagaagtggccaagaacgcctaaggaagaggcccagtcactagaagacctggctggcttcaaagagctcttccagacaccaggtccctctgaggaatcaatgactgatgagaaaactaccaaaatagcctgcaaatctccaccaccagaatcagtggacactccaacaagcacaaagcaatggcctaagagaagtctcaggaaagcagatgtagaggaagaattcttagcactcaggaaactaacaccatcagcagggaaagccatgcttacgcccaaaccagcaggaggtgatgagaaagacattaaagcatttatgggaactccagtgcagaaactggacctggcaggaactttacctggcagcaaaagacagctacagactcctaaggaaaaggcccaggctctagaagacctggctggctttaaagagctcttccagactcctggtcacaccgaggaattagtggctgctggtaaaaccactaaaataccctgcgactctccacagtcagacccagtggacaccccaacaagcacaaagcaacgacccaagagaagtatcaggaaagcagatgtagagggagaactcttagcgtgcaggaatctaatgccatcagcaggcaaagccatgcacacgcctaaaccatcagtaggtgaagagaaagacatcatcatatttgtgggaactccagtgcagaaactggacctgacagagaacttaaccggcagcaagagacggccacaaactcctaaggaagaggcccaggctctggaagacctgactggctttaaagagctcttccagacccctggtcatactgaagaagcagtggctgctggcaaaactactaaaatgccctgcgaatcttctccaccagaatcagcagacaccccaacaagcacaagaaggcagcccaagacacctttggagaaaagggacgtacagaaggagctctcagccctgaagaagctcacacagacatcaggggaaaccacacacacagataaagtaccaggaggtgaggataaaagcatcaacgcgtttagggaaactgcaaaacagaaactggacccagcagcaagtgtaactggtagcaagaggcacccaaaaactaaggaaaaggcccaacccctagaagacctggctggcttgaaagagctcttccagacaccagtatgcactgacaagcccacgactcacgagaaaactaccaaaatagcctgcagatcacaaccagacccagtggacacaccaacaagctccaagccacagtccaagagaagtctcaggaaagtggacgtagaagaagaattcttcgcactcaggaaacgaacaccatcagcaggcaaagccatgcacacacccaaaccagcagtaagtggtgagaaaaacatctacgcatttatgggaactccagtgcagaaactggacctgacagagaacttaactggcagcaagagacggctacaaactcctaaggaaaaggcccaggctctagaagacctggctggctttaaagagctcttccagacacgaggtcacactgaggaatcaatgactaacgataaaactgccaaagtagcctgcaaatcttcacaaccagacccagacaaaaacccagcaagctccaagcgacggctcaagacatccctggggaaagtgggcgtgaaagaagagctcctagcagttggcaagctcacacagacatcaggagagactacacacacacacacagagccaacaggagatggtaagagcatgaaagcatttatggagtctccaaagcagatcttagactcagcagcaagtctaactggcagcaagaggcagctgagaactcctaagggaaagtctgaagtccctgaagacctggccggcttcatcgagctcttccagacaccaagtcacactaaggaatcaatgactaacgaaaaaactaccaaagtatcctacagagcttcacagccagacctagtggacaccccaacaagctccaagccacagcccaagagaagtctcaggaaagcagacactgaagaagaatttttagcatttaggaaacaaacgccatcagcaggcaaagccatgcacacacccaaaccagcagtaggtgaagagaaagacatcaacacgtttttgggaactccagtgcagaaactggaccagccaggaaatttacctggcagcaatagacggctacaaactcgtaaggaaaaggcccaggctctagaagaactgactggcttcagagagcttttccagacaccatgcactgataaccccacgactgatgagaaaactaccaaaaaaatactctgcaaatctccgcaatcagacccagcggacaccccaacaaacacaaagcaacggcccaagagaagcctcaagaaagcagacgtagaggaagaatttttagcattcaggaaactaacaccatcagcaggcaaagccatgcacacgcctaaagcagcagtaggtgaagagaaagacatcaacacatttgtggggactccagtggagaaactggacctgctaggaaatttacctggcagcaagagacggccacaaactcctaaagaaaaggccaaggctctagaagatctggctggcttcaaagagctcttccagacaccaggtcacactgaggaatcaatgaccgatgacaaaatcacagaagtatcctgcaaatctccacaaccagacccagtcaaaaccccaacaagctccaagcaacgactcaagatatccttggggaaagtaggtgtgaaagaagaggtcctaccagtcggcaagctcacacagacgtcagggaagaccacacagacacacagagagacagcaggagatggaaagagcatcaaagcgtttaaggaatctgcaaagcagatgctggacccagcaaactatggaactgggatggagaggtggccaagaacacctaaggaagaggcccaatcactagaagacctggccggcttcaaagagctcttccagacaccagaccacactgaggaatcaacaactgatgacaaaactaccaaaatagcctgcaaatctccaccaccagaatcaatggacactccaacaagcacaaggaggcggcccaaaacacctttggggaaaagggatatagtggaagagctctcagccctgaagcagctcacacagaccacacacacagacaaagtaccaggagatgaggataaaggcatcaacgtgttcagggaaactgcaaaacagaaactggacccagcagcaagtgtaactggtagcaagaggcagccaagaactcctaagggaaaagcccaacccctagaagacttggctggcttgaaagagctcttccagacaccaatatgcactgacaagcccacgactcatgagaaaactaccaaaatagcctgcagatctccacaaccagacccagtgggtaccccaacaatcttcaagccacagtccaagagaagtctcaggaaagcagacgtagaggaagaatccttagcactcaggaaacgaacaccatcagtagggaaagctatggacacacccaaaccagcaggaggtgatgagaaagacatgaaagcatttatgggaactccagtgcagaaattggacctgccaggaaatttacctggcagcaaaagatggccacaaactcctaaggaaaaggcccaggctctagaagacctggctggcttcaaagagctcttccagacaccaggcactgacaagcccacgactgatgagaaaactaccaaaatagcctgcaaatctccacaaccagacccagtggacaccccagcaagcacaaagcaacggcccaagagaaacctcaggaaagcagacgtagaggaagaatttttagcactcaggaaacgaacaccatcagcaggcaaagccatggacacaccaaaaccagcagtaagtgatgagaaaaatatcaacacatttgtggaaactccagtgcagaaactggacctgctaggaaatttacctggcagcaagagacagccacagactcctaaggaaaaggctgaggctctagaggacctggttggcttcaaagaactcttccagacaccaggtcacactgaggaatcaatgactgatgacaaaatcacagaagtatcctgtaaatctccacagccagagtcattcaaaacctcaagaagctccaagcaaaggctcaagatacccctggtgaaagtggacatgaaagaagagcccctagcagtcagcaagctcacacggacatcaggggagactacgcaaacacacacagagccaacaggagatagtaagagcatcaaagcgtttaaggagtctccaaagcagatcctggacccagcagcaagtgtaactggtagcaggaggcagctgagaactcgtaaggaaaaggcccgtgctctagaagacctggttgacttcaaagagctcttctcagcaccaggtcacactgaagagtcaatgactattgacaaaaacacaaaaattccctgcaaatctcccccaccagaactaacagacactgccacgagcacaaagagatgccccaagacacgtcccaggaaagaagtaaaagaggagctctcagcagttgagaggctcacgcaaacatcagggcaaagcacacacacacacaaagaaccagcaagcggtgatgagggcatcaaagtattgaagcaacgtgcaaagaagaaaccaaacccagtagaagaggaacccagcaggagaaggccaagagcacctaaggaaaaggcccaacccctggaagacctggccggcttcacagagctctctgaaacatcaggtcacactcaggaatcactgactgctggcaaagccactaaaataccctgcgaatctcccccactagaagtggtagacaccacagcaagcacaaagaggcatctcaggacacgtgtgcagaaggtacaagtaaaagaagagccttcagcagtcaagttcacacaaacatcaggggaaaccacggatgcagacaaagaaccagcaggtgaagataaaggcatcaaagcattgaaggaatctgcaaaacagacaccggctccagcagcaagtgtaactggcagcaggagacggccaagagcacccagggaaagtgcccaagccatagaagacctagctggcttcaaagacccagcagcaggtcacactgaagaatcaatgactgatgacaaaaccactaaaataccctgcaaatcatcaccagaactagaagacaccgcaacaagctcaaagagacggcccaggacacgtgcccagaaagtagaagtgaaggaggagctgttagcagttggcaagctcacacaaacctcaggggagaccacgcacaccgacaaagagccggtaggtgagggcaaaggcacgaaagcatttaagcaacctgcaaagcggaagctggacgcagaagatgtaattggcagcaggagacagccaagagcacctaaggaaaaggcccaacccctggaagatctggccagcttccaagagctctctcaaacaccaggccacactgaggaactggcaaatggtgctgctgatagctttacaagcgctccaaagcaaacacctgacagtggaaaacctctaaaaatatccagaagagttcttcgggcccctaaagtagaacccgtgggagacgtggtaagcaccagagaccctgtaaaatcacaaagcaaaagcaacacttccctgcccccactgcccttcaagaggggaggtggcaaagatggaagcgtcacgggaaccaagaggctgcgctgcatgccagcaccagaggaaattgtggaggagctgccagccagcaagaagcagagggttgctcccagggcaagaggcaaatcatccgaacccgtggtcatcatgaagagaagtttgaggacttctgcaaaaagaattgaacctgcggaagagctgaacagcaacgacatgaaaaccaacaaagaggaacacaaattacaagactcggtccctgaaaataagggaatatccctgcgctccagacgccaaaataagactgaggcagaacagcaaataactgaggtctttgtattagcagaaagaatagaaataaacagaaatgaaaagaagcccatgaagacctccccagagatggacattcagaatccagatgatggagcccggaaacccatacctagagacaaagtcactgagaacaaaaggtgcttgaggtctgctagacagaatgagagctcccagcctaaggtggcagaggagagcggagggcagaagagtgcgaaggttctcatgcagaatcagaaagggaaaggagaagcaggaaattcagactccatgtgcctgagatcaagaaagacaaaaagccagcctgcagcaagcactttggagagcaaatctgtgcagagagtaacgcggagtgtcaagaggtgtgcagaaaatccaaagaaggctgaggacaatgtgtgtgtcaagaaaataagaaccagaagtcatagggacagtgaagatatttgacagaaaaatcgaactgggaaaaatataataaagttagttttgtgataagttctagtgcagtttttgtcataaattacaagtgaattctgtaagtaaggctgtcagtctgcttaagggaagaaaactttggatttgctgggtctgaatcggcttcataaactccactgggagcactgctgggctcctggactgagaatagttgaacaccgggggctttgtgaaggagtctgggccaaggtttgccctcagctttgcagaatgaagccttgaggtctgtcaccacccacagccaccctacagcagccttaactgtgacacttgccacactgtgtcgtcgtttgtttgcctatgtcctccagggcacggtggcaggaacaactatcctcgtctgtcccaacactgagcaggcactcggtaaacacgaatgaatggatgagcgcacggatgaatggagcttacaagatctgtctttccaatggccgggggcatttggtccccaaattaaggctattggacatctgcacaggacagtcctatttttgatgtcctttcctttctgaaaataaagttttgtgctttggagaatgactcgtgagcacatctttagggaccaagagtgactttctgtaaggagtgactcgtggcttgccttggtctcttgggaatacttttctaactagggttgctctcacctgagacattctccacccgcggaatctcagggtcccaggctgtgggccatcacgacctcaaactggctcctaatctccagctttcctgtcattgaaagcttcggaagtttactggctctgctcccgcctgttttctttctgactctatctggcagcccgatgccacccagtacaggaagtgacaccagtactctgtaaagcatcatcatccttggagagactgagcactcagcaccttcagccacgatttcaggatcgcttccttgtgagccgctgcctccgaaatctcctttgaagcccagacatctttctccagcttcagacttgtagatataactcgttcatcttcatttactttccactttgccccctgtcctctctgtgttccccaaatcagagaatagcccgccatcccccaggtcacctgtctggattcctccccattcacccaccttgccaggtgcaggtgaggatggtgcaccagacagggtagctgtcccccaaaatgtgccctgtgcgggcagtgccctgtctccacgtttgtttccccagtgtctggcggggagccaggtgacatcataaatacttgctgaatgaatgcagaaatcagcggtactgacttgtactatattggctgccatgatagggttctcacagcgtcatccatgatcgtaagggagaatgacattctgcttgagggagggaatagaaaggggcagggaggggacatctgagggcttcacagggctgcaaagggtacagggattgcaccagggcagaacaggggagggtgttcaaggaagagtggctcttagcagaggcactttggaaggtgtgaggcataaatgcttccttctacgtaggccaacctcaaaactttcagtaggaatgttgctatgatcaagttgttctaacactttagacttagtagtaattatgaacctcacatagaaaaatttcatccagccatatgcctgtggagtggaatattctgtttagtagaaaaatcctttagagttcagctctaaccagaaatcttgctgaagtatgtcagcaccttttctcaccctggtaagtacagtatttcaagagcacgctaagggtggttttcattttacagggctgttgatgatgggttaaaaatgttcatttaagggctacccccgtgtttaatagatgaacaccacttctacacaaccctccttggtactgggggagggagagatctgacaaatactgcccattcccctaggctgactggatttgagaacaaatacccacccatttccaccatggtatggtaacttctctgagcttcagtttccaagtgaatttccatgtaataggacattcccattaaatacaagctgtttttactttttcgcctcccagggcctgtgggatctggtcccccagcctctcttgggctttcttacactaactctgtacctaccatctcctgcctcccttaggcaggcacctccaaccaccacacactccctgctgttttccctgcctggaactttccctcctgccccaccaagatcatttcatccagtcctgagctcagcttaagggaggcttcttgcctgtgggttccctcacccccatgcctgtcctccaggctggggcaggttcttagtttgcctggaattgttctgtacctctttgtagcacgtagtgttgtggaaactaagccactaattgagtttctggctcccctcctggggttgtaagttttgttcattcatgagggccgactgcatttcctggttactctatcccagtgaccagccacaggagatgtccaataaagtatgtgatgaaatggtctt

SEQ ID NO: 128174 - DNA, 9771 bp, Artificial Sequence
  derived and/or modified sequence
atgtggcccaccagaagactggtgaccatcaagagaagcggcgtggacggcccccacttccccctgagcctgagcacctgcctgttcggcagaggcatcgagtgcgacatcagaatccagctgcccgtggtgagcaagcagcactgcaagatcgagatccacgagcaggaggccatcctgcacaacttcagcagcaccaaccccacccaggtgaacggcagcgtgatcgacgagcccgtgagactgaagcacggcgacgtgatcaccatcatcgacagaagcttcagatacgagaacgagagcctgcagaacggcagaaagagcaccgagttccccagaaagatcagagagcaggagcccgccagaagagtgagcagaagcagcttcagcagcgaccccgacgagaaggcccaggacagcaaggcctacagcaagatcaccgagggcaaggtgagcggcaacccccaggtgcacatcaagaacgtgaaggaggacagcaccgccgacgacagcaaggacagcgtggcccagggcaccaccaacgtgcacagcagcgagcacgccggcagaaacggcagaaacgccgccgaccccatcagcggcgacttcaaggagatcagcagcgtgaagctggtgagcagatacggcgagctgaagagcgtgcccaccacccagtgcctggacaacagcaagaagaacgagagccccttctggaagctgtacgagagcgtgaagaaggagctggacgtgaagagccagaaggagaacgtgctgcagtactgcagaaagagcggcctgcagaccgactacgccaccgagaaggagagcgccgacggcctgcagggcgagacccagctgctggtgagcagaaagagcagacccaagagcggcggcagcggccacgccgtggccgagcccgccagccccgagcaggagctggaccagaacaagggcaagggcagagacgtggagagcgtgcagacccccagcaaggccgtgggcgccagcttccccctgtacgagcccgccaagatgaagacccccgtgcagtacagccagcagcagaacagcccccagaagcacaagaacaaggacctgtacaccaccggcagaagagagagcgtgaacctgggcaagagcgagggcttcaaggccggcgacaagaccctgacccccagaaagctgagcaccagaaacagaacccccgccaaggtggaggacgccgccgacagcgccaccaagcccgagaacctgagcagcaagaccagaggcagcatccccaccgacgtggaggtgctgcccaccgagaccgagatccacaacgagcccttcctgaccctgtggctgacccaggtggagagaaagatccagaaggacagcctgagcaagcccgagaagctgggcaccaccgccggccagatgtgcagcggcctgcccggcctgagcagcgtggacatcaacaacttcggcgacagcatcaacgagagcgagggcatccccctgaagagaagaagagtgagcttcggcggccacctgagacccgagctgttcgacgagaacctgccccccaacacccccctgaagagaggcgaggcccccaccaagagaaagagcctggtgatgcacaccccccccgtgctgaagaagatcatcaaggagcagccccagcccagcggcaagcaggagagcggcagcgagatccacgtggaggtgaaggcccagagcctggtgatcagcccccccgcccccagccccagaaagacccccgtggccagcgaccagagaagaagaagctgcaagaccgcccccgccagcagcagcaagagccagaccgaggtgcccaagagaggcggcagaaagagcggcaacctgcccagcaagagagtgagcatcagcagaagccagcacgacatcctgcagatgatctgcagcaagagaagaagcggcgccagcgaggccaacctgatcgtggccaagagctgggccgacgtggtgaagctgggcgccaagcagacccagaccaaggtgatcaagcacggcccccagagaagcatgaacaagagacagagaagacccgccacccccaagaagcccgtgggcgaggtgcacagccagttcagcaccggccacgccaacagcccctgcaccatcatcatcggcaaggcccacaccgagaaggtgcacgtgcccgccagaccctacagagtgctgaacaacttcatcagcaaccagaagatggacttcaaggaggacctgagcggcatcgccgagatgttcaagacccccgtgaaggagcagccccagctgaccagcacctgccacatcgccatcagcaacagcgagaacctgctgggcaagcagttccagggcaccgacagcggcgaggagcccctgctgcccaccagcgagagcttcggcggcaacgtgttcttcagcgcccagaacgccgccaagcagcccagcgacaagtgcagcgccagcccccccctgagaagacagtgcatcagagagaacggcaacgtggccaagacccccagaaacacctacaagatgaccagcctggagaccaagaccagcgacaccgagaccgagcccagcaagaccgtgagcaccgccaacagaagcggcagaagcaccgagttcagaaacatccagaagctgcccgtggagagcaagagcgaggagaccaacaccgagatcgtggagtgcatcctgaagagaggccagaaggccaccctgctgcagcagagaagagagggcgagatgaaggagatcgagagacccttcgagacctacaaggagaacatcgagctgaaggagaacgacgagaagatgaaggccatgaagagaagcagaacctggggccagaagtgcgcccccatgagcgacctgaccgacctgaagagcctgcccgacaccgagctgatgaaggacaccgccagaggccagaacctgctgcagacccaggaccacgccaaggcccccaagagcgagaagggcaagatcaccaagatgccctgccagagcctgcagcccgagcccatcaacacccccacccacaccaagcagcagctgaaggccagcctgggcaaggtgggcgtgaaggaggagctgctggccgtgggcaagttcaccagaaccagcggcgagaccacccacacccacagagagcccgccggcgacggcaagagcatcagaaccttcaaggagagccccaagcagatcctggaccccgccgccagagtgaccggcatgaagaagtggcccagaacccccaaggaggaggcccagagcctggaggacctggccggcttcaaggagctgttccagacccccggccccagcgaggagagcatgaccgacgagaagaccaccaagatcgcctgcaagagccccccccccgagagcgtggacacccccaccagcaccaagcagtggcccaagagaagcctgagaaaggccgacgtggaggaggagttcctggccctgagaaagctgacccccagcgccggcaaggccatgctgacccccaagcccgccggcggcgacgagaaggacatcaaggccttcatgggcacccccgtgcagaagctggacctggccggcaccctgcccggcagcaagagacagctgcagacccccaaggagaaggcccaggccctggaggacctggccggcttcaaggagctgttccagacccccggccacaccgaggagctggtggccgccggcaagaccaccaagatcccctgcgacagcccccagagcgaccccgtggacacccccaccagcaccaagcagagacccaagagaagcatcagaaaggccgacgtggagggcgagctgctggcctgcagaaacctgatgcccagcgccggcaaggccatgcacacccccaagcccagcgtgggcgaggagaaggacatcatcatcttcgtgggcacccccgtgcagaagctggacctgaccgagaacctgaccggcagcaagagaagaccccagacccccaaggaggaggcccaggccctggaggacctgaccggcttcaaggagctgttccagacccccggccacaccgaggaggccgtggccgccggcaagaccaccaagatgccctgcgagagcagcccccccgagagcgccgacacccccaccagcaccagaagacagcccaagacccccctggagaagagagacgtgcagaaggagctgagcgccctgaagaagctgacccagaccagcggcgagaccacccacaccgacaaggtgcccggcggcgaggacaagagcatcaacgccttcagagagaccgccaagcagaagctggaccccgccgccagcgtgaccggcagcaagagacaccccaagaccaaggagaaggcccagcccctggaggacctggccggcctgaaggagctgttccagacccccgtgtgcaccgacaagcccaccacccacgagaagaccaccaagatcgcctgcagaagccagcccgaccccgtggacacccccaccagcagcaagccccagagcaagagaagcctgagaaaggtggacgtggaggaggagttcttcgccctgagaaagagaacccccagcgccggcaaggccatgcacacccccaagcccgccgtgagcggcgagaagaacatctacgccttcatgggcacccccgtgcagaagctggacctgaccgagaacctgaccggcagcaagagaagactgcagacccccaaggagaaggcccaggccctggaggacctggccggcttcaaggagctgttccagaccagaggccacaccgaggagagcatgaccaacgacaagaccgccaaggtggcctgcaagagcagccagcccgaccccgacaagaaccccgccagcagcaagagaagactgaagaccagcctgggcaaggtgggcgtgaaggaggagctgctggccgtgggcaagctgacccagaccagcggcgagaccacccacacccacaccgagcccaccggcgacggcaagagcatgaaggccttcatggagagccccaagcagatcctggacagcgccgccagcctgaccggcagcaagagacagctgagaacccccaagggcaagagcgaggtgcccgaggacctggccggcttcatcgagctgttccagacccccagccacaccaaggagagcatgaccaacgagaagaccaccaaggtgagctacagagccagccagcccgacctggtggacacccccaccagcagcaagccccagcccaagagaagcctgagaaaggccgacaccgaggaggagttcctggccttcagaaagcagacccccagcgccggcaaggccatgcacacccccaagcccgccgtgggcgaggagaaggacatcaacaccttcctgggcacccccgtgcagaagctggaccagcccggcaacctgcccggcagcaacagaagactgcagaccagaaaggagaaggcccaggccctggaggagctgaccggcttcagagagctgttccagaccccctgcaccgacaaccccaccaccgacgagaagaccaccaagaagatcctgtgcaagagcccccagagcgaccccgccgacacccccaccaacaccaagcagagacccaagagaagcctgaagaaggccgacgtggaggaggagttcctggccttcagaaagctgacccccagcgccggcaaggccatgcacacccccaaggccgccgtgggcgaggagaaggacatcaacaccttcgtgggcacccccgtggagaagctggacctgctgggcaacctgcccggcagcaagagaagaccccagacccccaaggagaaggccaaggccctggaggacctggccggcttcaaggagctgttccagacccccggccacaccgaggagagcatgaccgacgacaagatcaccgaggtgagctgcaagagcccccagcccgaccccgtgaagacccccaccagcagcaagcagagactgaagatcagcctgggcaaggtgggcgtgaaggaggaggtgctgcccgtgggcaagctgacccagaccagcggcaagaccacccagacccacagagagaccgccggcgacggcaagagcatcaaggccttcaaggagagcgccaagcagatgctggaccccgccaactacggcaccggcatggagagatggcccagaacccccaaggaggaggcccagagcctggaggacctggccggcttcaaggagctgttccagacccccgaccacaccgaggagagcaccaccgacgacaagaccaccaagatcgcctgcaagagccccccccccgagagcatggacacccccaccagcaccagaagaagacccaagacccccctgggcaagagagacatcgtggaggagctgagcgccctgaagcagctgacccagaccacccacaccgacaaggtgcccggcgacgaggacaagggcatcaacgtgttcagagagaccgccaagcagaagctggaccccgccgccagcgtgaccggcagcaagagacagcccagaacccccaagggcaaggcccagcccctggaggacctggccggcctgaaggagctgttccagacccccatctgcaccgacaagcccaccacccacgagaagaccaccaagatcgcctgcagaagcccccagcccgaccccgtgggcacccccaccatcttcaagccccagagcaagagaagcctgagaaaggccgacgtggaggaggagagcctggccctgagaaagagaacccccagcgtgggcaaggccatggacacccccaagcccgccggcggcgacgagaaggacatgaaggccttcatgggcacccccgtgcagaagctggacctgcccggcaacctgcccggcagcaagagatggccccagacccccaaggagaaggcccaggccctggaggacctggccggcttcaaggagctgttccagacccccggcaccgacaagcccaccaccgacgagaagaccaccaagatcgcctgcaagagcccccagcccgaccccgtggacacccccgccagcaccaagcagagacccaagagaaacctgagaaaggccgacgtggaggaggagttcctggccctgagaaagagaacccccagcgccggcaaggccatggacacccccaagcccgccgtgagcgacgagaagaacatcaacaccttcgtggagacccccgtgcagaagctggacctgctgggcaacctgcccggcagcaagagacagccccagacccccaaggagaaggccgaggccctggaggacctggtgggcttcaaggagctgttccagacccccggccacaccgaggagagcatgaccgacgacaagatcaccgaggtgagctgcaagagcccccagcccgagagcttcaagaccagcagaagcagcaagcagagactgaagatccccctggtgaaggtggacatgaaggaggagcccctggccgtgagcaagctgaccagaaccagcggcgagaccacccagacccacaccgagcccaccggcgacagcaagagcatcaaggccttcaaggagagccccaagcagatcctggaccccgccgccagcgtgaccggcagcagaagacagctgagaaccagaaaggagaaggccagagccctggaggacctggtggacttcaaggagctgttcagcgcccccggccacaccgaggagagcatgaccatcgacaagaacaccaagatcccctgcaagagccccccccccgagctgaccgacaccgccaccagcaccaagagatgccccaagaccagacccagaaaggaggtgaaggaggagctgagcgccgtggagagactgacccagaccagcggccagagcacccacacccacaaggagcccgccagcggcgacgagggcatcaaggtgctgaagcagagagccaagaagaagcccaaccccgtggaggaggagcccagcagaagaagacccagagcccccaaggagaaggcccagcccctggaggacctggccggcttcaccgagctgagcgagaccagcggccacacccaggagagcctgaccgccggcaaggccaccaagatcccctgcgagagcccccccctggaggtggtggacaccaccgccagcaccaagagacacctgagaaccagagtgcagaaggtgcaggtgaaggaggagcccagcgccgtgaagttcacccagaccagcggcgagaccaccgacgccgacaaggagcccgccggcgaggacaagggcatcaaggccctgaaggagagcgccaagcagacccccgcccccgccgccagcgtgaccggcagcagaagaagacccagagcccccagagagagcgcccaggccatcgaggacctggccggcttcaaggaccccgccgccggccacaccgaggagagcatgaccgacgacaagaccaccaagatcccctgcaagagcagccccgagctggaggacaccgccaccagcagcaagagaagacccagaaccagagcccagaaggtggaggtgaaggaggagctgctggccgtgggcaagctgacccagaccagcggcgagaccacccacaccgacaaggagcccgtgggcgagggcaagggcaccaaggccttcaagcagcccgccaagagaaagctggacgccgaggacgtgatcggcagcagaagacagcccagagcccccaaggagaaggcccagcccctggaggacctggccagcttccaggagctgagccagacccccggccacaccgaggagctggccaacggcgccgccgacagcttcaccagcgcccccaagcagacccccgacagcggcaagcccctgaagatcagcagaagagtgctgagagcccccaaggtggagcccgtgggcgacgtggtgagcaccagagaccccgtgaagagccagagcaagagcaacaccagcctgccccccctgcccttcaagagaggcggcggcaaggacggcagcgtgaccggcaccaagagactgagatgcatgcccgcccccgaggagatcgtggaggagctgcccgccagcaagaagcagagagtggcccccagagccagaggcaagagcagcgagcccgtggtgatcatgaagagaagcctgagaaccagcgccaagagaatcgagcccgccgaggagctgaacagcaacgacatgaagaccaacaaggaggagcacaagctgcaggacagcgtgcccgagaacaagggcatcagcctgagaagcagaagacagaacaagaccgaggccgagcagcagatcaccgaggtgttcgtgctggccgagagaatcgagatcaacagaaacgagaagaagcccatgaagaccagccccgagatggacatccagaaccccgacgacggcgccagaaagcccatccccagagacaaggtgaccgagaacaagagatgcctgagaagcgccagacagaacgagagcagccagcccaaggtggccgaggagagcggcggccagaagagcgccaaggtgctgatgcagaaccagaagggcaagggcgaggccggcaacagcgacagcatgtgcctgagaagcagaaagaccaagagccagcccgccgccagcaccctggagagcaagagcgtgcagagagtgaccagaagcgtgaagagatgcgccgagaaccccaagaaggccgaggacaacgtgtgcgtgaagaagatcagaaccagaagccacagagacagcgaggacatctag

SEQ ID NO: 128175 - DNA, 9768 bp, Artificial Sequence
  derived and/or modified sequence
atgtggcccaccagaagactggtgaccatcaagagaagcggcgtggacggcccccacttccccctgagcctgagcacctgcctgttcggcagaggcatcgagtgcgacatcagaatccagctgcccgtggtgagcaagcagcactgcaagatcgagatccacgagcaggaggccatcctgcacaacttcagcagcaccaaccccacccaggtgaacggcagcgtgatcgacgagcccgtgagactgaagcacggcgacgtgatcaccatcatcgacagaagcttcagatacgagaacgagagcctgcagaacggcagaaagagcaccgagttccccagaaagatcagagagcaggagcccgccagaagagtgagcagaagcagcttcagcagcgaccccgacgagaaggcccaggacagcaaggcctacagcaagatcaccgagggcaaggtgagcggcaacccccaggtgcacatcaagaacgtgaaggaggacagcaccgccgacgacagcaaggacagcgtggcccagggcaccaccaacgtgcacagcagcgagcacgccggcagaaacggcagaaacgccgccgaccccatcagcggcgacttcaaggagatcagcagcgtgaagctggtgagcagatacggcgagctgaagagcgtgcccaccacccagtgcctggacaacagcaagaagaacgagagccccttctggaagctgtacgagagcgtgaagaaggagctggacgtgaagagccagaaggagaacgtgctgcagtactgcagaaagagcggcctgcagaccgactacgccaccgagaaggagagcgccgacggcctgcagggcgagacccagctgctggtgagcagaaagagcagacccaagagcggcggcagcggccacgccgtggccgagcccgccagccccgagcaggagctggaccagaacaagggcaagggcagagacgtggagagcgtgcagacccccagcaaggccgtgggcgccagcttccccctgtacgagcccgccaagatgaagacccccgtgcagtacagccagcagcagaacagcccccagaagcacaagaacaaggacctgtacaccaccggcagaagagagagcgtgaacctgggcaagagcgagggcttcaaggccggcgacaagaccctgacccccagaaagctgagcaccagaaacagaacccccgccaaggtggaggacgccgccgacagcgccaccaagcccgagaacctgagcagcaagaccagaggcagcatccccaccgacgtggaggtgctgcccaccgagaccgagatccacaacgagcccttcctgaccctgtggctgacccaggtggagagaaagatccagaaggacagcctgagcaagcccgagaagctgggcaccaccgccggccagatgtgcagcggcctgcccggcctgagcagcgtggacatcaacaacttcggcgacagcatcaacgagagcgagggcatccccctgaagagaagaagagtgagcttcggcggccacctgagacccgagctgttcgacgagaacctgccccccaacacccccctgaagagaggcgaggcccccaccaagagaaagagcctggtgatgcacaccccccccgtgctgaagaagatcatcaaggagcagccccagcccagcggcaagcaggagagcggcagcgagatccacgtggaggtgaaggcccagagcctggtgatcagcccccccgcccccagccccagaaagacccccgtggccagcgaccagagaagaagaagctgcaagaccgcccccgccagcagcagcaagagccagaccgaggtgcccaagagaggcggcgagagagtggccacctgcctgcagagagtgagcatcagcagaagccagcacgacatcctgcagatgatctgcagcaagagaagaagcggcgccagcgaggccaacctgatcgtggccaagagctgggccgacgtggtgaagctgggcgccaagcagacccagaccaaggtgatcaagcacggcccccagagaagcatgaacaagagacagagaagacccgccacccccaagaagcccgtgggcgaggtgcacagccagttcagcaccggccacgccaacagcccctgcaccatcatcatcggcaaggcccacaccgagaaggtgcacgtgcccgccagaccctacagagtgctgaacaacttcatcagcaaccagaagatggacttcaaggaggacctgagcggcatcgccgagatgttcaagacccccgtgaaggagcagccccagctgaccagcacctgccacatcgccatcagcaacagcgagaacctgctgggcaagcagttccagggcaccgacagcggcgaggagcccctgctgcccaccagcgagagcttcggcggcaacgtgttcttcagcgcccagaacgccgccaagcagcccagcgacaagtgcagcgccagcccccccctgagaagacagtgcatcagagagaacggcaacgtggccaagacccccagaaacacctacaagatgaccagcctggagaccaagaccagcgacaccgagaccgagcccagcaagaccgtgagcaccgccaacagaagcggcagaagcaccgagttcagaaacatccagaagctgcccgtggagagcaagagcgaggagaccaacaccgagatcgtggagtgcatcctgaagagaggccagaaggccaccctgctgcagcagagaagagagggcgagatgaaggagatcgagagacccttcgagacctacaaggagaacatcgagctgaaggagaacgacgagaagatgaaggccatgaagagaagcagaacctggggccagaagtgcgcccccatgagcgacctgaccgacctgaagagcctgcccgacaccgagctgatgaaggacaccgccagaggccagaacctgctgcagacccaggaccacgccaaggcccccaagagcgagaagggcaagatcaccaagatgccctgccagagcctgcagcccgagcccatcaacacccccacccacaccaagcagcagctgaaggccagcctgggcaaggtgggcgtgaaggaggagctgctggccgtgggcaagttcaccagaaccagcggcgagaccacccacacccacagagagcccgccggcgacggcaagagcatcagaaccttcaaggagagccccaagcagatcctggaccccgccgccagagtgaccggcatgaagaagtggcccagaacccccaaggaggaggcccagagcctggaggacctggccggcttcaaggagctgttccagacccccggccccagcgaggagagcatgaccgacgagaagaccaccaagatcgcctgcaagagccccccccccgagagcgtggacacccccaccagcaccaagcagtggcccaagagaagcctgagaaaggccgacgtggaggaggagttcctggccctgagaaagctgacccccagcgccggcaaggccatgctgacccccaagcccgccggcggcgacgagaaggacatcaaggccttcatgggcacccccgtgcagaagctggacctggccggcaccctgcccggcagcaagagacagctgcagacccccaaggagaaggcccaggccctggaggacctggccggcttcaaggagctgttccagacccccggccacaccgaggagctggtggccgccggcaagaccaccaagatcccctgcgacagcccccagagcgaccccgtggacacccccaccagcaccaagcagagacccaagagaagcatcagaaaggccgacgtggagggcgagctgctggcctgcagaaacctgatgcccagcgccggcaaggccatgcacacccccaagcccagcgtgggcgaggagaaggacatcatcatcttcgtgggcacccccgtgcagaagctggacctgaccgagaacctgaccggcagcaagagaagaccccagacccccaaggaggaggcccaggccctggaggacctgaccggcttcaaggagctgttccagacccccggccacaccgaggaggccgtggccgccggcaagaccaccaagatgccctgcgagagcagcccccccgagagcgccgacacccccaccagcaccagaagacagcccaagacccccctggagaagagagacgtgcagaaggagctgagcgccctgaagaagctgacccagaccagcggcgagaccacccacaccgacaaggtgcccggcggcgaggacaagagcatcaacgccttcagagagaccgccaagcagaagctggaccccgccgccagcgtgaccggcagcaagagacaccccaagaccaaggagaaggcccagcccctggaggacctggccggcctgaaggagctgttccagacccccgtgtgcaccgacaagcccaccacccacgagaagaccaccaagatcgcctgcagaagccagcccgaccccgtggacacccccaccagcagcaagccccagagcaagagaagcctgagaaaggtggacgtggaggaggagttcttcgccctgagaaagagaacccccagcgccggcaaggccatgcacacccccaagcccgccgtgagcggcgagaagaacatctacgccttcatgggcacccccgtgcagaagctggacctgaccgagaacctgaccggcagcaagagaagactgcagacccccaaggagaaggcccaggccctggaggacctggccggcttcaaggagctgttccagaccagaggccacaccgaggagagcatgaccaacgacaagaccgccaaggtggcctgcaagagcagccagcccgaccccgacaagaaccccgccagcagcaagagaagactgaagaccagcctgggcaaggtgggcgtgaaggaggagctgctggccgtgggcaagctgacccagaccagcggcgagaccacccacacccacaccgagcccaccggcgacggcaagagcatgaaggccttcatggagagccccaagcagatcctggacagcgccgccagcctgaccggcagcaagagacagctgagaacccccaagggcaagagcgaggtgcccgaggacctggccggcttcatcgagctgttccagacccccagccacaccaaggagagcatgaccaacgagaagaccaccaaggtgagctacagagccagccagcccgacctggtggacacccccaccagcagcaagccccagcccaagagaagcctgagaaaggccgacaccgaggaggagttcctggccttcagaaagcagacccccagcgccggcaaggccatgcacacccccaagcccgccgtgggcgaggagaaggacatcaacaccttcctgggcacccccgtgcagaagctggaccagcccggcaacctgcccggcagcaacagaagactgcagaccagaaaggagaaggcccaggccctggaggagctgaccggcttcagagagctgttccagaccccctgcaccgacaaccccaccaccgacgagaagaccaccaagaagatcctgtgcaagagcccccagagcgaccccgccgacacccccaccaacaccaagcagagacccaagagaagcctgaagaaggccgacgtggaggaggagttcctggccttcagaaagctgacccccagcgccggcaaggccatgcacacccccaaggccgccgtgggcgaggagaaggacatcaacaccttcgtgggcacccccgtggagaagctggacctgctgggcaacctgcccggcagcaagagaagaccccagacccccaaggagaaggccaaggccctggaggacctggccggcttcaaggagctgttccagacccccggccacaccgaggagagcatgaccgacgacaagatcaccgaggtgagctgcaagagcccccagcccgaccccgtgaagacccccaccagcagcaagcagagactgaagatcagcctgggcaaggtgggcgtgaaggaggaggtgctgcccgtgggcaagctgacccagaccagcggcaagaccacccagacccacagagagaccgccggcgacggcaagagcatcaaggccttcaaggagagcgccaagcagatgctggaccccgccaactacggcaccggcatggagagatggcccagaacccccaaggaggaggcccagagcctggaggacctggccggcttcaaggagctgttccagacccccgaccacaccgaggagagcaccaccgacgacaagaccaccaagatcgcctgcaagagccccccccccgagagcatggacacccccaccagcaccagaagaagacccaagacccccctgggcaagagagacatcgtggaggagctgagcgccctgaagcagctgacccagaccacccacaccgacaaggtgcccggcgacgaggacaagggcatcaacgtgttcagagagaccgccaagcagaagctggaccccgccgccagcgtgaccggcagcaagagacagcccagaacccccaagggcaaggcccagcccctggaggacctggccggcctgaaggagctgttccagacccccatctgcaccgacaagcccaccacccacgagaagaccaccaagatcgcctgcagaagcccccagcccgaccccgtgggcacccccaccatcttcaagccccagagcaagagaagcctgagaaaggccgacgtggaggaggagagcctggccctgagaaagagaacccccagcgtgggcaaggccatggacacccccaagcccgccggcggcgacgagaaggacatgaaggccttcatgggcacccccgtgcagaagctggacctgcccggcaacctgcccggcagcaagagatggccccagacccccaaggagaaggcccaggccctggaggacctggccggcttcaaggagctgttccagacccccggcaccgacaagcccaccaccgacgagaagaccaccaagatcgcctgcaagagcccccagcccgaccccgtggacacccccgccagcaccaagcagagacccaagagaaacctgagaaaggccgacgtggaggaggagttcctggccctgagaaagagaacccccagcgccggcaaggccatggacacccccaagcccgccgtgagcgacgagaagaacatcaacaccttcgtggagacccccgtgcagaagctggacctgctgggcaacctgcccggcagcaagagacagccccagacccccaaggagaaggccgaggccctggaggacctggtgggcttcaaggagctgttccagacccccggccacaccgaggagagcatgaccgacgacaagatcaccgaggtgagctgcaagagcccccagcccgagagcttcaagaccagcagaagcagcaagcagagactgaagatccccctggtgaaggtggacatgaaggaggagcccctggccgtgagcaagctgaccagaaccagcggcgagaccacccagacccacaccgagcccaccggcgacagcaagagcatcaaggccttcaaggagagccccaagcagatcctggaccccgccgccagcgtgaccggcagcagaagacagctgagaaccagaaaggagaaggccagagccctggaggacctggtggacttcaaggagctgttcagcgcccccggccacaccgaggagagcatgaccatcgacaagaacaccaagatcccctgcaagagccccccccccgagctgaccgacaccgccaccagcaccaagagatgccccaagaccagacccagaaaggaggtgaaggaggagctgagcgccgtggagagactgacccagaccagcggccagagcacccacacccacaaggagcccgccagcggcgacgagggcatcaaggtgctgaagcagagagccaagaagaagcccaaccccgtggaggaggagcccagcagaagaagacccagagcccccaaggagaaggcccagcccctggaggacctggccggcttcaccgagctgagcgagaccagcggccacacccaggagagcctgaccgccggcaaggccaccaagatcccctgcgagagcccccccctggaggtggtggacaccaccgccagcaccaagagacacctgagaaccagagtgcagaaggtgcaggtgaaggaggagcccagcgccgtgaagttcacccagaccagcggcgagaccaccgacgccgacaaggagcccgccggcgaggacaagggcatcaaggccctgaaggagagcgccaagcagacccccgcccccgccgccagcgtgaccggcagcagaagaagacccagagcccccagagagagcgcccaggccatcgaggacctggccggcttcaaggaccccgccgccggccacaccgaggagagcatgaccgacgacaagaccaccaagatcccctgcaagagcagccccgagctggaggacaccgccaccagcagcaagagaagacccagaaccagagcccagaaggtggaggtgaaggaggagctgctggccgtgggcaagctgacccagaccagcggcgagaccacccacaccgacaaggagcccgtgggcgagggcaagggcaccaaggccttcaagcagcccgccaagagaaagctggacgccgaggacgtgatcggcagcagaagacagcccagagcccccaaggagaaggcccagcccctggaggacctggccagcttccaggagctgagccagacccccggccacaccgaggagctggccaacggcgccgccgacagcttcaccagcgcccccaagcagacccccgacagcggcaagcccctgaagatcagcagaagagtgctgagagcccccaaggtggagcccgtgggcgacgtggtgagcaccagagaccccgtgaagagccagagcaagagcaacaccagcctgccccccctgcccttcaagagaggcggcggcaaggacggcagcgtgaccggcaccaagagactgagatgcatgcccgcccccgaggagatcgtggaggagctgcccgccagcaagaagcagagagtggcccccagagccagaggcaagagcagcgagcccgtggtgatcatgaagagaagcctgagaaccagcgccaagagaatcgagcccgccgaggagctgaacagcaacgacatgaagaccaacaaggaggagcacaagctgcaggacagcgtgcccgagaacaagggcatcagcctgagaagcagaagacagaacaagaccgaggccgagcagcagatcaccgaggtgttcgtgctggccgagagaatcgagatcaacagaaacgagaagaagcccatgaagaccagccccgagatggacatccagaaccccgacgacggcgccagaaagcccatccccagagacaaggtgaccgagaacaagagatgcctgagaagcgccagacagaacgagagcagccagcccaaggtggccgaggagagcggcggccagaagagcgccaaggtgctgatgcagaaccagaagggcaagggcgaggccggcaacagcgacagcatgtgcctgagaagcagaaagaccaagagccagcccgccgccagcaccctggagagcaagagcgtgcagagagtgaccagaagcgtgaagagatgcgccgagaaccccaagaaggccgaggacaacgtgtgcgtgaagaagatcagaaccagaagccacagagacagcgaggacatctag

SEQ ID NO: 128176 - DNA, 141 bp, Artificial Sequence
  derived and/or modified sequence
atgtggcccaccagaagactggtgaccatcaagagaagcggcgtggacggcccccacttccccctgagcctgagcacctgcctgttcggcagaagaaagtgcgtgctgcagtgcaccgagtgcagcaagaccgccatctag

SEQ ID NO: 128177 - protein, 115 aa, Artificial Sequence
  derived and/or modified sequence
MVSRKAVAALLVVHVAAMLASQTEAFVPIFTYGELQRMQEKERNKGQKKSLSVWQRSGEEGPVDPAEPIREEENEMIKLTAPLEIGMRMNSRQLEKYPATLEGLLSEMLPQHAAK

SEQ ID NO: 128178 - DNA, 348 bp, Artificial Sequence
  derived and/or modified sequence
atggtcagccggaaggcggtggccgctctgctggtggttcacgtcgcagcaatgttagccagccaaactgaggcctttgtccccatctttacatacggcgaactgcaacgcatgcaggaaaaagagcggaataaaggccagaagaagtccctaagtgtttggcagcggagcggcgaagagggacccgtggaccccgctgaaccaatccgggaagaggagaatgagatgatcaagctgacagcacccctggaaattggcatgcgtatgaacagtagacagctggaaaagtaccccgcgacactggaaggactgcttagcgaaatgcttcctcaacatgcagcaaaatag

SEQ ID NO: 128179 - DNA, 348 bp, Artificial Sequence
  derived and/or modified sequence
atggtgtccaggaaggctgtggccgccctgctggtggtgcacgtggccgccatgctggccagccagacagaggcctttgtgcccatcttcacctacggggagctgcagaggatgcaggagaaggagagaaataaaggccagaagaagagcctgtctgtgtggcagaggtctggagaggagggccctgtggaccctgctgagcccatccgggaggaggagaatgagatgatcaagctgacagcccccctggagatcggcatgaggatgaacagccggcagctggagaagtacccagccaccctggagggcctgctgtctgagatgctgccccagcacgccgccaagtag

SEQ ID NO: 128180 - DNA, 566 bp, Artificial Sequence
  derived and/or modified sequence
cggacaccagaagacaagcagagagactcctccagacccactcagaccacgtgcacgccctccaagatggtatcccgtaaggctgtggctgctctgctggtggtgcatgtagctgccatgctggcctcccagacggaagccttcgtccccatcttcacctatggcgaactccagaggatgcaggaaaaggaacggaataaagggcaaaagaaatccctgagtgtatggcagaggtctggggaggaaggtcctgtagaccctgcggagcccatcagggaagaagaaaacgaaatgatcaagctgactgctcctctggaaattggaatgaggatgaactccagacagctggaaaagtacccggccaccctggaagggctgctgagtgagatgcttccccagcatgcagccaagtgatggccacgctggggagaaggtggacagatttgggaggcccctcctgcccaagtgaggccctgggaatttacagagcctgccagctgggcttggaaggaaaacaccctttccaaagcaaattcccctccagcaaataaagcatgaaatataca

SEQ ID NO: 128181 - DNA, 348 bp, Artificial Sequence
  derived and/or modified sequence
atggtgagccggaaggccgtggccgccctgctggtggtgcacgtggccgctatgttggcgagccagacagaggcattcgtgccaatatttacgtatggcgagttacagaggatgcaggagaaggaaagaaataaggggcagaagaaatccttatccgtgtggcagaggagcggagaggagggcccagtagaccccgcagagccaatcagagaggaggaaaatgaaatgatcaagctaaccgccccactggaaatcggcatgcggatgaattctcgacagctcgagaaatacccagcaacccttgagggcctgctttcagagatgctgccacaacacgccgcaaagtag

SEQ ID NO: 128182 - DNA, 348 bp, Artificial Sequence
  derived and/or modified sequence
atggtgtcccgcaaggcggtggcagccctgttagtggtgcatgtcgcagcgatgcttgcatctcagaccgaggcctttgtgccaattttcacctatggtgaactgcagagaatgcaagagaaagagagaaataagggtcagaagaagtccctcagcgtgtggcagcgctccggagaggagggtcccgtagaccccgcagaaccaattagagaggaagagaacgagatgattaagctgactgcccctctggaaatcggcatgagaatgaactcccgccaactcgagaagtaccccgcaacactcgaagggcttctatctgaaatgctgccacaacacgccgctaagtag

SEQ ID NO: 128183 - DNA, 348 bp, Artificial Sequence
  derived and/or modified sequence
atggtttccagaaaagcagtcgctgcccttcttgtcgtgcatgtggccgctatgctggcatcccaaacggaagccttcgtgcctatttttacatatggtgaactacaaagaatgcaagagaaggaaagaaacaagggtcagaaaaagtcactgtccgtgtggcagagaagtggagaggaagggccagtggacccagccgagcccattcgcgaagaagaaaatgagatgatcaaactgacagccccacttgaaatcggaatgcggatgaactctcggcagttagaaaagtaccccgctacattagagggtcttctctcagagatgctaccacagcacgccgccaaatag

SEQ ID NO: 128184 - DNA, 348 bp, Artificial Sequence
  derived and/or modified sequence
atggtaagccgcaaagcagtggccgcgttactggtggtgcatgtggctgccatgctcgctagccagactgaggcatttgtgccaatctttacctatggcgaattgcagaggatgcaggaaaaagaacgaaacaaagggcagaaaaagagcttatccgtgtggcaaagatcgggagaagaaggccctgtggatccagcggaacctatccgggaagaagagaatgaaatgatcaaacttacagctcctttggaaattggcatgaggatgaacagcagacagcttgaaaaatatcctgccactcttgaaggcctcctaagtgagatgctcccacaacacgcagcgaagtag

SEQ ID NO: 128185 - DNA, 348 bp, Artificial Sequence
  derived and/or modified sequence
atggtgagcagaaaggccgtggccgccctgctggtggtgcacgtggccgccatgctggccagccagaccgaggccttcgtgcccatcttcacctacggcgagctgcagagaatgcaggagaaggagagaaacaagggccagaagaagagcctgagcgtgtggcagagaagcggcgaggagggccccgtggaccccgccgagcccatcagagaggaggagaacgagatgatcaagctgaccgcccccctggagatcggcatgagaatgaacagcagacagctggagaagtaccccgccaccctggagggcctgctgagcgagatgctgccccagcacgccgccaagtag

SEQ ID NO: 128186 - protein, 847 aa, Artificial Sequence
  derived and/or modified sequence
MEPLKSLFLKSPLGSWNGSGSGGGGGGGGGRPEGSPKAAGYANPVWTALFDYEPSGQDELALRKGDRVEVLSRDAAISGDEGWWAGQVGGQVGIFPSNYVSRGGGPPPCEVASFQELRLEEVIGIGGFGKVYRGSWRGELVAVKAARQDPDEDISVTAESVRQEARLFAMLAHPNIIALKAVCLEEPNLCLVMEYAAGGPLSRALAGRRVPPHVLVNWAVQIARGMHYLHCEALVPVIHRDLKSNNILLLQPIESDDMEHKTLKITDFGLAREWHKTTQMSAAGTYAWMAPEVIKASTFSKGSDVWSFGVLLWELLTGEVPYRGIDCLAVAYGVAVNKLTLPIPSTCPEPFAQLMADCWAQDPHRRPDFASILQQLEALEAQVLREMPRDSFHSMQEGWKREIQGLFDELRAKEKELLSREEELTRAAREQRSQAEQLRRREHLLAQWELEVFERELTLLLQQVDRERPHVRRRRGTFKRSKLRARDGGERISMPLDFKHRITVQASPGLDRRRNVFEVGPGDSPTFPRFRAIQLEPAEPGQAWGRQSPRRLEDSSNGERRACWAWGPSSPKPGEAQNGRRRSRMDEATWYLDSDDSSPLGSPSTPPALNGNPPRPSLEPEEPKRPVPAERGSSSGTPKLIQRALLRGTALLASLGLGRDLQPPGGPGRERGESPTTPPTPTPAPCPTEPPPSPLICFSLKTPDSPPTPAPLLLDLGIPVGQRSAKSPRREEEPRGGTVSPPPGTSRSAPGTPGTPRSPPLGLISRPRPSPLRSRIDPWSFVSAGPRPSPLPSPQPAPRRAPWTLFPDSDPFWDSPPANPFQGGPQDCRAQTKDMGAQAPWVPEAGP

SEQ ID NO: 128187 - protein, 590 aa, Artificial Sequence
  derived and/or modified sequence
MEHKTLKITDFGLAREWHKTTQMSAAGTYAWMAPEVIKASTFSKGSDVWSFGVLLWELLTGEVPYRGIDCLAVAYGVAVNKLTLPIPSTCPEPFAQLMADCWAQDPHRRPDFASILQQLEALEAQVLREMPRDSFHSMQEGWKREIQGLFDELRAKEKELLSREEELTRAAREQRSQAEQLRRREHLLAQWELEVFERELTLLLQQVDRERPHVRRRRGTFKRSKLRARDGGERISMPLDFKHRITVQASPGLDRRRNVFEVGPGDSPTFPRFRAIQLEPAEPGQAWGRQSPRRLEDSSNGERRACWAWGPSSPKPGEAQNGRRRSRMDEATWYLDSDDSSPLGSPSTPPALNGNPPRPSLEPEEPKRPVPAERGSSSGTPKLIQRALLRGTALLASLGLGRDLQPPGGPGRERGESPTTPPTPTPAPCPTEPPPSPLICFSLKTPDSPPTPAPLLLDLGIPVGQRSAKSPRREEEPRGGTVSPPPGTSRSAPGTPGTPRSPPLGLISRPRPSPLRSRIDPWSFVSAGPRPSPLPSPQPAPRRAPWTLFPDSDPFWDSPPANPFQGGPQDCRAQTKDMGAQAPWVPEAGP

SEQ ID NO: 128188 - DNA, 2544 bp, Artificial Sequence
  derived and/or modified sequence
atggaaccactcaagagccttttcctgaagtctcccctcgggtcctggaatggaagtgggtctgggggggggggggggggcggcggcggacgtcccgagggctcacctaaagctgctgggtatgctaacccagtgtggactgccctctttgattacgaaccttcaggccaggatgagctagccctgcgcaaaggggatcgtgttgaagtactttctcgcgacgcagccattagtggcgacgaaggctggtgggccgggcaagtgggaggccaggtgggaatctttcccagtaattatgtgagtcgggggggcggccctcccccatgtgaggtggcgtctttccaggagttgagactggaagaggttatcggtataggggggtttggtaaagtgtaccgtggatcatggcggggtgagctggtcgctgtgaaggccgctagacaagatccagacgaagatatctccgtaaccgctgagtccgtcagacaggaggcgcgactcttcgccatgttggcacaccccaacattatcgctctgaaggccgtttgtctcgaagagcccaacctgtgtctagtcatggagtatgcagcgggggggcctctgagtagggccctcgcaggccgaagggtgccaccacatgtcctggtgaactgggctgtccagattgcacgggggatgcactacctgcactgcgaagccctggtcccggtcatccacagggacctgaaatccaataacatcttacttctccaaccaattgaatccgatgacatggaacataagactctgaagatcaccgattttggtttggccagagagtggcataagactacccagatgagcgccgccggtacgtacgcatggatggctccagaagtgatcaaagcgtcaactttttcaaagggcagcgacgtctggagctttggggtgctcctctgggagctgttgacaggggaagtaccctaccgtggaattgactgtttagcggtcgcatacggggtggcggttaataaactgaccctcccaattccatcaacttgccctgagccgttcgctcagctgatggctgattgctgggctcaagacccgcatcgccggcctgactttgcctctattttgcaacagttggaggccttggaggcacaggttttgcgagagatgcctagagactccttccactcaatgcaagaaggttggaagagggagatccagggtctgttcgatgaactgcgggcaaaggagaaggagttgttgagcagagaggaggagcttacccgggctgcgagagaacagcgcagccaggcagaacagctccgcagacgcgaacatttgcttgcacagtgggagctggaggtctttgagcgagaactgactctgctgttgcagcaggtagacagagagagaccccacgtcagaaggcggcggggcactttcaaaaggtctaagttgcgggcccgcgatgggggtgagaggatcagtatgccactggacttcaagcatcgcataacagtgcaggccagccccggtctcgatcgccgccgcaatgtgtttgaagtcggcccgggtgacagcccgactttcccaaggtttagagcgatacagctcgaacccgcagaaccagggcaggcctgggggcgccagtctcccagacgattggaggattcaagtaatggggagcgccgagcctgttgggcttggggtccttcctctccgaaaccaggagaagcccagaatggacgccggcggtctcgtatggacgaggccacctggtatctagattctgatgattctagccccctcgggagcccctctactccaccagcactgaacggaaacccaccgcggccttctctggaacctgaggaaccgaagaggccagtgccggctgaacgtggcagcagctccggcacccccaagcttatccagagagcattgctgcgggggaccgccttgcttgcaagcctagggctgggccgggacttacaacccccaggcggtccggggagagagagaggagagtcacccacaacaccacccacacctactcccgccccgtgccccacggaacctcctccctcccctcttatatgcttttctctgaagacaccagacagtcccccgacaccagctccactgctgcttgaccttgggatccccgtggggcagaggtccgcaaaatcccctaggcgcgaggaggagccccgaggtgggactgtgtccccacctcccggaacgtcccgatctgccccagggacaccaggtacccctcggagcccgcccctcggtctcattagccggccccgcccttccccactcagaagcagaattgatccttggagttttgtgtccgccggaccaagacctagccccctgccttctcctcagcctgcgccccgccgggccccatggacactgttccccgactctgaccctttttgggattcccctcctgccaatcccttccagggaggcccacaagattgcagggcgcaaacaaaagatatgggcgctcaggccccctgggtgccagaggctggcccttag

SEQ ID NO: 128189 - DNA, 1773 bp, Artificial Sequence
  derived and/or modified sequence
atggaacataaaaccttaaagattaccgatttcggactcgcgagagagtggcataagactacccagatgtccgctgctgggacttatgcttggatggcacccgaagtaattaaggcgtccacattttctaaagggtccgacgtgtggagttttggcgtactgttatgggaacttctgactggagaagtgccctatcggggcattgattgtctcgctgttgcatacggtgtcgccgtcaataagctgacacttccaattcctagtacatgtcccgagccatttgcccaattgatggccgattgctgggctcaggaccctcaccgcagacctgatttcgccagtatactccagcagctggaagctctcgaagctcaagtgctacgggagatgccaagagattcctttcattcaatgcaggagggttggaagcgggagattcagggactcttcgacgaacttagggccaaggaaaaagagctgttgtccagagaagaggagctgaccagagccgccagggaacaacgtagccaggccgagcaactgagacgaagggaacatctcctggctcagtgggagttggaggtctttgagcgggaactgacactgttgctccagcaagtagaccgtgagcgcccgcatgtacgtaggcggaggggaaccttcaaacggagcaagctacgtgccagagacgggggggagcgtatatctatgcccctcgatttcaaacaccgaataactgtgcaggccagtccaggtttagatcgtagaaggaacgtttttgaggtggggccaggcgactcacctactttcccccgtttcagagcgatccagctcgagccagcagagccaggacaggcttgggggcggcagagccctcgcaggctcgaggattcgtcaaacggcgaaagacgggcctgttgggcttggggcccctcttcccccaagccaggggaagctcagaatgggaggagaaggtcccgcatggacgaggccacatggtatctggactccgatgattcatctcccctcggctcccccagtactcccccagcactgaacggcaaccctcccaggccctcactcgagccagaagaaccaaagcgcccggtgccggccgagcgcgggtcgagcagcggtaccccaaaactgatccagcgagctttgctgcgggggactgctctgttagcttcgttaggactgggacgtgatcttcaaccccctggagggcccggcagggaaagaggcgaatcacccacaactcccccgacgcctaccccagccccctgcccaacagaaccccccccctcccctctgatttgcttttcgctcaagacccccgacagccctccgacccctgcacccttactcctggacctgggaataccggtgggccagcgctcggcaaagtcacccagacgggaggaggaacccaggggaggaacggtgagcccccctcccggcacctcccgctctgcccctggcacacctggaactccccggtccccccctctcgggttgatctcgcgtcctcgccccagcccactcaggtcccggatcgatccctggagtttcgtctctgctggcccgaggcccagcccgctgccttccccccagccagccccacgccgggccccatggactttgttccccgatagcgaccccttctgggattcccccccagccaaccccttccagggtgggcctcaggattgtcgcgcccagaccaaggatatgggagcccaggccccatgggtcccggaggccggaccatag

SEQ ID NO: 128190 - DNA, 2544 bp, Artificial Sequence
  derived and/or modified sequence
atggagcccctgaagagcctcttcctgaagagccccctgggctcctggaatggaagtggcagcggcggcggcggcggcggcggcggcggccggcctgagggcagccccaaggctgctggctacgccaaccctgtgtggacagccctgtttgattatgagcccagcggccaggatgagctggccctgaggaagggggacagagtggaggtgctgagcagagatgctgccatctctggagatgagggctggtgggccggccaggtgggcggccaggtgggcatcttccccagcaactacgtgtccagaggaggcggccccccaccctgtgaggtggccagcttccaggagctgcggctggaggaggtgattggaattggaggctttgggaaggtgtaccggggctcctggagaggagagctggtggccgtgaaggccgcccggcaggaccctgatgaggacatctctgtgacagctgagagcgtgcggcaggaggcccggctgtttgccatgctggcccaccccaacatcatcgccctgaaggctgtgtgcctggaggagcccaacctgtgcctggtgatggagtatgctgctgggggccccctgagccgggccctggccggccggcgggtgccccctcatgtgctggtgaactgggccgtgcagatcgcccggggcatgcactacctgcactgtgaggccctggtgcctgtgatccaccgggacctgaagagcaacaacatcctgctgctgcagcccattgaaagtgatgacatggagcacaagaccctgaagatcacagactttggcctggcccgggagtggcacaagaccacccagatgtctgctgctggcacctacgcctggatggcccctgaggtgatcaaggccagcaccttcagcaaaggaagtgatgtgtggagctttggagtgctgctgtgggagctgctgactggagaggtgccctaccggggcatcgactgcctggccgtggcctacggcgtggccgtgaacaagctgaccctgcccatccccagcacctgcccagagccctttgcccagctgatggctgactgctgggcccaggacccccacagaagaccagactttgccagcatcctgcagcagctggaggccctggaggcccaggtgctgcgggagatgccccgggacagcttccacagcatgcaggagggctggaagcgggagatccagggcctgtttgatgagctgcgggccaaggagaaggagctgctgagccgggaggaggagctgaccagggctgcccgggagcagaggagccaggccgagcagctgcggcggcgggagcacctgctggcccagtgggagctggaggtgtttgagcgggagctgaccctgctgctgcagcaggtggaccgggagcggccccacgtgagaagaagaagaggcaccttcaagaggagcaagctgcgggccagagatggaggagagcgcatctccatgcccctggacttcaagcaccgcatcaccgtgcaggccagccctggcctggacagaagaagaaatgtgtttgaggtgggccctggggacagccccaccttcccccgcttccgggccatccagctggagcctgctgagcccggccaggcctggggccggcagagcccccggcggctggaggacagcagcaatggagagcggcgggcctgctgggcctggggccccagcagccccaagccaggagaggcccagaatggaagaagaagaagcaggatggatgaggccacctggtacctggacagtgatgacagcagccccctgggcagccccagcaccccaccagccctgaatggaaatccaccccggcccagcctggagcctgaggagcccaagaggcctgtgcctgctgagcggggcagcagcagcggcacccccaagctgatccagagggccctgctgcggggcacagccctgctggccagcctgggcctgggccgggacctgcagcccccaggcggccctggccgggagcggggggagagccccaccaccccacccacccccaccccagccccctgccccacagagcccccacccagccccctcatctgcttcagcctgaagaccccagacagcccccccaccccagcccccctgctgctggacctgggcatccctgtgggccagaggtctgccaagagcccccggcgggaggaggagccccggggcggcaccgtgtccccacctcctggcaccagccgcagcgcccctggcaccccaggcacccccaggagcccccccctgggcctcatcagccggccccggcccagccccctgcggagcagaattgacccctggagctttgtgtctgctggcccccggcccagccccctgcccagcccccagcctgccccccggcgggccccctggaccctcttcccagacagcgaccccttctgggacagccccccagccaaccccttccagggcggcccccaggactgccgggcccagaccaaggacatgggcgcccaggccccctgggtgcctgaggccggcccctag

SEQ ID NO: 128191 - DNA, 1773 bp, Artificial Sequence
  derived and/or modified sequence
atggagcacaagaccctgaagatcacagactttggcctggcccgggagtggcacaagaccacccagatgtctgctgctggcacctacgcctggatggcccctgaggtgatcaaggccagcaccttcagcaagggcagtgatgtgtggagctttggagtgctgctgtgggagctgctgaccggggaggtgccctaccggggcatcgactgcctggccgtggcctatggagtggccgtgaacaagctgaccctgcccatccccagcacctgcccagagccctttgcccagctgatggctgactgctgggcccaggacccccaccggcggccagactttgccagcatcctgcagcagctggaggccctggaggcccaggtgctgcgggagatgccccgggacagcttccacagcatgcaggagggctggaagcgggagatccagggcctgtttgatgagctgcgggccaaggagaaggagctgctgagccgggaggaggagctgacccgggccgcccgggagcagaggagccaggccgagcagctgcggcggcgggagcacctgctggcccagtgggagctggaggtgtttgagcgggagctgaccctgctgctgcagcaggtggaccgggagcggccccacgtgagaagaagaagaggcaccttcaagaggagcaagctgcgggccagagatggaggagagcgcatctccatgcccctggacttcaagcaccgcatcaccgtgcaggccagccctggcctggacagaagaagaaatgtgtttgaggtgggccctggggacagccccaccttcccccgcttccgggccatccagctggagcctgctgagcccggccaggcctggggccggcagagcccccggcggctggaggacagcagcaatggagagcggcgggcctgctgggcctggggccccagcagccccaagccaggagaggcccagaatggaagaagaagaagcaggatggatgaggccacctggtacctggacagtgatgacagcagccccctgggcagccccagcaccccaccagccctgaatggaaaccccccccggcccagcctggagcctgaggagcccaagaggcctgtgcctgctgagcggggcagcagcagcggcacccccaagctgatccagagggccctgctgcggggcacagccctgctggccagcctgggcctgggccgggacctgcagcccccaggcggccctggccgggagcggggggagagccccaccaccccacccacccccaccccagccccctgccccacagagcccccacccagccccctcatctgcttcagcctgaagaccccagacagcccccccaccccagcccccctgctgctggacctgggcatccctgtgggccagaggtctgccaagagcccccggcgggaggaggagccccggggcggcaccgtgagccccccacctggcaccagccgcagcgcccctggcaccccaggcacccccaggagcccccccctgggcctcatcagccggccccggcccagccccctgcggagcagaattgacccctggagctttgtgtctgctggcccccggcccagccccctgcccagcccccagcctgccccccggcgggccccctggaccctcttcccagacagcgaccccttctgggacagccccccagccaaccccttccagggcggcccccaggactgccgggcccagaccaaggacatgggcgcccaggccccctgggtgcctgaggccggcccctag

SEQ ID NO: 128192 - DNA, 3566 bp, Artificial Sequence
  derived and/or modified sequence
gaggaggaagaagggagcggggtcggagccgtcggggccaaaggagacggggccaggaacaggcagtctcggcccaactgcggacgctccctccaccccctgcgcaaaaagacccaaccggagttgaggcgctgcccctgaaggccccaccttacacttggcgggggccggagccaggctcccaggactgctccagaaccgagggaagctcgggtccctccaagctagccatggtgaggcgccggaggccccggggccccacccccccggcctgaccacactgccctgggtgccctcctccagaagcccgagatgcggggggccgggagacaacactcctggctccccagagaggcgtgggtctggggctgagggccagggcccggatgcccaggttccgggactagggccttggcagccagcgggggtggggaccacgggcacccagagaaggtcctccacacatcccagcgccggctcccggccatggagcccttgaagagcctcttcctcaagagccctctagggtcatggaatggcagtggcagcgggggtggtgggggcggtggaggaggccggcctgaggggtctccaaaggcagcgggttatgccaacccggtgtggacagccctgttcgactacgagcccagtgggcaggatgagctggccctgaggaagggtgaccgtgtggaggtgctgtcccgggacgcagccatctcaggagacgagggctggtgggcgggccaggtgggtggccaggtgggcatcttcccgtccaactatgtgtctcggggtggcggcccgcccccctgcgaggtggccagcttccaggagctgcggctggaggaggtgatcggcattggaggctttggcaaggtgtacaggggcagctggcgaggtgagctggtggctgtgaaggcagctcgccaggaccccgatgaggacatcagtgtgacagccgagagcgttcgccaggaggcccggctcttcgccatgctggcacaccccaacatcattgccctcaaggctgtgtgcctggaggagcccaacctgtgcctggtgatggagtatgcagccggtgggcccctcagccgagctctggccgggcggcgcgtgcctccccatgtgctggtcaactgggctgtgcagattgcccgtgggatgcactacctgcactgcgaggccctggtgcccgtcatccaccgtgatctcaagtccaacaacattttgctgctgcagcccattgagagtgacgacatggagcacaagaccctgaagatcaccgactttggcctggcccgagagtggcacaaaaccacacaaatgagtgccgcgggcacctacgcctggatggctcctgaggttatcaaggcctccaccttctctaagggcagtgacgtctggagttttggggtgctgctgtgggaactgctgaccggggaggtgccataccgtggcattgactgccttgctgtggcctatggcgtagctgttaacaagctcacactgcccatcccatccacctgccccgagcccttcgcacagcttatggccgactgctgggcgcaggacccccaccgcaggcccgacttcgcctccatcctgcagcagttggaggcgctggaggcacaggtcctacgggaaatgccgcgggactccttccattccatgcaggaaggctggaagcgcgagatccagggtctcttcgacgagctgcgagccaaggaaaaggaactactgagccgcgaggaggagctgacgcgagcggcgcgcgagcagcggtcacaggcggagcagctgcggcggcgcgagcacctgctggcccagtgggagctagaggtgttcgagcgcgagctgacgctgctgctgcagcaggtggaccgcgagcgaccgcacgtgcgccgccgccgcgggacattcaagcgcagcaagctccgggcgcgcgacggcggcgagcgtatcagcatgccactcgacttcaagcaccgcatcaccgtgcaggcctcacccggccttgaccggaggagaaacgtcttcgaggtcgggcctggggattcgcccacctttccccggttccgagccatccagttggagcctgcagagccaggccaggcatggggccgccagtccccccgacgtctggaggactcaagcaatggagagcggcgagcatgctgggcttggggtcccagttcccccaagcctggggaagcccagaatgggaggagaaggtcccgcatggacgaagccacatggtacctggattcagatgactcatcccccttaggatctccttccacacccccagcactcaatggtaaccccccgcggcctagcctggagcccgaggagcccaagaggcctgtccccgcagagcgcggtagcagctctgggacgcccaagctgatccagcgggcgctgctgcgcggcaccgccctgctcgcctcgctgggccttggccgcgacctgcagccgccgggaggcccaggacgcgagcgcggggagtccccgacaacaccccccacgccaacgcccgcgccctgcccgaccgagccgcccccttccccgctcatctgcttctcgctcaagacgcccgactccccgcccactcctgcacccctgttgctggacctgggtatccctgtgggccagcggtcagccaagagcccccgacgtgaggaggagccccgcggaggcactgtctcacccccaccggggacatcacgctctgctcctggcaccccaggcaccccacgttcaccacccctgggcctcatcagccgacctcggccctcgccccttcgcagccgcattgatccctggagctttgtgtcagctgggccacggccttctcccctgccatcaccacagcctgcaccccgccgagcaccctggaccttgttcccggactcagaccccttctgggactccccacctgccaaccccttccaggggggcccccaggactgcagggcacagaccaaagacatgggtgcccaggccccgtgggtgccggaagcggggccttgagtgggccaggccactcccccgagctccagctgccttaggaggagtcacagcatacactggaacaggagctgggtcagcctctgcagctgcctcagtttccccagggaccccacccccctttgggggtcaggaacactacactgcacaggaagccttcacactggaagggggacctgcgcccccacatctgaaacctgtaggtccccccagctcacctgccctactggggcccaacactgtacccagctggttgggaggaccagagcctgtctcagggaattgcctgctggggtgatgcagggaggaggggaggtgcagggaagaggggccggcctcagctgtcaccagcacttttgaccaagtcctgctactgcggcccctgccctagggcttagagcatggacctcctgccctgggggtcatctggggccagggctctctggatgccttcctgctgccccagccagggttggagtcttagcctcgggatccagtgaagccagaagccaaataaactcaaaagctgtctccccaca

SEQ ID NO: 128193 - DNA, 2830 bp, Artificial Sequence
  derived and/or modified sequence
attctccaggcccacgagtcacaggactgaccagccagcccggcctgggcctgacctcccccagttctccccaaaaggactccccctcccaagtgggagacctggcccaggcctcccagaaaggagaagtagggaccacgggaggaaagcggaagaggtgtgagctgcccaggccactcccaagccccacagaggccagcccagggagggagctggtggccaggtccctatcagaggccagggagccctaaaggggcactgagagcttcccccagtttcggggtctctggcccattctcctctgggtgacccctgacctcccatgcctgggatctacatcagacaccagaacagcagttcgagttgggacagttgaaagcacagagaggagcttggagagaaagcagaggatggggcttagcagctggcagagccaggagcggggaggtagcagaaagaccacaagtacaaagaagtcctgaaactttggttttgctgctgcagcccattgagagtgacgacatggagcacaagaccctgaagatcaccgactttggcctggcccgagagtggcacaaaaccacacaaatgagtgccgcgggcacctacgcctggatggctcctgaggttatcaaggcctccaccttctctaagggcagtgacgtctggagttttggggtgctgctgtgggaactgctgaccggggaggtgccataccgtggcattgactgccttgctgtggcctatggcgtagctgttaacaagctcacactgcccatcccatccacctgccccgagcccttcgcacagcttatggccgactgctgggcgcaggacccccaccgcaggcccgacttcgcctccatcctgcagcagttggaggcgctggaggcacaggtcctacgggaaatgccgcgggactccttccattccatgcaggaaggctggaagcgcgagatccagggtctcttcgacgagctgcgagccaaggaaaaggaactactgagccgcgaggaggagctgacgcgagcggcgcgcgagcagcggtcacaggcggagcagctgcggcggcgcgagcacctgctggcccagtgggagctagaggtgttcgagcgcgagctgacgctgctgctgcagcaggtggaccgcgagcgaccgcacgtgcgccgccgccgcgggacattcaagcgcagcaagctccgggcgcgcgacggcggcgagcgtatcagcatgccactcgacttcaagcaccgcatcaccgtgcaggcctcacccggccttgaccggaggagaaacgtcttcgaggtcgggcctggggattcgcccacctttccccggttccgagccatccagttggagcctgcagagccaggccaggcatggggccgccagtccccccgacgtctggaggactcaagcaatggagagcggcgagcatgctgggcttggggtcccagttcccccaagcctggggaagcccagaatgggaggagaaggtcccgcatggacgaagccacatggtacctggattcagatgactcatcccccttaggatctccttccacacccccagcactcaatggtaaccccccgcggcctagcctggagcccgaggagcccaagaggcctgtccccgcagagcgcggtagcagctctgggacgcccaagctgatccagcgggcgctgctgcgcggcaccgccctgctcgcctcgctgggccttggccgcgacctgcagccgccgggaggcccaggacgcgagcgcggggagtccccgacaacaccccccacgccaacgcccgcgccctgcccgaccgagccgcccccttccccgctcatctgcttctcgctcaagacgcccgactccccgcccactcctgcacccctgttgctggacctgggtatccctgtgggccagcggtcagccaagagcccccgacgtgaggaggagccccgcggaggcactgtctcacccccaccggggacatcacgctctgctcctggcaccccaggcaccccacgttcaccacccctgggcctcatcagccgacctcggccctcgccccttcgcagccgcattgatccctggagctttgtgtcagctgggccacggccttctcccctgccatcaccacagcctgcaccccgccgagcaccctggaccttgttcccggactcagaccccttctgggactccccacctgccaaccccttccaggggggcccccaggactgcagggcacagaccaaagacatgggtgcccaggccccgtgggtgccggaagcggggccttgagtgggccaggccactcccccgagctccagctgccttaggaggagtcacagcatacactggaacaggagctgggtcagcctctgcagctgcctcagtttccccagggaccccacccccctttgggggtcaggaacactacactgcacaggaagccttcacactggaagggggacctgcgcccccacatctgaaacctgtaggtccccccagctcacctgccctactggggcccaacactgtacccagctggttgggaggaccagagcctgtctcagggaattgcctgctggggtgatgcagggaggaggggaggtgcagggaagaggggccggcctcagctgtcaccagcacttttgaccaagtcctgctactgcggcccctgccctagggcttagagcatggacctcctgccctgggggtcatctggggccagggctctctggatgccttcctgctgccccagccagggttggagtcttagcctcgggatccagtgaagccagaagccaaataaactcaaaagctgtctccccac

SEQ ID NO: 128194 - DNA, 2544 bp, Artificial Sequence
  derived and/or modified sequence
atggagcccctgaagagcctgttcctgaagagccccctgggcagctggaacggatctggaagcggcgggggaggtggagggggaggcggccgccctgagggctctcctaaagcagccggctatgccaacccagtgtggacagcgctctttgattatgaacccagtggccaggatgagctagctttgcggaagggcgatagagttgaagttctatctcgtgacgccgccattagcggagacgaggggtggtgggccggtcaggtcggcggccaggtcggcatatttccgagcaattacgtgtccagaggcggaggacctcccccatgtgaggtcgcttcctttcaggaactgcgcctcgaagaagtgattgggatcgggggcttcgggaaggtgtatcggggatcctggaggggcgagttagtcgctgtcaaagctgctcgccaggacccagacgaggacatttcagtcaccgcagagtccgtgaggcaggaggcccgtctctttgccatgctcgcacatccaaacatcatcgccttaaaggccgtgtgcctcgaggagcctaacctctgcctagttatggagtatgctgccggcggcccgctgagccgtgcactagccggccggagggtcccgccacacgtgctagtcaattgggcagtacaaattgcacggggtatgcattaccttcactgtgaagcattggttcccgtcattcatagagatctcaagtccaacaatattttactgctgcagcccatcgagtctgacgacatggagcacaaaacattgaagattacagatttcggcctggcccgagagtggcacaaaaccactcaaatgtctgctgctggtacttacgcgtggatggcccccgaggtgattaaagcaagtacctttagcaagggctcagatgtttggagcttcggcgtgctgttgtgggagctgttgactggggaggtgccctacaggggcatcgactgtctggccgtcgcttatggcgtggctgtgaacaagctaactttaccgatcccctccacttgccccgagcccttcgctcaacttatggctgattgctgggcgcaggacccccatcgtcgacccgatttcgcttctatactgcagcagctggaggccctcgaagcccaggtccttagggagatgcccagggattcctttcacagcatgcaggaaggctggaaacgtgaaatccagggtctgttcgatgagcttagagccaaagaaaaagaattgctctcccgggaagaggaattgactcgcgctgctcgcgagcagcgcagtcaggctgagcagctgcgacggcgcgagcacctcctcgcccaatgggagcttgaggtgtttgagcgggaactcaccctgctgctccaacaagtggacagagagaggccacacgtacgccggcggaggggtacttttaagcgaagtaagctacgtgcccgcgatggaggcgagcggatctccatgcctctggatttcaagcacaggatcaccgtgcaggctagcccgggcctcgaccgtcgtcggaatgtgttcgaggtggggcccggggattccccaaccttccctaggttccgcgcaattcagctcgaaccggccgaaccgggacaggcatggggtcggcagtcacccaggcggcttgaagattcatctaacggcgaaagacgggcatgctgggcatgggggcctagctctccaaagccgggcgaggcccagaacggccggaggaggagcagaatggatgaagccacgtggtatctggactcggatgactcctccccactcggctctccgtcaacccctcctgctctaaacgggaatccccctaggccgtccttggaacccgaagagccaaagaggcccgttccagcagagcggggcagctcatccggcactcctaaacttattcagagggctctactgagagggaccgcacttctcgccagcctaggacttggccgtgacttgcagcctcccggaggtcccggcagagaacgtggtgaaagtccaactaccccaccaacaccgacccctgcgccatgcccaacggagccacccccgtcaccgctgatctgcttcagcctcaaaacacctgactcacccccaactcccgctccactcctcctggacctgggcattcccgtgggccagcgatccgctaagtctcccaggagagaggaggaaccccggggaggcacagtttcacctcccccaggcactagtcggagcgcccctggaacaccaggcaccccccggtcaccacccttaggattgatctctagacccagacccagtccactccgatctcggatcgacccgtggtcttttgtgagcgctggccctcgtccctcccctctgcctagcccacaacccgctccgcgccgggctccctggactctgtttcccgacagcgacccgttctgggactccccccctgccaatcctttccagggtggaccacaggactgtcgtgcccagactaaagacatgggggcacaggccccgtgggtcccggaagccggcccttag

SEQ ID NO: 128195 - DNA, 1773 bp, Artificial Sequence
  derived and/or modified sequence
atggagcacaagaccctgaagatcaccgacttcggcctggcccgggagtggcacaagacaacacagatgtccgctgcggggacatatgcctggatggctccggaggtgatcaaagcctccacattttcaaaaggcagtgacgtgtggagttttggcgtgctgctgtgggaattgctgaccggggaggtaccttatagggggatcgactgcctggctgtggcctatggcgtggctgtgaataagctgaccttacccatcccttcgacctgtcctgagccattcgcccaacttatggccgactgctgggctcaggacccccacaggagaccggactttgcaagtatcttgcagcagttagaggccctagaggcgcaagtactgagggagatgcccagagattcctttcacagtatgcaggagggctggaaaagagaaatccagggactgttcgatgagctgagggctaaggaaaaggagctcttgtctagggaagaagagttgactagagctgcaagggagcagaggtctcaagcagaacagctcaggcgaagggagcacctgcttgctcagtgggagctcgaggtctttgagagggaactcacactgctactacagcaggttgacagggaaaggccacacgtcaggcggcggagaggcacctttaagaggtcaaaactccgtgctagggacggcggtgagagaatcagcatgccacttgatttcaagcaccggattaccgttcaagcttccccaggattggaccgcagacggaacgtattcgaagtgggtccaggtgacagccccaccttcccacgcttccgggctattcagctggaacctgccgagccaggccaggcttgggggcgccagtctcccagacgtttggaggacagcagcaatggggagcggcgggcctgttgggcctgggggccttcatctccaaagccaggcgaggcccagaatggccgcagacggtctaggatggatgaggccacttggtacttggactctgacgattcttcaccattgggttccccctctacccctcctgcgctgaacggaaatcctccaaggccgagcctggagccagaagagccaaaacgtcccgtgccagctgaaaggggcagtagcagcggtacccccaagctgatccagcgagccctgctccgaggcaccgcactgctggcaagcctgggtcttggaagggatttacaacccccaggaggcccaggccgagagcggggggagtctccaaccacaccccccacacccaccccagctccctgtcccaccgagcctccgccctcccccctgatctgttttagtttgaagactcctgactctccccctactccagcccctttacttctggatctggggatccctgtgggccagagatcagcaaaatctcctagacgagaagaggaacctcgtggtgggacagtctcccctcctcctggcaccagcagatcagctcctggtacacccgggacgcctcgttcaccgcccctgggattaatatcccgacctcggccctcccccctcagatcacgaatcgatccatggtcttttgtgtctgccgggcctcgcccctcacctcttccttctccacagccggcacctagacgggccccatggaccttgttccccgacagcgaccctttttgggactcccccccagctaatccttttcaggggggcccccaagactgcagagcacagacaaaggacatgggggctcaggcaccttgggtcccagaagcgggtccatag

SEQ ID NO: 128196 - DNA, 2544 bp, Artificial Sequence
  derived and/or modified sequence
atggaacccctgaaaagcctgtttctgaaatcacccttgggatcctggaatggctctggttctggtgggggagggggtggcggtggtgggagaccagaagggagtcctaaggctgccggatatgctaatcctgtgtggacagcgctgttcgactacgagccgtctggacaggacgaactggcattaaggaaaggagacagagtagaagttctgtcacgcgatgcggctatatcaggagacgaaggatggtgggccggtcaagtaggcggacaggttggaatcttcccatcaaactatgtttctcggggaggcggacctcccccatgtgaagtggcgagcttccaggaactgagacttgaagaggtgatcggaatcgggggatttggaaaagtttacagagggagctggaggggggagctggtcgctgtaaaagcagccagacaggacccggatgaggacatctctgttactgctgaaagcgttagacaggaggccagactctttgcaatgcttgctcaccctaatattatcgctcttaaagcagtgtgtctggaagagccgaatctgtgtctagtcatggagtatgctgcgggaggtccccttagtcgggcattggccggtagaagggtgcccccacatgtcctggtcaattgggccgtgcagattgccagaggcatgcactatcttcattgtgaagccctggtcccagtgatccacagggacctaaaatctaataatattctgctgttgcagcctatcgaatctgatgacatggaacacaaaaccctgaaaatcactgacttcgggctagctagggagtggcataagacaacccagatgagtgctgctgggacgtacgcttggatggccccagaggtaattaaggcttctactttttctaagggcagcgacgtatggtcgtttggcgttctgttgtgggagctactgactggcgaggtgccctatcgtgggatcgactgtctcgcggttgcatacggcgtggccgtaaataagcttactctgcccataccttccacctgcccagagccctttgcccagctcatggcggactgctgggcccaagaccctcaccggagaccggattttgcatccatcctgcagcaactggaggctctggaggcccaagtgctgcgagagatgccacgcgatagttttcactccatgcaggagggatggaagcgtgagatccaaggactgttcgatgagcttcgcgcaaaggagaaagaactcctctctagagaagaagaactgacacgagctgcaagagagcagagatcacaggctgaacagctgaggcggcgagagcacctgctcgcgcagtgggaattagaagtgtttgagcgggagctcacgctgctgttacagcaggttgatagggaacggcctcacgtgcggaggcgcaggggaaccttcaagaggagcaagttgagggcccgtgacggtggtgaaagaatttccatgcctctcgacttcaaacacagaattaccgtgcaggccagcccagggctcgatagacggaggaacgtttttgaggtgggtccgggtgattctcctacctttcctaggttcagagccattcagctagagccggcagagccgggacaggcctgggggagacaaagccctcgcagactcgaagattcatccaacggagaaagaagagcatgttgggcctggggtccatcttctcccaagcccggtgaggcccagaacggtcgaaggcggtcgcggatggacgaggctacgtggtacctggactccgatgactccagtccactgggctccccttccacaccgcctgccctcaacggaaatcctcctcggccttccctggagccagaagagcccaagagaccagtccctgccgaaagaggttcatcctcagggacgcctaaactgatccagagggctctgcttaggggtaccgctctgctggcctccttgggcctgggtagggacctgcagccgccaggcggtcctggtcgggaacggggagaatcacccaccactcctcctacccctaccccggctccttgtcctactgaaccccctccatcgccattgatctgcttcagtttgaaaaccccagacagcccacccacgccagctcccttgctgttggatttagggatcccggtggggcagcgtagtgcaaagtccccccgaagagaggaagaaccacgaggtgggactgtgtccccacctcctggtaccagcagatcggcaccaggcactcccggaacccctagatcccctccactgggtttgatctccaggcccaggccatctcctctccggagccgaatcgacccttggtctttcgtttctgccggacctcgtccctctcctctgccttccccacaacccgctcctaggcgtgccccatggactttattcccggattccgaccccttttgggacagccctcctgcaaacccatttcaaggaggcccacaggattgtcgggctcagaccaaggacatgggggctcaggccccatgggtaccggaagccggtccctag

SEQ ID NO: 128197 - DNA, 1773 bp, Artificial Sequence
  derived and/or modified sequence
atggaacacaagaccctaaagattacggacttcggacttgcaagggagtggcataaaaccactcagatgagcgcggctggcacctacgcctggatggccccagaagttattaaagcatcgacttttagtaagggctcagacgtgtggagtttcggcgtgcttctctgggaactcctgacaggcgaagtgccatataggggcattgactgcctcgctgtggcctatggggttgccgtgaacaaactgacccttccgattccttcgacatgccctgaaccgtttgcgcaactgatggccgattgctgggcccaagacccccaccggaggcccgatttcgccagtatcttgcagcaactagaagcattggaggcacaggtgcttagagaaatgccacgtgatagtttccattccatgcaggagggctggaaacgagagatccagggcctgtttgacgagttgcgggcaaaagagaaggaattgttgtctcgggaagaggagctgactagagccgcacgtgaacagagatcccaagcagaacagctccgtaggcgagagcacctgctggcgcagtgggaactggaagtttttgagagggagttgacgctcttactgcaacaggtggatcgcgagaggccacatgtgcgcaggagacgtgggacgttcaagcggagcaaattgcgggcacgtgatggtggcgagcggatcagtatgccccttgatttcaagcaccggatcaccgtacaggcttcgcctggactcgatcggaggagaaacgtgttcgaagttggcccaggagatagtccgactttccctcgcttcagagccatccaactggaaccagccgaacctggccaggcctggggcaggcaatctccaagacggcttgaagacagttctaatggtgaacggcgtgcctgctgggcgtggggaccctcctcccccaagcctggtgaggcacaaaacggaaggcgccgttctcggatggatgaagcaacatggtacctggatagcgatgatagttctcctctcggttcacccagcacaccccctgccttgaacggcaatccccctcgcccttccctcgaaccagaagagcctaagcgcccagtgcctgccgaacgtggctcctcttcaggcactcccaagttgatccaacgggctttgctgaggggaacagctctcctagcgtcactagggctgggcagggatcttcaacctcccggaggacccggacgggagagaggtgaatctcctacgactccgcctactcctacgcccgcaccgtgtcctacagagcctccccctagtcccttgatttgcttctccctgaagacccccgattccccgccaaccccagcccctctgctgctggacctcggaatccctgtcggccagcgttcagccaagagtccaaggcgcgaggaggaacccagaggcggaaccgtcagcccgccacccggtacctccagatcagctccagggacgcctggaacgccgaggagtcccccacttggtctgattagccgacctagaccctctcctcttagaagtagaattgatccctggtcgtttgtgagcgccggtcccaggccatcaccacttccgagccctcagcctgccccaagacgcgctccctggacgctgtttcctgacagtgatcccttttgggactcacctccagcaaatccgttccagggagggcctcaagactgccgggctcaaaccaaggacatgggtgcccaggccccatgggtccctgaggccggaccatag

SEQ ID NO: 128198 - DNA, 2544 bp, Artificial Sequence
  derived and/or modified sequence
atggagcccctgaagagcctgttcctgaagagccccctgggcagctggaacggcagcggcagcggcggcggcggcggcggcggcggcggcagacccgagggcagccccaaggccgccggctacgccaaccccgtgtggaccgccctgttcgactacgagcccagcggccaggacgagctggccctgagaaagggcgacagagtggaggtgctgagcagagacgccgccatcagcggcgacgagggctggtgggccggccaggtgggcggccaggtgggcatcttccccagcaactacgtgagcagaggcggcggcccccccccctgcgaggtggccagcttccaggagctgagactggaggaggtgatcggcatcggcggcttcggcaaggtgtacagaggcagctggagaggcgagctggtggccgtgaaggccgccagacaggaccccgacgaggacatcagcgtgaccgccgagagcgtgagacaggaggccagactgttcgccatgctggcccaccccaacatcatcgccctgaaggccgtgtgcctggaggagcccaacctgtgcctggtgatggagtacgccgccggcggccccctgagcagagccctggccggcagaagagtgcccccccacgtgctggtgaactgggccgtgcagatcgccagaggcatgcactacctgcactgcgaggccctggtgcccgtgatccacagagacctgaagagcaacaacatcctgctgctgcagcccatcgagagcgacgacatggagcacaagaccctgaagatcaccgacttcggcctggccagagagtggcacaagaccacccagatgagcgccgccggcacctacgcctggatggcccccgaggtgatcaaggccagcaccttcagcaagggcagcgacgtgtggagcttcggcgtgctgctgtgggagctgctgaccggcgaggtgccctacagaggcatcgactgcctggccgtggcctacggcgtggccgtgaacaagctgaccctgcccatccccagcacctgccccgagcccttcgcccagctgatggccgactgctgggcccaggacccccacagaagacccgacttcgccagcatcctgcagcagctggaggccctggaggcccaggtgctgagagagatgcccagagacagcttccacagcatgcaggagggctggaagagagagatccagggcctgttcgacgagctgagagccaaggagaaggagctgctgagcagagaggaggagctgaccagagccgccagagagcagagaagccaggccgagcagctgagaagaagagagcacctgctggcccagtgggagctggaggtgttcgagagagagctgaccctgctgctgcagcaggtggacagagagagaccccacgtgagaagaagaagaggcaccttcaagagaagcaagctgagagccagagacggcggcgagagaatcagcatgcccctggacttcaagcacagaatcaccgtgcaggccagccccggcctggacagaagaagaaacgtgttcgaggtgggccccggcgacagccccaccttccccagattcagagccatccagctggagcccgccgagcccggccaggcctggggcagacagagccccagaagactggaggacagcagcaacggcgagagaagagcctgctgggcctggggccccagcagccccaagcccggcgaggcccagaacggcagaagaagaagcagaatggacgaggccacctggtacctggacagcgacgacagcagccccctgggcagccccagcaccccccccgccctgaacggcaacccccccagacccagcctggagcccgaggagcccaagagacccgtgcccgccgagagaggcagcagcagcggcacccccaagctgatccagagagccctgctgagaggcaccgccctgctggccagcctgggcctgggcagagacctgcagccccccggcggccccggcagagagagaggcgagagccccaccaccccccccacccccacccccgccccctgccccaccgagcccccccccagccccctgatctgcttcagcctgaagacccccgacagcccccccacccccgcccccctgctgctggacctgggcatccccgtgggccagagaagcgccaagagccccagaagagaggaggagcccagaggcggcaccgtgagccccccccccggcaccagcagaagcgcccccggcacccccggcacccccagaagcccccccctgggcctgatcagcagacccagacccagccccctgagaagcagaatcgacccctggagcttcgtgagcgccggccccagacccagccccctgcccagcccccagcccgcccccagaagagccccctggaccctgttccccgacagcgaccccttctgggacagcccccccgccaaccccttccagggcggcccccaggactgcagagcccagaccaaggacatgggcgcccaggccccctgggtgcccgaggccggcccctag

SEQ ID NO: 128199 - DNA, 1773 bp, Artificial Sequence
  derived and/or modified sequence
atggagcacaagaccctgaagatcaccgacttcggcctggccagagagtggcacaagaccacccagatgagcgccgccggcacctacgcctggatggcccccgaggtgatcaaggccagcaccttcagcaagggcagcgacgtgtggagcttcggcgtgctgctgtgggagctgctgaccggcgaggtgccctacagaggcatcgactgcctggccgtggcctacggcgtggccgtgaacaagctgaccctgcccatccccagcacctgccccgagcccttcgcccagctgatggccgactgctgggcccaggacccccacagaagacccgacttcgccagcatcctgcagcagctggaggccctggaggcccaggtgctgagagagatgcccagagacagcttccacagcatgcaggagggctggaagagagagatccagggcctgttcgacgagctgagagccaaggagaaggagctgctgagcagagaggaggagctgaccagagccgccagagagcagagaagccaggccgagcagctgagaagaagagagcacctgctggcccagtgggagctggaggtgttcgagagagagctgaccctgctgctgcagcaggtggacagagagagaccccacgtgagaagaagaagaggcaccttcaagagaagcaagctgagagccagagacggcggcgagagaatcagcatgcccctggacttcaagcacagaatcaccgtgcaggccagccccggcctggacagaagaagaaacgtgttcgaggtgggccccggcgacagccccaccttccccagattcagagccatccagctggagcccgccgagcccggccaggcctggggcagacagagccccagaagactggaggacagcagcaacggcgagagaagagcctgctgggcctggggccccagcagccccaagcccggcgaggcccagaacggcagaagaagaagcagaatggacgaggccacctggtacctggacagcgacgacagcagccccctgggcagccccagcaccccccccgccctgaacggcaacccccccagacccagcctggagcccgaggagcccaagagacccgtgcccgccgagagaggcagcagcagcggcacccccaagctgatccagagagccctgctgagaggcaccgccctgctggccagcctgggcctgggcagagacctgcagccccccggcggccccggcagagagagaggcgagagccccaccaccccccccacccccacccccgccccctgccccaccgagcccccccccagccccctgatctgcttcagcctgaagacccccgacagcccccccacccccgcccccctgctgctggacctgggcatccccgtgggccagagaagcgccaagagccccagaagagaggaggagcccagaggcggcaccgtgagccccccccccggcaccagcagaagcgcccccggcacccccggcacccccagaagcccccccctgggcctgatcagcagacccagacccagccccctgagaagcagaatcgacccctggagcttcgtgagcgccggccccagacccagccccctgcccagcccccagcccgcccccagaagagccccctggaccctgttccccgacagcgaccccttctgggacagcccccccgccaaccccttccagggcggcccccaggactgcagagcccagaccaaggacatgggcgcccaggccccctgggtgcccgaggccggcccctag

SEQ ID NO: 128200 - protein, 1603 aa, Artificial Sequence
  derived and/or modified sequence
IKTSKRCCCGQFTNQHIPPLPSATPSKNEEESKQVETQPEKWSVAKHTQSYPTDSYGVLEFQGGGYSNKAMYIRVSYDTKPDSLLHLMVKDWQLELPKLLISVHGGLQNFEMQPKLKQVFGKGLIKAAMTTGAWIFTGGVSTGVISHVGDALKDHSSKSRGRVCAIGIAPWGIVENKEDLVGKDVTRVYQTMSNPLSKLSVLNNSHTHFILADNGTLGKYGAEVKLRRLLEKHISLQKINTRLGQGVPLVGLVVEGGPNVVSIVLEYLQEEPPIPVVICDGSGRASDILSFAHKYCEEGGIINESLREQLLVTIQKTFNYNKAQSHQLFAIIMECMKKKELVTVFRMGSEGQQDIEMAILTALLKGTNVSAPDQLSLALAWNRVDIARSQIFVFGPHWPPLGSLAPPTDSKATEKEKKPPMATTKGGRGKGKGKKKGKVKEEVEEETDPRKIELLNWVNALEQAMLDALVLDRVDFVKLLIENGVNMQHFLTIPRLEELYNTRLGPPNTLHLLVRDVKKSNLPPDYHISLIDIGLVLEYLMGGAYRCNYTRKNFRTLYNNLFGPKRPKALKLLGMEDDEPPAKGKKKKKKKKEEEIDIDVDDPAVSRFQYPFHELMVWAVLMKRQKMAVFLWQRGEESMAKALVACKLYKAMAHESSESDLVDDISQDLDNNSKDFGQLALELLDQSYKHDEQIAMKLLTYELKNWSNSTCLKLAVAAKHRDFIAHTCSQMLLTDMWMGRLRMRKNPGLKVIMGILLPPTILFLEFRTYDDFSYQTSKENEDGKEKEEENTDANADAGSRKGDEENEHKKQRSIPIGTKICEFYNAPIVKFWFYTISYLGYLLLFNYVILVRMDGWPSLQEWIVISYIVSLALEKIREILMSEPGKLSQKIKVWLQEYWNITDLVAISTFMIGAILRLQNQPYMGYGRVIYCVDIIFWYIRVLDIFGVNKYLGPYVMMIGKMMIDMLYFVVIMLVVLMSFGVARQAILHPEEKPSWKLARNIFYMPYWMIYGEVFADQIDLYAMEINPPCGENLYDEEGKRLPPCIPGAWLTPALMACYLLVANILLVNLLIAVFNNTFFEVKSISNQVWKFQRYQLIMTFHDRPVLPPPMIILSHIYIIIMRLSGRCRKKREGDQEERDRGLKLFLSDEELKRLHEFEEQCVQEHFREKEDEQQSSSDERIRVTSERVENMSMRLEEINERETFMKTSLQTVDLRLAQLEELSNRMVNALENLAGIDRSDLIQARSRASSECEATYLLRQSSINSADGYSLYRYHFNGEELLFEDTSLSTSPGTGVRKKTCSFRIKEEKDVKTHLVPECQNSLHLSLGTSTSATPDGSHLAVDDLKNAEESKLGPDIGISKEDDERQTDSKKEETISPSLNKTDVIHGQDKSDVQNTQLTVETTNIEGTISYPLEETKITRYFPDETINACKTMKSRSFVYSRGRKLVGGVNQDVEYSSITDQQLTTEWQCQVQKITRSHSTDIPYIVSEAAVQAEHKEQFADMQDEHHVAEAIPRIPRLSLTITDRNGMENLLSVKPDQTLGFPSLRSKSLHGHPRNVKSIQGKLDRSGHASSVSSLVIVSGMTAEEKKVKKEKASTETEC

SEQ ID NO: 128201 - protein, 1603 aa, Artificial Sequence
  derived and/or modified sequence
MKDSNRCCCGQFTNQHIPPLPSATPSKNEEESKQVETQPEKWSVAKHTQSYPTDSYGVLEFQGGGYSNKAMYIRVSYDTKPDSLLHLMVKDWQLELPKLLISVHGGLQNFEMQPKLKQVFGKGLIKAAMTTGAWIFTGGVSTGVISHVGDALKDHSSKSRGRVCAIGIAPWGIVENKEDLVGKDVTRVYQTMSNPLSKLSVLNNSHTHFILADNGTLGKYGAEVKLRRLLEKHISLQKINTRLGQGVPLVGLVVEGGPNVVSIVLEYLQEEPPIPVVICDGSGRASDILSFAHKYCEEGGIINESLREQLLVTIQKTFNYNKAQSHQLFAIIMECMKKKELVTVFRMGSEGQQDIEMAILTALLKGTNVSAPDQLSLALAWNRVDIARSQIFVFGPHWPPLGSLAPPTDSKATEKEKKPPMATTKGGRGKGKGKKKGKVKEEVEEETDPRKIELLNWVNALEQAMLDALVLDRVDFVKLLIENGVNMQHFLTIPRLEELYNTRLGPPNTLHLLVRDVKKSNLPPDYHISLIDIGLVLEYLMGGAYRCNYTRKNFRTLYNNLFGPKRPKALKLLGMEDDEPPAKGKKKKKKKKEEEIDIDVDDPAVSRFQYPFHELMVWAVLMKRQKMAVFLWQRGEESMAKALVACKLYKAMAHESSESDLVDDISQDLDNNSKDFGQLALELLDQSYKHDEQIAMKLLTYELKNWSNSTCLKLAVAAKHRDFIAHTCSQMLLTDMWMGRLRMRKNPGLKVIMGILLPPTILFLEFRTYDDFSYQTSKENEDGKEKEEENTDANADAGSRKGDEENEHKKQRSIPIGTKICEFYNAPIVKFWFYTISYLGYLLLFNYVILVRMDGWPSLQEWIVISYIVSLALEKIREILMSEPGKLSQKIKVWLQEYWNITDLVAISTFMIGAILRLQNQPYMGYGRVIYCVDIIFWYIRVLDIFGVNKYLGPYVMMIGKMMIDMLYFVVIMLVVLMSFGVARQAILHPEEKPSWKLARNIFYMPYWMIYGEVFADQIDLYAMEINPPCGENLYDEEGKRLPPCIPGAWLTPALMACYLLVANILLVNLLIAVFNNTFFEVKSISNQVWKFQRYQLIMTFHDRPVLPPPMIILSHIYIIIMRLSGRCRKKREGDQEERDRGLKLFLSDEELKRLHEFEEQCVQEHFREKEDEQQSSSDERIRVTSERVENMSMRLEEINERETFMKTSLQTVDLRLAQLEELSNRMVNALENLAGIDRSDLIQARSRASSECEATYLLRQSSINSADGYSLYRYHFNGEELLFEDTSLSTSPGTGVRKKTCSFRIKEEKDVKTHLVPECQNSLHLSLGTSTSATPDGSHLAVDDLKNAEESKLGPDIGISKEDDERQTDSKKEETISPSLNKTDVIHGQDKSDVQNTQLTVETTNIEGTISYPLEETKITRYFPDETINACKTMKSRSFVYSRGRKLVGGVNQDVEYSSITDQQLTTEWQCQVQKITRSHSTDIPYIVSEAAVQAEHKEQFADMQDEHHVAEAIPRIPRLSLTITDRNGMENLLSVKPDQTLGFPSLRSKSLHGHPRNVKSIQGKLDRSGHASSVSSLVIVSGMTAEEKKVKKEKASTETEC

SEQ ID NO: 128202 - protein, 1390 aa, Artificial Sequence
  derived and/or modified sequence
MKDSNRCCCGQFTNQHIPPLPSATPSKNEEESKQVETQPEKWSVAKHTQSYPTDSYGVLEFQGGGYSNKAMYIRVSYDTKPDSLLHLMVKDWQLELPKLLISVHGGLQNFEMQPKLKQVFGKGLIKAAMTTGAWIFTGGVSTGVISHVGDALKDHSSKSRGRVCAIGIAPWGIVENKEDLVGKDVTRVYQTMSNPLSKLSVLNNSHTHFILADNGTLGKYGAEVKLRRLLEKHISLQKINTRLGQGVPLVGLVVEGGPNVVSIVLEYLQEEPPIPVVICDGSGRASDILSFAHKYCEEGGIINESLREQLLVTIQKTFNYNKAQSHQLFAIIMECMKKKELVTVFRMGSEGQQDIEMAILTALLKGTNVSAPDQLSLALAWNRVDIARSQIFVFGPHWPPLGSLAPPTDSKATEKEKKPPMATTKGGRGKGKGKKKGKVKEEVEEETDPRKIELLNWVNALEQAMLDALVLDRVDFVKLLIENGVNMQHFLTIPRLEELYNTRLGPPNTLHLLVRDVKKSNLPPDYHISLIDIGLVLEYLMGGAYRCNYTRKNFRTLYNNLFGPKRPKALKLLGMEDDEPPAKGKKKKKKKKEEEIDIDVDDPAVSRFQYPFHELMVWAVLMKRQKMAVFLWQRGEESMAKALVACKLYKAMAHESSESDLVDDISQDLDNNSKDFGQLALELLDQSYKHDEQIAMKLLTYELKNWSNSTCLKLAVAAKHRDFIAHTCSQMLLTDMWMGRLRMRKNPGLKVIMGILLPPTILFLEFRTYDDFSYQTSKENEDGKEKEEENTDANADAGSRKGDEENEHKKQRSIPIGTKICEFYNAPIVKFWFYTISYLGYLLLFNYVILVRMDGWPSLQEWIVISYIVSLALEKIREILMSEPGKLSQKIKVWLQEYWNITDLVAISTFMIGAILRLQNQPYMGYGRVIYCVDIIFWYIRVLDIFGVNKYLGPYVMMIGKMMIDMLYFVVIMLVVLMSFGVARQAILHPEEKPSWKLARNIFYMPYWMIYGEVFADQIDLYAMEINPPCGENLYDEEGKRLPPCIPGAWLTPALMACYLLVANILLVNLLIAVFNNTFFEVKSISNQVWKFQRYQLIMTFHDRPVLPPPMIILSHIYIIIMRLSGRCRKKREGDQEERDRGLKLFLSDEELKRLHEFEEQCVQEHFREKEDEQQSSSDERIRVTSERVENMSMRLEEINERETFMKTSLQTVDLRLAQLEELSNRMVNALENLAGIDRSDLIQARSRASSECEATYLLRQSSINSADGYSLYRYHFNGEELLFEDTSLSTSPGTGVRKKTCSFRIKEEKDVKTHLVPECQNSLHLSLGTSTSATPDGSHLAVDDLKNAEESKLGPDIGISKEDDERQTDSKKEETISPSLNKTDVIHGQ

SEQ ID NO: 128203 - DNA, 4812 bp, Artificial Sequence
  derived and/or modified sequence
atcaagaccagcaagagatgctgctgcggccagttcaccaaccagcacatcccccccctgcccagcgccacccccagcaagaacgaggaggagagcaagcaggtggagacccagcccgagaagtggagcgtggccaagcacacccagagctaccccaccgacagctacggcgtgctggagttccagggcggcggctacagcaacaaggccatgtacatcagagtgagctacgacaccaagcccgacagcctgctgcacctgatggtgaaggactggcagctggagctgcccaagctgctgatcagcgtgcacggcggcctgcagaacttcgagatgcagcccaagctgaagcaggtgttcggcaagggcctgatcaaggccgccatgaccaccggcgcctggatcttcaccggcggcgtgagcaccggcgtgatcagccacgtgggcgacgccctgaaggaccacagcagcaagagcagaggcagagtgtgcgccatcggcatcgccccctggggcatcgtggagaacaaggaggacctggtgggcaaggacgtgaccagagtgtaccagaccatgagcaaccccctgagcaagctgagcgtgctgaacaacagccacacccacttcatcctggccgacaacggcaccctgggcaagtacggcgccgaggtgaagctgagaagactgctggagaagcacatcagcctgcagaagatcaacaccagactgggccagggcgtgcccctggtgggcctggtggtggagggcggccccaacgtggtgagcatcgtgctggagtacctgcaggaggagccccccatccccgtggtgatctgcgacggcagcggcagagccagcgacatcctgagcttcgcccacaagtactgcgaggagggcggcatcatcaacgagagcctgagagagcagctgctggtgaccatccagaagaccttcaactacaacaaggcccagagccaccagctgttcgccatcatcatggagtgcatgaagaagaaggagctggtgaccgtgttcagaatgggcagcgagggccagcaggacatcgagatggccatcctgaccgccctgctgaagggcaccaacgtgagcgcccccgaccagctgagcctggccctggcctggaacagagtggacatcgccagaagccagatcttcgtgttcggcccccactggccccccctgggcagcctggccccccccaccgacagcaaggccaccgagaaggagaagaagccccccatggccaccaccaagggcggcagaggcaagggcaagggcaagaagaagggcaaggtgaaggaggaggtggaggaggagaccgaccccagaaagatcgagctgctgaactgggtgaacgccctggagcaggccatgctggacgccctggtgctggacagagtggacttcgtgaagctgctgatcgagaacggcgtgaacatgcagcacttcctgaccatccccagactggaggagctgtacaacaccagactgggcccccccaacaccctgcacctgctggtgagagacgtgaagaagagcaacctgccccccgactaccacatcagcctgatcgacatcggcctggtgctggagtacctgatgggcggcgcctacagatgcaactacaccagaaagaacttcagaaccctgtacaacaacctgttcggccccaagagacccaaggccctgaagctgctgggcatggaggacgacgagccccccgccaagggcaagaagaagaagaagaagaagaaggaggaggagatcgacatcgacgtggacgaccccgccgtgagcagattccagtaccccttccacgagctgatggtgtgggccgtgctgatgaagagacagaagatggccgtgttcctgtggcagagaggcgaggagagcatggccaaggccctggtggcctgcaagctgtacaaggccatggcccacgagagcagcgagagcgacctggtggacgacatcagccaggacctggacaacaacagcaaggacttcggccagctggccctggagctgctggaccagagctacaagcacgacgagcagatcgccatgaagctgctgacctacgagctgaagaactggagcaacagcacctgcctgaagctggccgtggccgccaagcacagagacttcatcgcccacacctgcagccagatgctgctgaccgacatgtggatgggcagactgagaatgagaaagaaccccggcctgaaggtgatcatgggcatcctgctgccccccaccatcctgttcctggagttcagaacctacgacgacttcagctaccagaccagcaaggagaacgaggacggcaaggagaaggaggaggagaacaccgacgccaacgccgacgccggcagcagaaagggcgacgaggagaacgagcacaagaagcagagaagcatccccatcggcaccaagatctgcgagttctacaacgcccccatcgtgaagttctggttctacaccatcagctacctgggctacctgctgctgttcaactacgtgatcctggtgagaatggacggctggcccagcctgcaggagtggatcgtgatcagctacatcgtgagcctggccctggagaagatcagagagatcctgatgagcgagcccggcaagctgagccagaagatcaaggtgtggctgcaggagtactggaacatcaccgacctggtggccatcagcaccttcatgatcggcgccatcctgagactgcagaaccagccctacatgggctacggcagagtgatctactgcgtggacatcatcttctggtacatcagagtgctggacatcttcggcgtgaacaagtacctgggcccctacgtgatgatgatcggcaagatgatgatcgacatgctgtacttcgtggtgatcatgctggtggtgctgatgagcttcggcgtggccagacaggccatcctgcaccccgaggagaagcccagctggaagctggccagaaacatcttctacatgccctactggatgatctacggcgaggtgttcgccgaccagatcgacctgtacgccatggagatcaaccccccctgcggcgagaacctgtacgacgaggagggcaagagactgcccccctgcatccccggcgcctggctgacccccgccctgatggcctgctacctgctggtggccaacatcctgctggtgaacctgctgatcgccgtgttcaacaacaccttcttcgaggtgaagagcatcagcaaccaggtgtggaagttccagagataccagctgatcatgaccttccacgacagacccgtgctgcccccccccatgatcatcctgagccacatctacatcatcatcatgagactgagcggcagatgcagaaagaagagagagggcgaccaggaggagagagacagaggcctgaagctgttcctgagcgacgaggagctgaagagactgcacgagttcgaggagcagtgcgtgcaggagcacttcagagagaaggaggacgagcagcagagcagcagcgacgagagaatcagagtgaccagcgagagagtggagaacatgagcatgagactggaggagatcaacgagagagagaccttcatgaagaccagcctgcagaccgtggacctgagactggcccagctggaggagctgagcaacagaatggtgaacgccctggagaacctggccggcatcgacagaagcgacctgatccaggccagaagcagagccagcagcgagtgcgaggccacctacctgctgagacagagcagcatcaacagcgccgacggctacagcctgtacagataccacttcaacggcgaggagctgctgttcgaggacaccagcctgagcaccagccccggcaccggcgtgagaaagaagacctgcagcttcagaatcaaggaggagaaggacgtgaagacccacctggtgcccgagtgccagaacagcctgcacctgagcctgggcaccagcaccagcgccacccccgacggcagccacctggccgtggacgacctgaagaacgccgaggagagcaagctgggccccgacatcggcatcagcaaggaggacgacgagagacagaccgacagcaagaaggaggagaccatcagccccagcctgaacaagaccgacgtgatccacggccaggacaagagcgacgtgcagaacacccagctgaccgtggagaccaccaacatcgagggcaccatcagctaccccctggaggagaccaagatcaccagatacttccccgacgagaccatcaacgcctgcaagaccatgaagagcagaagcttcgtgtacagcagaggcagaaagctggtgggcggcgtgaaccaggacgtggagtacagcagcatcaccgaccagcagctgaccaccgagtggcagtgccaggtgcagaagatcaccagaagccacagcaccgacatcccctacatcgtgagcgaggccgccgtgcaggccgagcacaaggagcagttcgccgacatgcaggacgagcaccacgtggccgaggccatccccagaatccccagactgagcctgaccatcaccgacagaaacggcatggagaacctgctgagcgtgaagcccgaccagaccctgggcttccccagcctgagaagcaagagcctgcacggccaccccagaaacgtgaagagcatccagggcaagctggacagaagcggccacgccagcagcgtgagcagcctggtgatcgtgagcggcatgaccgccgaggagaagaaggtgaagaaggagaaggccagcaccgagaccgagtgctag

SEQ ID NO: 128204 - DNA, 4812 bp, Artificial Sequence
  derived and/or modified sequence
atgaaggacagcaacagatgctgctgcggccagttcaccaaccagcacatcccccccctgcccagcgccacccccagcaagaacgaggaggagagcaagcaggtggagacccagcccgagaagtggagcgtggccaagcacacccagagctaccccaccgacagctacggcgtgctggagttccagggcggcggctacagcaacaaggccatgtacatcagagtgagctacgacaccaagcccgacagcctgctgcacctgatggtgaaggactggcagctggagctgcccaagctgctgatcagcgtgcacggcggcctgcagaacttcgagatgcagcccaagctgaagcaggtgttcggcaagggcctgatcaaggccgccatgaccaccggcgcctggatcttcaccggcggcgtgagcaccggcgtgatcagccacgtgggcgacgccctgaaggaccacagcagcaagagcagaggcagagtgtgcgccatcggcatcgccccctggggcatcgtggagaacaaggaggacctggtgggcaaggacgtgaccagagtgtaccagaccatgagcaaccccctgagcaagctgagcgtgctgaacaacagccacacccacttcatcctggccgacaacggcaccctgggcaagtacggcgccgaggtgaagctgagaagactgctggagaagcacatcagcctgcagaagatcaacaccagactgggccagggcgtgcccctggtgggcctggtggtggagggcggccccaacgtggtgagcatcgtgctggagtacctgcaggaggagccccccatccccgtggtgatctgcgacggcagcggcagagccagcgacatcctgagcttcgcccacaagtactgcgaggagggcggcatcatcaacgagagcctgagagagcagctgctggtgaccatccagaagaccttcaactacaacaaggcccagagccaccagctgttcgccatcatcatggagtgcatgaagaagaaggagctggtgaccgtgttcagaatgggcagcgagggccagcaggacatcgagatggccatcctgaccgccctgctgaagggcaccaacgtgagcgcccccgaccagctgagcctggccctggcctggaacagagtggacatcgccagaagccagatcttcgtgttcggcccccactggccccccctgggcagcctggccccccccaccgacagcaaggccaccgagaaggagaagaagccccccatggccaccaccaagggcggcagaggcaagggcaagggcaagaagaagggcaaggtgaaggaggaggtggaggaggagaccgaccccagaaagatcgagctgctgaactgggtgaacgccctggagcaggccatgctggacgccctggtgctggacagagtggacttcgtgaagctgctgatcgagaacggcgtgaacatgcagcacttcctgaccatccccagactggaggagctgtacaacaccagactgggcccccccaacaccctgcacctgctggtgagagacgtgaagaagagcaacctgccccccgactaccacatcagcctgatcgacatcggcctggtgctggagtacctgatgggcggcgcctacagatgcaactacaccagaaagaacttcagaaccctgtacaacaacctgttcggccccaagagacccaaggccctgaagctgctgggcatggaggacgacgagccccccgccaagggcaagaagaagaagaagaagaagaaggaggaggagatcgacatcgacgtggacgaccccgccgtgagcagattccagtaccccttccacgagctgatggtgtgggccgtgctgatgaagagacagaagatggccgtgttcctgtggcagagaggcgaggagagcatggccaaggccctggtggcctgcaagctgtacaaggccatggcccacgagagcagcgagagcgacctggtggacgacatcagccaggacctggacaacaacagcaaggacttcggccagctggccctggagctgctggaccagagctacaagcacgacgagcagatcgccatgaagctgctgacctacgagctgaagaactggagcaacagcacctgcctgaagctggccgtggccgccaagcacagagacttcatcgcccacacctgcagccagatgctgctgaccgacatgtggatgggcagactgagaatgagaaagaaccccggcctgaaggtgatcatgggcatcctgctgccccccaccatcctgttcctggagttcagaacctacgacgacttcagctaccagaccagcaaggagaacgaggacggcaaggagaaggaggaggagaacaccgacgccaacgccgacgccggcagcagaaagggcgacgaggagaacgagcacaagaagcagagaagcatccccatcggcaccaagatctgcgagttctacaacgcccccatcgtgaagttctggttctacaccatcagctacctgggctacctgctgctgttcaactacgtgatcctggtgagaatggacggctggcccagcctgcaggagtggatcgtgatcagctacatcgtgagcctggccctggagaagatcagagagatcctgatgagcgagcccggcaagctgagccagaagatcaaggtgtggctgcaggagtactggaacatcaccgacctggtggccatcagcaccttcatgatcggcgccatcctgagactgcagaaccagccctacatgggctacggcagagtgatctactgcgtggacatcatcttctggtacatcagagtgctggacatcttcggcgtgaacaagtacctgggcccctacgtgatgatgatcggcaagatgatgatcgacatgctgtacttcgtggtgatcatgctggtggtgctgatgagcttcggcgtggccagacaggccatcctgcaccccgaggagaagcccagctggaagctggccagaaacatcttctacatgccctactggatgatctacggcgaggtgttcgccgaccagatcgacctgtacgccatggagatcaaccccccctgcggcgagaacctgtacgacgaggagggcaagagactgcccccctgcatccccggcgcctggctgacccccgccctgatggcctgctacctgctggtggccaacatcctgctggtgaacctgctgatcgccgtgttcaacaacaccttcttcgaggtgaagagcatcagcaaccaggtgtggaagttccagagataccagctgatcatgaccttccacgacagacccgtgctgcccccccccatgatcatcctgagccacatctacatcatcatcatgagactgagcggcagatgcagaaagaagagagagggcgaccaggaggagagagacagaggcctgaagctgttcctgagcgacgaggagctgaagagactgcacgagttcgaggagcagtgcgtgcaggagcacttcagagagaaggaggacgagcagcagagcagcagcgacgagagaatcagagtgaccagcgagagagtggagaacatgagcatgagactggaggagatcaacgagagagagaccttcatgaagaccagcctgcagaccgtggacctgagactggcccagctggaggagctgagcaacagaatggtgaacgccctggagaacctggccggcatcgacagaagcgacctgatccaggccagaagcagagccagcagcgagtgcgaggccacctacctgctgagacagagcagcatcaacagcgccgacggctacagcctgtacagataccacttcaacggcgaggagctgctgttcgaggacaccagcctgagcaccagccccggcaccggcgtgagaaagaagacctgcagcttcagaatcaaggaggagaaggacgtgaagacccacctggtgcccgagtgccagaacagcctgcacctgagcctgggcaccagcaccagcgccacccccgacggcagccacctggccgtggacgacctgaagaacgccgaggagagcaagctgggccccgacatcggcatcagcaaggaggacgacgagagacagaccgacagcaagaaggaggagaccatcagccccagcctgaacaagaccgacgtgatccacggccaggacaagagcgacgtgcagaacacccagctgaccgtggagaccaccaacatcgagggcaccatcagctaccccctggaggagaccaagatcaccagatacttccccgacgagaccatcaacgcctgcaagaccatgaagagcagaagcttcgtgtacagcagaggcagaaagctggtgggcggcgtgaaccaggacgtggagtacagcagcatcaccgaccagcagctgaccaccgagtggcagtgccaggtgcagaagatcaccagaagccacagcaccgacatcccctacatcgtgagcgaggccgccgtgcaggccgagcacaaggagcagttcgccgacatgcaggacgagcaccacgtggccgaggccatccccagaatccccagactgagcctgaccatcaccgacagaaacggcatggagaacctgctgagcgtgaagcccgaccagaccctgggcttccccagcctgagaagcaagagcctgcacggccaccccagaaacgtgaagagcatccagggcaagctggacagaagcggccacgccagcagcgtgagcagcctggtgatcgtgagcggcatgaccgccgaggagaagaaggtgaagaaggagaaggccagcaccgagaccgagtgctag

SEQ ID NO: 128205 - DNA, 4173 bp, Artificial Sequence
  derived and/or modified sequence
atgaaggacagcaacagatgctgctgcggccagttcaccaaccagcacatcccccccctgcccagcgccacccccagcaagaacgaggaggagagcaagcaggtggagacccagcccgagaagtggagcgtggccaagcacacccagagctaccccaccgacagctacggcgtgctggagttccagggcggcggctacagcaacaaggccatgtacatcagagtgagctacgacaccaagcccgacagcctgctgcacctgatggtgaaggactggcagctggagctgcccaagctgctgatcagcgtgcacggcggcctgcagaacttcgagatgcagcccaagctgaagcaggtgttcggcaagggcctgatcaaggccgccatgaccaccggcgcctggatcttcaccggcggcgtgagcaccggcgtgatcagccacgtgggcgacgccctgaaggaccacagcagcaagagcagaggcagagtgtgcgccatcggcatcgccccctggggcatcgtggagaacaaggaggacctggtgggcaaggacgtgaccagagtgtaccagaccatgagcaaccccctgagcaagctgagcgtgctgaacaacagccacacccacttcatcctggccgacaacggcaccctgggcaagtacggcgccgaggtgaagctgagaagactgctggagaagcacatcagcctgcagaagatcaacaccagactgggccagggcgtgcccctggtgggcctggtggtggagggcggccccaacgtggtgagcatcgtgctggagtacctgcaggaggagccccccatccccgtggtgatctgcgacggcagcggcagagccagcgacatcctgagcttcgcccacaagtactgcgaggagggcggcatcatcaacgagagcctgagagagcagctgctggtgaccatccagaagaccttcaactacaacaaggcccagagccaccagctgttcgccatcatcatggagtgcatgaagaagaaggagctggtgaccgtgttcagaatgggcagcgagggccagcaggacatcgagatggccatcctgaccgccctgctgaagggcaccaacgtgagcgcccccgaccagctgagcctggccctggcctggaacagagtggacatcgccagaagccagatcttcgtgttcggcccccactggccccccctgggcagcctggccccccccaccgacagcaaggccaccgagaaggagaagaagccccccatggccaccaccaagggcggcagaggcaagggcaagggcaagaagaagggcaaggtgaaggaggaggtggaggaggagaccgaccccagaaagatcgagctgctgaactgggtgaacgccctggagcaggccatgctggacgccctggtgctggacagagtggacttcgtgaagctgctgatcgagaacggcgtgaacatgcagcacttcctgaccatccccagactggaggagctgtacaacaccagactgggcccccccaacaccctgcacctgctggtgagagacgtgaagaagagcaacctgccccccgactaccacatcagcctgatcgacatcggcctggtgctggagtacctgatgggcggcgcctacagatgcaactacaccagaaagaacttcagaaccctgtacaacaacctgttcggccccaagagacccaaggccctgaagctgctgggcatggaggacgacgagccccccgccaagggcaagaagaagaagaagaagaagaaggaggaggagatcgacatcgacgtggacgaccccgccgtgagcagattccagtaccccttccacgagctgatggtgtgggccgtgctgatgaagagacagaagatggccgtgttcctgtggcagagaggcgaggagagcatggccaaggccctggtggcctgcaagctgtacaaggccatggcccacgagagcagcgagagcgacctggtggacgacatcagccaggacctggacaacaacagcaaggacttcggccagctggccctggagctgctggaccagagctacaagcacgacgagcagatcgccatgaagctgctgacctacgagctgaagaactggagcaacagcacctgcctgaagctggccgtggccgccaagcacagagacttcatcgcccacacctgcagccagatgctgctgaccgacatgtggatgggcagactgagaatgagaaagaaccccggcctgaaggtgatcatgggcatcctgctgccccccaccatcctgttcctggagttcagaacctacgacgacttcagctaccagaccagcaaggagaacgaggacggcaaggagaaggaggaggagaacaccgacgccaacgccgacgccggcagcagaaagggcgacgaggagaacgagcacaagaagcagagaagcatccccatcggcaccaagatctgcgagttctacaacgcccccatcgtgaagttctggttctacaccatcagctacctgggctacctgctgctgttcaactacgtgatcctggtgagaatggacggctggcccagcctgcaggagtggatcgtgatcagctacatcgtgagcctggccctggagaagatcagagagatcctgatgagcgagcccggcaagctgagccagaagatcaaggtgtggctgcaggagtactggaacatcaccgacctggtggccatcagcaccttcatgatcggcgccatcctgagactgcagaaccagccctacatgggctacggcagagtgatctactgcgtggacatcatcttctggtacatcagagtgctggacatcttcggcgtgaacaagtacctgggcccctacgtgatgatgatcggcaagatgatgatcgacatgctgtacttcgtggtgatcatgctggtggtgctgatgagcttcggcgtggccagacaggccatcctgcaccccgaggagaagcccagctggaagctggccagaaacatcttctacatgccctactggatgatctacggcgaggtgttcgccgaccagatcgacctgtacgccatggagatcaaccccccctgcggcgagaacctgtacgacgaggagggcaagagactgcccccctgcatccccggcgcctggctgacccccgccctgatggcctgctacctgctggtggccaacatcctgctggtgaacctgctgatcgccgtgttcaacaacaccttcttcgaggtgaagagcatcagcaaccaggtgtggaagttccagagataccagctgatcatgaccttccacgacagacccgtgctgcccccccccatgatcatcctgagccacatctacatcatcatcatgagactgagcggcagatgcagaaagaagagagagggcgaccaggaggagagagacagaggcctgaagctgttcctgagcgacgaggagctgaagagactgcacgagttcgaggagcagtgcgtgcaggagcacttcagagagaaggaggacgagcagcagagcagcagcgacgagagaatcagagtgaccagcgagagagtggagaacatgagcatgagactggaggagatcaacgagagagagaccttcatgaagaccagcctgcagaccgtggacctgagactggcccagctggaggagctgagcaacagaatggtgaacgccctggagaacctggccggcatcgacagaagcgacctgatccaggccagaagcagagccagcagcgagtgcgaggccacctacctgctgagacagagcagcatcaacagcgccgacggctacagcctgtacagataccacttcaacggcgaggagctgctgttcgaggacaccagcctgagcaccagccccggcaccggcgtgagaaagaagacctgcagcttcagaatcaaggaggagaaggacgtgaagacccacctggtgcccgagtgccagaacagcctgcacctgagcctgggcaccagcaccagcgccacccccgacggcagccacctggccgtggacgacctgaagaacgccgaggagagcaagctgggccccgacatcggcatcagcaaggaggacgacgagagacagaccgacagcaagaaggaggagaccatcagccccagcctgaacaagaccgacgtgatccacggccagtag

SEQ ID NO: 128206 - DNA, 4584 bp, Artificial Sequence
  derived and/or modified sequence
atgtacatcagagtgagctacgacaccaagcccgacagcctgctgcacctgatggtgaaggactggcagctggagctgcccaagctgctgatcagcgtgcacggcggcctgcagaacttcgagatgcagcccaagctgaagcaggtgttcggcaagggcctgatcaaggccgccatgaccaccggcgcctggatcttcaccggcggcgtgagcaccggcgtgatcagccacgtgggcgacgccctgaaggaccacagcagcaagagcagaggcagagtgtgcgccatcggcatcgccccctggggcatcgtggagaacaaggaggacctggtgggcaaggacgtgaccagagtgtaccagaccatgagcaaccccctgagcaagctgagcgtgctgaacaacagccacacccacttcatcctggccgacaacggcaccctgggcaagtacggcgccgaggtgaagctgagaagactgctggagaagcacatcagcctgcagaagatcaacaccagactgggccagggcgtgcccctggtgggcctggtggtggagggcggccccaacgtggtgagcatcgtgctggagtacctgcaggaggagccccccatccccgtggtgatctgcgacggcagcggcagagccagcgacatcctgagcttcgcccacaagatcatcaacgagagcctgagagagcagctgctggtgaccatccagaagaccttcaactacaacaaggcccagagccaccagctgttcgccatcatcatggagtgcatgaagaagaaggagctggtgaccgtgttcagaatgggcagcgagggccagcaggacatcgagatggccatcctgaccgccctgctgaagggcaccaacgtgagcgcccccgaccagctgagcctggccctggcctggaacagagtggacatcgccagaagccagatcttcgtgttcggcccccactggccccccctgggcagcctggccccccccaccgacagcaaggccaccgagaaggagaagaagccccccatggccaccaccaagggcggcagaggcaagggcaagggcaagaagaagggcaaggtgaaggaggaggtggaggaggagaccgaccccagaaagatcgagctgctgaactgggtgaacgccctggagcaggccatgctggacgccctggtgctggacagagtggacttcgtgaagctgctgatcgagaacggcgtgaacatgcagcacttcctgaccatccccagactggaggagctgtacaacaccagactgggcccccccaacaccctgcacctgctggtgagagacgtgaagaagagcaacctgccccccgactaccacatcagcctgatcgacatcggcctggtgctggagtacctgatgggcggcgcctacagatgcaactacaccagaaagaacttcagaaccctgtacaacaacctgttcggccccaagagacccaaggccctgaagctgctgggcatggaggacgacgagccccccgccaagggcaagaagaagaagaagaagaagaaggaggaggagatcgacatcgacgtggacgaccccgccgtgagcagattccagtaccccttccacgagctgatggtgtgggccgtgctgatgaagagacagaagatggccgtgttcctgtggcagagaggcgaggagagcatggccaaggccctggtggcctgcaagctgtacaaggccatggcccacgagagcagcgagagcgacctggtggacgacatcagccaggacctggacaacaacagcaaggacttcggccagctggccctggagctgctggaccagagctacaagcacgacgagcagatcgccatgaagctgctgacctacgagctgaagaactggagcaacagcacctgcctgaagctggccgtggccgccaagcacagagacttcatcgcccacacctgcagccagatgctgctgaccgacatgtggatgggcagactgagaatgagaaagaaccccggcctgaaggtgatcatgggcatcctgctgccccccaccatcctgttcctggagttcagaacctacgacgacttcagctaccagaccagcaaggagaacgaggacggcaaggagaaggaggaggagaacaccgacgccaacgccgacgccggcagcagaaagggcgacgaggagaacgagcacaagaagcagagaagcatccccatcggcaccaagatctgcgagttctacaacgcccccatcgtgaagttctggttctacaccatcagctacctgggctacctgctgctgttcaactacgtgatcctggtgagaatggacggctggcccagcctgcaggagtggatcgtgatcagctacatcgtgagcctggccctggagaagatcagagagatcctgatgagcgagcccggcaagctgagccagaagatcaaggtgtggctgcaggagtactggaacatcaccgacctggtggccatcagcaccttcatgatcggcgccatcctgagactgcagaaccagccctacatgggctacggcagagtgatctactgcgtggacatcatcttctggtacatcagagtgctggacatcttcggcgtgaacaagtacctgggcccctacgtgatgatgatcggcaagatgatgatcgacatgctgtacttcgtggtgatcatgctggtggtgctgatgagcttcggcgtggccagacaggccatcctgcaccccgaggagaagcccagctggaagctggccagaaacatcttctacatgccctactggatgatctacggcgaggtgttcgccgaccagatcgacctgtacgccatggagatcaaccccccctgcggcgagaacctgtacgacgaggagggcaagagactgcccccctgcatccccggcgcctggctgacccccgccctgatggcctgctacctgctggtggccaacatcctgctggtgaacctgctgatcgccgtgttcaacaacaccttcttcgaggtgaagagcatcagcaaccaggtgtggaagttccagagataccagctgatcatgaccttccacgacagacccgtgctgcccccccccatgatcatcctgagccacatctacatcatcatcatgagactgagcggcagatgcagaaagaagagagagggcgaccaggaggagagagacagaggcctgaagctgttcctgagcgacgaggagctgaagagactgcacgagttcgaggagcagtgcgtgcaggagcacttcagagagaaggaggacgagcagcagagcagcagcgacgagagaatcagagtgaccagcgagagagtggagaacatgagcatgagactggaggagatcaacgagagagagaccttcatgaagaccagcctgcagaccgtggacctgagactggcccagctggaggagctgagcaacagaatggtgaacgccctggagaacctggccggcatcgacagaagcgacctgatccaggccagaagcagagccagcagcgagtgcgaggccacctacctgctgagacagagcagcatcaacagcgccgacggctacagcctgtacagataccacttcaacggcgaggagctgctgttcgaggacaccagcctgagcaccagccccggcaccggcgtgagaaagaagacctgcagcttcagaatcaaggaggagaaggacgtgaagacccacctggtgcccgagtgccagaacagcctgcacctgagcctgggcaccagcaccagcgccacccccgacggcagccacctggccgtggacgacctgaagaacgccgaggagagcaagctgggccccgacatcggcatcagcaaggaggacgacgagagacagaccgacagcaagaaggaggagaccatcagccccagcctgaacaagaccgacgtgatccacggccaggacaagagcgacgtgcagaacacccagctgaccgtggagaccaccaacatcgagggcaccatcagctaccccctggaggagaccaagatcaccagatacttccccgacgagaccatcaacgcctgcaagaccatgaagagcagaagcttcgtgtacagcagaggcagaaagctggtgggcggcgtgaaccaggacgtggagtacagcagcatcaccgaccagcagctgaccaccgagtggcagtgccaggtgcagaagatcaccagaagccacagcaccgacatcccctacatcgtgagcgaggccgccgtgcaggccgagcacaaggagcagttcgccgacatgcaggacgagcaccacgtggccgaggccatccccagaatccccagactgagcctgaccatcaccgacagaaacggcatggagaacctgctgagcgtgaagcccgaccagaccctgggcttccccagcctgagaagcaagagcctgcacggccaccccagaaacgtgaagagcatccagggcaagctggacagaagcggccacgccagcagcgtgagcagcctggtgatcgtgagcggcatgaccgccgaggagaagaaggtgaagaaggagaaggccagcaccgagaccgagtgctag

SEQ ID NO: 128207 - DNA, 4812 bp, Artificial Sequence
  derived and/or modified sequence
atcaagactagcaaacgctgctgctgcgggcaattcaccaatcagcatatcccgcctctcccctccgccactccatcaaagaacgaagaggaaagcaaacaggtcgagactcagccagagaagtggtccgtggctaagcatactcagtcttatccgacagatagctacggggtacttgagttccagggtggaggctactcaaataaagctatgtacattcgggtcagctacgataccaagccagactctctgttacatctgatggtaaaggactggcagctagaacttcccaagctcctcatctccgtgcacggaggcctccagaacttcgaaatgcagcccaagctcaagcaggtgttcggcaaaggactcattaaggccgctatgacaacaggggcatggatctttaccgggggtgtgtccacaggcgtgatctctcacgtgggcgatgctctgaaagatcattccagtaagagccgcggcagagtgtgcgctatcggtatcgcaccctggggcatcgtggagaataaagaagatcttgttggcaaggacgtgacccgggtgtaccagacaatgtctaatcccctcagcaagttgtccgtgctgaataattcccacacccatttcatcttggccgataacggcaccctgggtaagtacggagctgaggtgaaactgcggaggcttctggaaaaacatatttccctccaaaagattaatacgaggctgggtcagggagtgcccttggtaggactggtagttgagggcggcccgaacgtagtatcgatagtcctggagtatctccaggaagagcctccaattcccgtggttatatgtgatggatccggccgtgcttctgacatcctctctttcgcccataagtactgcgaggaagggggaattatcaacgagagcctgcgggaacagctgctcgtgactattcagaaaacattcaattataacaaagcccagagccaccagctattcgcgatcatcatggaatgcatgaagaaaaaagaactggtgacagtgtttcggatgggctccgaaggccagcaggatattgagatggctatattgactgctctactgaaagggacaaacgtctccgcccccgaccaactctctctggcactggcatggaaccgcgtcgacatcgccagaagccagatctttgtgttcggcccccactggcctccactcggatcacttgcccctcctacagatagcaaggcgaccgaaaaggaaaagaagccaccaatggcaactactaaagggggtcggggtaagggcaagggcaaaaaaaaaggcaaggtcaaagaggaggtggaggaggaaacagatcccaggaaaatagagctgctgaattgggtgaacgcgcttgaacaggccatgctagatgcattggtactggacagagtggacttcgtaaagctgctgatcgaaaacggggtgaatatgcaacattttttaaccatccccaggctggaggagctgtacaacacgcggttaggtccgccgaacacactccatctcttggttagagatgtgaagaagagtaatctgccccccgattaccacatatcgcttattgatattggccttgtgcttgagtacctaatgggcggcgcatatcgctgtaattacacgcgcaagaactttcgaacgctctacaacaacttgttcgggcccaaaagacccaaggctttgaagctgttaggcatggaggatgatgagcctcccgccaaaggcaagaaaaaaaaaaagaagaagaaagaagaagagattgatattgacgttgatgaccccgcggtttcccgtttccagtatccgttccatgaattaatggtttgggcggtcttaatgaaaaggcagaaaatggcggtttttctctggcagaggggcgaggaatctatggccaaagcactcgtggcctgtaagctctacaaggccatggctcatgaaagttccgaaagcgatctggtcgatgatatcagtcaggatttggacaacaattccaaagatttcggtcagttggcactcgaactcctggaccagagctacaagcacgatgagcagattgcaatgaaacttctgacctatgagttaaagaattggagcaactcaacatgtctgaagttagctgtagccgctaaacatagagatttcattgcccacacttgtagccaaatgctcctaaccgacatgtggatgggcagacttcggatgaggaaaaatcccgggctcaaagtgattatgggtattttgttaccacccaccatcctattcttggaattccgcacctacgacgacttcagctaccagacttccaaggagaacgaagacgggaaggagaaggaggaagagaatactgacgcgaacgcagacgcaggtagtcgcaaaggcgacgaggagaacgagcacaagaaacagagatccatacccataggaaccaagatctgtgaattctacaacgccccgatagttaaattctggttctacaccatctcatacctgggctatctgctcttgttcaactatgtgattctggtgaggatggacgggtggcctagcctgcaagagtggatcgtgatcagctacatcgtcagcttggccctggagaaaatccgcgagattctcatgtctgagccgggtaaattgagtcagaaaattaaagtctggctgcaggaatattggaacatcaccgacctcgtggcaatcagtacatttatgattggtgccatcctgcgactgcagaatcagccgtacatgggctacgggagggtaatctattgtgtcgacataattttctggtatataagagtgttggatattttcggcgtgaacaagtatctggggccttacgttatgatgattggcaagatgatgatcgatatgctttactttgtggtcatcatgcttgtggtgcttatgtccttcggggtggccagacaggcaatcctgcaccccgaagagaagcccagttggaagctggcccgcaatattttttacatgccctattggatgatctatggagaggtttttgccgaccaaatagacttatatgcaatggagatcaatcctccttgtggagaaaatctatatgatgaggagggcaaaaggctccccccttgtattcccggcgcttggctcacccctgccctcatggcctgctatctactggtggccaacattcttttagtgaacctcctcattgccgttttcaacaataccttcttcgaggttaaaagcatatccaatcaggtctggaaatttcaaagatatcagctaatcatgacgttccacgaccgcccagtcctgccgcctcctatgatcatcctgtcccacatctacattatcattatgcgtctctctggtcggtgccgcaagaagagagagggcgaccaagaggaacgcgaccggggacttaaattgttcctgagcgacgaggagttaaagagacttcatgagtttgaggagcaatgtgtccaggagcacttccgcgaaaaggaggatgaacaacagtcctcatcagatgagagaatcagagtcaccagtgaaagagtggagaacatgtctatgagattggaggaaatcaacgagcgggaaacatttatgaaaacctctttacagacagtggacctgagacttgctcagctggaagaactgagcaataggatggttaacgccctcgagaacctggccgggatcgatcgctctgacctcatccaggcgcgatctcgcgcctcaagcgagtgcgaggccacatatctccttcgccagagcagcataaattccgctgacgggtattccttgtaccggtatcacttcaacggggaagaacttctgtttgaagatacttccctttcgacatccccgggcacgggcgtaaggaagaaaacatgctcttttcgaattaaagaagagaaggacgtgaagacccatcttgtgccagaatgtcagaattcccttcatctttccctcggaacaagtacttccgcgactccagatgggtcacacctcgctgtggatgatctgaagaatgccgaagaatcaaaactgggtcctgacattgggatctccaaagaggacgatgaacgccagacagactctaagaaggaagagaccattagcccaagccttaacaagaccgacgtcatccacggacaggacaaaagcgatgtacaaaatacccagctcaccgtggaaaccacgaacatcgagggcacaattagctacccattggaggagactaaaatcacaagatacttcccggacgagaccatcaatgcgtgcaagacaatgaaatctcggagctttgtttactctagagggaggaagttagtaggcggcgtaaaccaggacgtcgaatacagttcaataacagaccagcagctgaccactgagtggcagtgtcaggtgcagaaaatcacccgatcccactctaccgacatcccctacattgtgtctgaagctgccgtgcaagcggaacataaggagcagtttgccgatatgcaggacgaacaccatgtagcggaagcaatacctcgcatcccccgtctctctctgaccattactgatagaaatggaatggagaaccttctgtctgttaagcccgaccagactttgggattcccatctctgcgatcgaagtcactgcacggacacccccgtaatgtgaaatccattcagggaaaacttgatcgctccggccatgcgtcctccgtgagctcacttgtcattgtgtcaggaatgaccgccgaggagaaaaaagttaaaaaagagaaagcctcgacggagacagaatgttag

SEQ ID NO: 128208 - DNA, 4812 bp, Artificial Sequence
  derived and/or modified sequence
atgaaggacagcaatagatgctgctgcggacagttcaccaatcagcacattcctcccctcccatctgctacacccagtaagaacgaggaggagagtaagcaagtggaaacccagccggagaagtggagcgttgccaaacacacacagagctaccccactgacagctacggagttctagagttccagggtggtgggtactcaaacaaggctatgtacattcgtgtgtcttatgacaccaagccagatagcctgctgcatctcatggtcaaagactggcagctagaattgccgaaactgctgatcagcgtgcacgggggtctacaaaactttgaaatgcaacctaagcttaaacaggtatttggcaagggactgatcaaggctgccatgacaacgggagcttggatcttcaccggtggtgtgtccacaggagtgatctcgcatgttggcgatgccttgaaagatcattcctcgaaaagccgcggaagagtgtgcgccattgggatcgccccatggggcattgtggagaataaagaggatctggtgggaaaggatgtgacaagagtatatcagacaatgagcaatcccctaagcaagctctccgttctgaataactcccatacacactttatcctggcagataatggaactcttgggaaatacggagcagaagtgaaactgagaagattgctcgagaagcacatcagtctgcaaaagattaataccagactcggtcagggagtcccactggtgggactggtggtggaaggagggcctaatgttgtctcaatcgtgcttgaatacctgcaggaagagccacccatccccgtcgttatttgtgacggcagcgggcgggctagtgacattcttagtttcgcacacaaatactgcgaggaaggggggatcatcaacgagtccctacgcgagcagctcctcgttaccattcaaaagacattcaattacaacaaggcccagtcccaccagctttttgcaatcattatggagtgcatgaagaaaaaggagcttgtgacggtcttcagaatgggctccgagggacagcaggacattgagatggctattcttacagcgcttctgaagggcactaatgtttctgcacctgaccagctttccctggctctcgcctggaatcgggtagacatagcgcgcagccaaatttttgtattcggaccacactggcccccattgggatctctggcaccaccgactgacagtaaggccacagagaaagaaaagaaaccacctatggcgacaacaaaaggcggcagaggaaaagggaaggggaagaagaaaggtaaagttaaggaagaagtggaagaagaaactgacccccgcaaaatcgagctgctgaactgggtgaatgctctggaacaggcaatgcttgatgcgcttgttttagatcgagtcgacttcgtgaagctgttgattgagaacggcgtgaacatgcagcactttttgacaatcccacgcctggaagaactatataacacccggctcggcccacccaacacattgcatctgctggtaagagacgtcaaaaaatcgaacttgcctccagattatcacatttctttgatcgatatcggcctagttttggagtacctgatgggcggcgcttaccggtgtaactacacccgcaagaacttccggacactgtacaataatctgttcggacccaaaaggccaaaggctctgaagctgctgggaatggaggatgatgaacctcctgccaaaggaaagaaaaagaagaagaagaaaaaagaagaggagattgatattgatgtcgacgacccagctgtatcgcgtttccaatatccattccacgaattgatggtctgggccgtgctcatgaaacgtcagaagatggccgtgtttctgtggcagaggggggaggagagtatggccaaagcacttgtggcttgcaaactttataaagctatggcacatgaatcatctgagagcgatcttgttgatgacattagtcaagacctcgacaataattcaaaggactttggtcagctagccctggaacttctggaccagtcttataaacacgatgaacagatcgctatgaaactcttgacctacgagctgaagaattggtccaacagtacctgtctcaagctggccgtcgccgcaaagcatcgggacttcattgcacatacgtgctcccagatgctgctgacagatatgtggatgggccgtctccggatgcgaaagaacccagggctgaaggtaattatggggatccttctgccccctactatcctcttcctcgagttcaggacatacgatgacttcagttatcagacttctaaggaaaacgaggacggcaaggaaaaggaggaagagaacacagatgcaaacgcagatgcaggttcccggaaaggagacgaagaaaatgagcacaaaaaacaacgtagtatccccatcggaacgaagatttgcgagttctataacgctccgatagtcaagttctggttttatactatcagttacctaggttatctgttactttttaactatgtcattctggtgaggatggatggctggccgtcactgcaagagtggatcgtgatctcatatatcgtctccttagctcttgagaagataagagagatactgatgtctgaaccagggaaactatcccagaaaatcaaggtgtggctccaggaatactggaacatcaccgatctcgtagccatctcaactttcatgattggtgcgattctgagactgcagaatcaaccctacatgggctatggcagggtgatctactgtgtggatatcatcttttggtacataagggtcctggatatcttcggagttaataagtatctgggaccatacgtgatgatgatagggaagatgatgatagatatgttatacttcgtggtgattatgctggtagtgcttatgtctttcggggtggcccgccaggccatccttcatccggaggagaaaccaagctggaaactcgctaggaacattttttacatgccctactggatgatctatggcgaagtattcgctgatcagattgacttatatgcaatggagattaacccaccctgcggagaaaacctgtacgatgaagaagggaagcggctgcctccttgcattcccggagcctggctcacgcccgcgctcatggcctgctaccttttggtggcaaacatccttctcgtgaatctcttaattgccgtgtttaataatacgttttttgaagtgaaatccatttccaatcaggtttggaagttccagcgctaccaactgattatgactttccacgatcgtcccgttttgccccctccaatgattatcttatcccacatctacataattatcatgagactttcagggcgctgcagaaagaagagagagggagatcaggaggagcgcgaccggggactgaagttattcttgtccgatgaagaactcaaacggctgcatgagtttgaagagcaatgcgttcaagagcatttccgggagaaagaggacgagcagcagagtagcagcgacgaaaggattcgtgtaacgagcgagagagttgaaaacatgtcaatgcgcctggaagaaattaatgagcgggaaacgttcatgaagactagtctccagactgtcgacctgcgccttgcgcagctggaggagctgagcaatagaatggtgaatgctttggagaatctcgctggcattgatcgctctgatctgatccaggcccgctcccgtgcttccagtgaatgtgaggctacctacttgttaagacagtcttccattaattctgcagacggatattccttgtacaggtaccatttcaatggagaagagctgctgttcgaggacacctctctgagcactagccccgggactggggtacggaagaagacatgcagttttaggataaaagaggaaaaggacgtcaagacccatcttgtccctgagtgccagaacagccttcatctctctcttggtacaagcactagcgccaccccggacggcagccacctcgccgttgatgatctaaagaacgctgaggaatctaaattagggccagacattggcatctctaaagaggacgatgagcgccagacagactctaagaaggaggaaactatatcaccaagtctcaacaaaacagacgtgattcatggtcaggataagtccgacgtgcagaacacacagctgacggtggaaactacgaatattgagggaacaatttcttatcctctggaggagaccaaaatcacccggtactttccagacgaaaccatcaacgcctgtaaaaccatgaaaagcaggtcttttgtgtactccagaggcagaaagctggtcggaggggtgaatcaggacgtcgagtattcttctattacagaccaacagcttaccacagagtggcagtgtcaggtgcagaagattacccggtcccacagtaccgacattccttacattgtgagtgaggccgctgtccaggctgaacacaaggagcagtttgcagacatgcaagatgagcatcacgtcgccgaagccatcccaaggattccccgcttgagccttacaatcactgaccgcaacggaatggagaacttgcttagcgtaaagcctgatcagaccctcggttttcctagcttgaggtcaaagtcactgcatggacatccaaggaacgtgaaaagcatccagggaaagctggaccggtcagggcacgcttcctccgtgtcttctctcgtaatagtctcgggcatgacagcagaggaaaagaaggtgaagaaggagaaggcaagcacagagactgagtgttag

SEQ ID NO: 128209 - DNA, 4173 bp, Artificial Sequence
  derived and/or modified sequence
atgaaagacagcaataggtgttgttgtggacagtttactaatcagcatattccaccactgcctagtgccacgccatctaaaaacgaagaagagagcaagcaggtagaaacccagcctgagaagtggtcagtcgcaaaacatacacagtcatatcccacagactcttacggggtcctggaatttcagggtggcggttactcaaacaaagctatgtacattcgagtcagttatgacacaaagccggattcactgctgcacctcatggtgaaagattggcagctggaactgccgaagctacttatcagtgtacacgggggactgcagaattttgaaatgcagccaaagctaaagcaggttttcggaaaggggttaatcaaggcagctatgactacaggggcgtggatttttactggcggcgtctctaccggtgttattagccacgttggcgatgctctgaaagatcacagctctaagtctcgtgggagggtgtgtgctatcgggatcgcgccctgggggatcgtcgaaaataaagaggacctggtgggaaaagatgtgacacgggtttatcaaactatgtccaatcctctcagcaagctgagcgtgctcaacaacagccacacacatttcatcctggctgataacgggaccctcggcaaatacggcgcggaagtaaaactgaggcggctcctcgagaagcacatcagtttacaaaagattaatacccggctaggccaaggcgtgcctctcgtcggtctggtggtagagggcgggccaaatgtggtctctattgtgctcgagtatctgcaggaagagccccccataccagtggttatttgcgacggctcggggagagcatccgacatactgtcgttcgcccataagtactgcgaggagggagggatcatcaatgagtcacttcgcgagcagcttcttgtgacaatccagaaaacgttcaactataataaagctcagtcacaccagctgtttgctatcattatggaatgcatgaagaagaaagaactggtgacagtatttcggatggggagtgaggggcagcaggacatcgagatggcgatactgactgccctgcttaaaggcaccaacgtgtctgcaccagatcaactgtcactcgcactagcttggaaccgggtcgatatcgccagaagtcaaatctttgtgtttggaccccactggccgcccctgggatctttggcaccccctacggattccaaggctacagagaaggagaagaagccgccgatggctacaaccaagggcggccgggggaaaggaaaagggaagaaaaagggcaaagtgaaagaggaagtcgaagaggagacagatcccagaaaaatagagttgctgaactgggtcaatgccttagaacaagcaatgttggatgctctcgtgcttgacagagttgacttcgtaaaactgctgattgagaacggtgttaacatgcagcacttcctgacgatcccccgccttgaagaactgtataatacccggctgggacccccaaatacgctgcacctcctcgtgcgggacgtgaagaagagcaaccttccccccgactatcatatcagcctcattgatatcgggctggtactggagtatttaatgggcggcgcctatagatgcaactacactcgcaagaactttaggaccctgtacaataatctcttcgggccaaaacgacccaaagcattgaaactgctggggatggaggacgacgaacctcccgctaagggcaagaaaaaaaaaaagaagaagaaagaggaggaaattgatatcgacgttgatgatcccgccgtgtctcgctttcagtacccattccatgagctcatggtctgggccgtgctcatgaagaggcagaaaatggctgtcttcctttggcaacgtggtgaggagtccatggcgaaggctctggtggcctgtaagctctacaaggccatggcccatgagagcagcgaatccgacctggttgatgacatcagccaggacctggacaacaacagcaaggattttggtcagctggccctggaactactggatcagtcctataaacatgacgagcagatagcaatgaagctgcttacatacgagcttaagaactggtccaactctacgtgtctaaagctagctgttgccgctaagcacagggattttatcgcccacacctgctctcagatgctattgaccgacatgtggatgggccgtctgcgcatgagaaaaaatcctgggttaaaggtgattatgggcatcctcctgccccctaccattttatttctggagtttagaacgtatgacgacttttcatatcagacatccaaagaaaacgaggacggtaaggagaaggaagaagagaacaccgacgccaatgccgatgccggctcccgaaagggagatgaagagaatgaacataagaaacagagatctatcccaattggaactaagatatgcgaattttacaatgcccctattgtgaaattctggttttatacgatatcttaccttggctatcttctcctcttcaattacgtgatcttggttagaatggatgggtggccctctctccaggagtggattgtgatttcatatattgttagtctagcactggagaagataagagagattctgatgtctgaacctggcaagctcagccagaaaattaaagtgtggttgcaggagtattggaacattactgacctagtcgcgatctcgacttttatgattggagccatccttcgcctccagaaccagccgtatatgggttacgggcgcgtgatttattgtgtggatatcatcttctggtatatacgggtgctggacatctttggcgtgaacaaataccttgggccttatgtgatgatgattggaaagatgatgattgacatgctgtattttgtcgtaattatgttagtggttctgatgtcgttcggagtagcccgtcaggctatcttacacccagaagagaaacccagctggaagctggctagaaacattttctatatgccatattggatgatctacggtgaagtgttcgctgaccagatcgatttgtacgccatggaaatcaaccccccatgcggcgaaaatctgtacgatgaggaggggaagaggcttcctccttgtattcccggagcttggctcacccccgcattaatggcttgctacctccttgttgcaaatatccttcttgtcaacctgctcattgctgtcttcaacaacactttctttgaggtcaagtcaataagtaaccaggtttggaaatttcagaggtaccagctcattatgacatttcacgatagacctgtcctgcctcctcctatgataatactgagccacatttacattatcatcatgagactaagtggccgatgtcggaaaaagcgtgagggtgatcaggaggaacgcgaccgcggtctgaaactcttcttatcagacgaggaattgaaacgcctgcacgagtttgaggagcaatgcgtgcaagagcactttcgggagaaagaggacgagcagcagtcatcttcggacgaaagaatccgggtaacgtccgaacgggtcgagaatatgtccatgcgtctggaagagatcaatgagagagagaccttcatgaaaacaagtcttcagaccgtagacctgcgcttagcccagctcgaagaattgtctaaccgtatggttaatgctctcgaaaacctggccggaatcgatcgcagcgacctgatacaagcacgtagccgggcatcctctgagtgtgaagctacctatctgctgaggcagtccagtattaattccgccgatggctactctttataccgctaccacttcaacggagaggagttgctatttgaggacacctccctgtccaccagccctgggaccggggtccggaaaaaaacctgttcctttagaatcaaggaagagaaagatgtgaagacgcacctcgtccctgagtgtcagaatagtttgcatttgagtcttggcacctctacgtcagcaacaccagatgggtcacaccttgcagtcgacgatctgaagaacgctgaggaaagcaagctggggcctgacattggaatatcaaaggaggacgacgaacgtcagaccgatagcaagaaagaggaaacgatctcgcctagtctcaataaaaccgatgtcatccacgggcaatag

SEQ ID NO: 128210 - DNA, 4584 bp, Artificial Sequence
  derived and/or modified sequence
atgtatatccgtgtgtcttatgacactaagcccgattctcttctgcacctgatggtgaaggactggcagctcgagctgcctaaattattaatctctgtccacggtgggctacaaaactttgagatgcaacctaaattaaagcaggtttttggaaaaggtctgattaaggcagcaatgacaacaggagcttggatctttactggcggcgtttctactggagttatttctcacgtcggcgacgccctgaaggaccactcttccaagagcagaggtagagtgtgcgctataggcatcgcaccttggggcattgtggagaataaagaagaccttgtggggaaagacgtgacccgagtctatcagactatgagtaatcccctctcaaaactcagcgttttaaacaacagccacacccattttatactcgctgacaatggcaccctgggcaaatacggcgccgaggtcaaattgaggcggctgctggaaaagcacatctctttgcagaagattaacactaggctcgggcagggtgtcccgttggtgggcctcgtcgttgagggcggacctaacgttgtctccattgtgcttgaatatctgcaggaggagcctcctattccagtggtgatctgtgacggctcagggagagcttctgatatcctctcttttgcccataagattatcaacgagtccttacgggagcaactcctcgtcactatccagaaaacttttaattacaacaaggcgcaaagccatcagttgttcgccattattatggaatgtatgaagaagaaggagttagtgaccgtatttcgaatgggctccgagggccagcaggacattgagatggctatccttactgccctgctgaaaggcaccaacgtgagcgcgcctgatcagctatccctcgcactcgcctggaatagagtggatatagcacgctcccagatctttgtgttcggtccccattggcccccactgggaagcttggcaccacccacagattcaaaagccaccgaaaaagagaaaaagccaccaatggcaactacaaaaggtgggcgtggaaaaggaaagggcaaaaaaaaaggcaaagtgaaggaagaggtagaggaagagacagatcctcggaagattgagctactgaattgggtcaacgccctggagcaggccatgctcgacgcgctcgtgctcgatagagtcgattttgtaaaactgcttattgaaaacggagtgaatatgcagcatttcttgaccatccctcggcttgaggaactgtataacacccggctgggtcctcccaacacgctccatctgctggtgagggatgtcaagaaatccaacctcccccctgattatcacatttccctgatcgacatcggactggtactagagtatctgatgggaggagcttatcggtgtaactacactcgcaagaactttcgtaccctctataataatcttttcggccccaagcgacctaaagccctcaaactcctgggcatggaggacgacgagccaccggcgaagggcaaaaagaaaaagaaaaagaagaaggaggaggagattgatatagacgttgacgatcctgccgtctccaggttccagtatcctttccacgagcttatggtgtgggctgttttgatgaagcggcagaaaatggctgtcttcctgtggcaaaggggtgaagagtcaatggccaaagctctggttgcttgcaaactgtacaaagcgatggcgcacgaaagctctgagagcgacctggttgacgatatctcacaggatctggataacaattctaaagacttcggtcagctggcactggaacttctagatcagtcctataaacatgatgagcaaatcgctatgaagctgcttacatacgaactgaagaactggagcaactcaacatgccttaaacttgcggtcgcggcaaagcacagagattttatcgcccatacatgctcccagatgctgctaactgacatgtggatgggccgactgcggatgcgaaagaatcctgggcttaaagtaatcatgggtatactgctgccccctaccattttgttcttagaatttcgaacatacgatgacttctcttaccagacctctaaagaaaatgaggatggtaaggagaaagaagaggaaaatactgacgcaaatgccgacgccggatcacggaaaggggatgaagaaaatgaacataagaagcagcggtcaattccaatcgggactaagatctgcgagttttacaatgccccaattgtcaagttttggttctacaccatcagctacctgggctacttgctcttgtttaattacgtcatacttgtgcggatggacgggtggccgagcctgcaggagtggatcgtgatttcatacatcgtgtctctcgccctggaaaagataagagagatcctgatgagtgagcccggaaaattgagccagaagatcaaagtctggctgcaggaatactggaatatcacagaccttgtggcaataagtaccttcatgatcggtgcaattctccgcctgcagaatcaaccgtacatggggtatggacgggttatctattgtgtcgacattatcttttggtacattagagtactggatatctttggagttaataagtatctgggcccttacgtgatgatgatcggaaagatgatgatcgacatgctgtattttgtggtcataatgcttgtggtcctgatgtccttcggagtggcgcgccaagccatactgcaccctgaggaaaaaccttcgtggaaattggccaggaacatattctatatgccctattggatgatctacggggaggtgtttgctgaccaaatcgacctctatgcaatggaaatcaaccctccttgtggcgaaaacctatacgatgaggagggtaaaagactgcccccctgcattccaggcgcctggctaacacctgccctgatggcctgctaccttttggtcgcaaacattctgcttgtcaacctgctcatcgccgtcttcaataatacgttctttgaggttaagtccattagtaatcaggtgtggaagtttcagcggtaccagctaatcatgacctttcacgacagacctgttctgcccccccctatgattatcctgtcccacatctatattattataatgagactgtccggaaggtgccgcaaaaagcgagaaggggaccaggaagagcgagatcgtggcctaaagctgttcctgtcagacgaagaacttaagaggctgcacgagttcgaggagcaatgcgtccaggaacatttccgcgaaaaagaagatgagcagcagagttcatccgacgagagaatccgcgtgacatcagagagggtcgaaaacatgagtatgcggttagaagaaatcaatgaacgggaaacgttcatgaaaacttcactacagacggtagaccttagactcgcacaactggaagaactgtccaatcgaatggttaatgccctggaaaatcttgctggtatagaccgcagtgacctgatacaggctcgatcccgagcatcttctgaatgtgaagccacctacctcttgaggcagtcatctattaactcagcagatgggtattctttgtacaggtaccactttaacggagaggaattactgttcgaagatacaagcctatcaacctctcccgggactggtgtgagaaagaagacatgttctttccggattaaagaggagaaggacgtcaaaacccacctggtacccgagtgccagaactcactccatctatccctggggacaagcactagtgccacccccgacgggagccacctggccgtggatgacctcaaaaatgctgaggagtctaaactcgggccagacattggaatatccaaggaggacgacgaacgccagacagatagcaagaaggaggagaccatctctcctagtctcaacaaaactgacgtgatccacggccaggataagtctgatgttcaaaatacccagctgactgtggagactacaaacatcgagggtaccatttcctatcctctcgaagagactaaaatcactcgctacttccctgatgaaacaattaatgcctgcaaaacaatgaagtctcgatctttcgtgtactctcgggggaggaaactcgtcgggggcgtgaaccaggacgtggagtactcttccatcaccgaccaacaacttaccaccgagtggcaatgccaggtccagaagattacccgctcccacagtacagatatcccatacattgtctctgaggccgccgtgcaggccgaacacaaagagcagtttgccgacatgcaggatgaacaccatgttgctgaggccatcccccggatccccaggttgtcccttaccattacggacaggaacggcatggaaaatctgctgtcagttaagcccgatcagaccctggggtttccctctcttcggagtaaaagcctgcacggacacccacgcaacgtcaagagcattcaagggaaacttgatcgctctggtcacgccagcagtgtgtcatctctggtgatcgtgagcggaatgaccgccgaagaaaaaaaagtgaagaaggagaaggcttcaacagagacagaatgctag

SEQ ID NO: 128211 - DNA, 4812 bp, Artificial Sequence
  derived and/or modified sequence
atcaagaccagcaagcgctgctgctgcggccagttcaccaaccagcacatcccccccctgcccagcgccacccccagcaagaatgaggaggagagcaagcaggtggagacccagcctgagaagtggagcgtggccaagcacacccagagctaccccacagacagctatggagtgctggagttccagggcggcggctacagcaacaaggccatgtacatccgggtgtcctatgacaccaagccagacagcctgctgcacctgatggtgaaggactggcagctggagctgcccaagctgctgatctctgtgcacggcggcctgcagaactttgagatgcagcccaagctgaagcaggtgtttgggaagggcctcatcaaggccgccatgaccactggagcctggatcttcaccggaggagtgtccactggagtcatcagccacgtgggagatgccctgaaggaccacagcagcaagagccggggccgggtgtgtgccatcggcatcgccccctggggcatcgtggagaacaaggaggacctggtgggcaaggatgtgaccagggtgtaccagaccatgagcaaccccctgagcaagctgtctgtgctgaacaacagccacacccacttcatcctggccgacaatggcaccctgggcaagtacggggctgaggtgaagctgcggcggctgctggagaagcacatcagcctgcagaagatcaacacccggctgggccagggcgtgcccctggtgggcctggtggtggagggcggccccaacgtggtgtccatcgtgctggagtacctgcaggaggagccccccatccctgtggtgatctgtgatggcagcggccgggccagtgacatcctgagctttgcccacaagtactgtgaggagggcggcatcatcaatgaaagcctgcgggagcagctgctggtgaccatccagaagaccttcaactacaacaaggcccagagccaccagctgtttgccatcatcatggagtgcatgaagaagaaggagctggtgacagtgttcaggatgggcagcgagggccagcaggacatcgagatggccatcctgacagccctgctgaagggcaccaacgtgtctgccccagaccagctgagcctggccctggcctggaacagagtggacatcgcccggagccagatctttgtgtttggcccccactggccacccctgggcagcctggccccacccacagacagcaaggccacagagaaggagaagaagccacccatggccaccaccaagggcggccggggcaagggcaagggcaagaagaagggcaaggtgaaggaggaggtggaggaggagacagaccccaggaagattgagctgctgaactgggtgaatgccctggagcaggccatgctggatgccctggtgctggacagagtggactttgtgaagctgctgattgaaaatggagtgaacatgcagcacttcctgaccatcccccggctggaggagctgtacaacacccggctgggcccccccaacaccctgcacctgctggtgagagatgtgaagaagagcaacctgcccccagactaccacatcagcctgattgatattggcctggtgctggagtacctgatgggcggggcctaccgctgcaactacaccaggaagaacttccgcaccctgtacaacaacctgtttggccccaagaggcccaaggccctgaagctgctgggcatggaggatgatgagcccccagccaagggcaagaagaagaagaagaagaagaaggaggaggagattgatattgatgtggatgatcctgctgtgagccgcttccagtaccccttccacgagctgatggtgtgggccgtgctgatgaagaggcagaagatggctgtgttcctgtggcagagaggagaggagagcatggccaaggccctggtggcctgcaagctgtacaaggccatggcccacgagagcagcgagagtgacctggtggatgacatcagccaggacctggacaacaacagcaaggactttggccagctggccctggagctgctggaccagagctacaagcatgatgagcagatcgccatgaagctgctgacctatgagctgaagaactggagcaacagcacctgcctgaagctggccgtggccgccaagcaccgggacttcatcgcccacacctgcagccagatgctgctgacagacatgtggatgggccgcctgaggatgaggaagaaccctggcctgaaggtgatcatgggcatcctgctgccccccaccatcctcttcctggagttccgcacctatgatgacttctcctaccagaccagcaaagaaaatgaagatggcaaggagaaggaggaggagaacacagatgccaatgctgatgctggcagcaggaaaggagatgaagaaaatgagcacaagaagcagaggagcatccccatcggcaccaagatctgtgagttctacaatgcccccatcgtgaagttctggttctacaccatctcctacctgggctacctgctgctcttcaactacgtgatcctggtgaggatggatggctggcccagcctgcaggagtggatcgtcatctcctacatcgtgtccctggccctggagaagatccgggagatcctgatgtctgagcccgggaagctgagccagaagatcaaggtgtggctgcaggagtactggaacatcacagacctggtggccatcagcaccttcatgattggagccatcctgcggctgcagaaccagccctacatgggctacggccgggtcatctactgtgtggacatcatcttctggtacatccgggtgctggacatcttcggcgtgaacaagtacctgggcccctacgtgatgatgattggcaagatgatgattgacatgctgtactttgtggtgatcatgctggtggtgctgatgagctttggagtggcccggcaggccatcctgcaccctgaggagaagcccagctggaagctggccaggaacatcttctacatgccctactggatgatctatggagaggtgtttgctgaccagattgacctgtatgccatggagatcaaccccccctgtggggagaacctgtatgatgaggagggcaagaggctgcccccctgcatccctggggcctggctgaccccagccctgatggcctgctacctgctggtggccaacatcctgctggtgaacctgctgattgctgtgttcaacaacaccttctttgaggtgaagagcatcagcaaccaggtgtggaagttccagcgctaccagctgatcatgaccttccatgacaggcctgtgctgcccccacccatgatcatcctgagccacatctacatcatcatcatgaggctgagcggccgctgcaggaagaagcgggagggggaccaggaggagcgggaccggggcctgaagctgttcctgagtgatgaggagctgaagaggctgcacgagtttgaggagcagtgtgtgcaggagcacttccgggagaaggaggatgagcagcagagcagcagtgatgagcgcatccgggtgaccagcgagcgggtggagaacatgtccatgaggctggaggagatcaatgaaagagagaccttcatgaagaccagcctgcagacagtggacctgcggctggcccagctggaggagctgagcaacaggatggtgaatgccctggagaacctggccggcatcgacagaagtgacctgatccaggcccggagccgggccagcagtgaatgtgaggccacctacctgctgcggcagagcagcatcaacagcgcagatggctacagcctgtaccgctaccacttcaacggggaggagctgctgtttgaggacaccagcctgagcaccagccctggcactggagtgaggaagaagacctgcagcttccgcatcaaggaggagaaggatgtgaagacccacctggtgcctgagtgccagaacagcctgcacctgagcctgggcaccagcaccagcgccaccccagatggcagccacctggccgtggatgacctgaagaatgctgaggagagcaagctgggccctgacatcggcatcagcaaagaagatgatgagcggcagacagacagcaagaaggaggagaccatcagccccagcctgaacaagacagatgtgatccacggccaggacaagagtgatgtgcagaacacccagctgactgtggagaccaccaacatcgagggcaccatctcctaccccctggaggagaccaagatcacccgctacttcccagatgagaccatcaatgcctgcaagaccatgaagagccgcagctttgtgtacagccggggcaggaagctggtgggcggcgtgaaccaggatgtggagtacagcagcatcacagaccagcagctgaccacagagtggcagtgccaggtgcagaagatcaccaggagccacagcacagacatcccctacatcgtgtctgaggccgctgtgcaggccgagcacaaggagcagtttgctgacatgcaggatgagcaccacgtggccgaggccatcccccgcatcccccggctgagcctgaccatcacagacagaaatggcatggagaacctgctgtctgtgaagccagaccagaccctgggcttccccagcctgcggagcaagagcctgcacggccaccccagaaatgtgaagagcatccagggcaagctggacaggagcggccacgccagctctgtgagcagcctggtgattgtgtctggcatgacagctgaggagaagaaggtgaagaaggagaaggccagcacagaaacagagtgctag

SEQ ID NO: 128212 - DNA, 4812 bp, Artificial Sequence
  derived and/or modified sequence
atgaaggacagcaaccgctgctgctgcggccagttcaccaaccagcacatcccccccctgcccagcgccacccccagcaagaatgaggaggagagcaagcaggtggagacccagcctgagaagtggagcgtggccaagcacacccagagctaccccacagacagctatggagtgctggagttccagggcggcggctacagcaacaaggccatgtacatccgggtgtcctatgacaccaagccagacagcctgctgcacctgatggtgaaggactggcagctggagctgcccaagctgctgatctctgtgcacggcggcctgcagaactttgagatgcagcccaagctgaagcaggtgtttgggaagggcctcatcaaggccgccatgaccactggagcctggatcttcaccggaggagtgtccactggagtcatcagccacgtgggagatgccctgaaggaccacagcagcaagagccggggccgggtgtgtgccatcggcatcgccccctggggcatcgtggagaacaaggaggacctggtgggcaaggatgtgaccagggtgtaccagaccatgagcaaccccctgagcaagctgtctgtgctgaacaacagccacacccacttcatcctggccgacaatggcaccctgggcaagtacggggctgaggtgaagctgcggcggctgctggagaagcacatcagcctgcagaagatcaacacccggctgggccagggcgtgcccctggtgggcctggtggtggagggcggccccaacgtggtgtccatcgtgctggagtacctgcaggaggagccccccatccctgtggtgatctgtgatggcagcggccgggccagtgacatcctgagctttgcccacaagtactgtgaggagggcggcatcatcaatgaaagcctgcgggagcagctgctggtgaccatccagaagaccttcaactacaacaaggcccagagccaccagctgtttgccatcatcatggagtgcatgaagaagaaggagctggtgacagtgttcaggatgggcagcgagggccagcaggacatcgagatggccatcctgacagccctgctgaagggcaccaacgtgtctgccccagaccagctgagcctggccctggcctggaacagagtggacatcgcccggagccagatctttgtgtttggcccccactggccacccctgggcagcctggccccacccacagacagcaaggccacagagaaggagaagaagccacccatggccaccaccaagggcggccggggcaagggcaagggcaagaagaagggcaaggtgaaggaggaggtggaggaggagacagaccccaggaagattgagctgctgaactgggtgaatgccctggagcaggccatgctggatgccctggtgctggacagagtggactttgtgaagctgctgattgaaaatggagtgaacatgcagcacttcctgaccatcccccggctggaggagctgtacaacacccggctgggcccccccaacaccctgcacctgctggtgagagatgtgaagaagagcaacctgcccccagactaccacatcagcctgattgatattggcctggtgctggagtacctgatgggcggggcctaccgctgcaactacaccaggaagaacttccgcaccctgtacaacaacctgtttggccccaagaggcccaaggccctgaagctgctgggcatggaggatgatgagcccccagccaagggcaagaagaagaagaagaagaagaaggaggaggagattgatattgatgtggatgatcctgctgtgagccgcttccagtaccccttccacgagctgatggtgtgggccgtgctgatgaagaggcagaagatggctgtgttcctgtggcagagaggagaggagagcatggccaaggccctggtggcctgcaagctgtacaaggccatggcccacgagagcagcgagagtgacctggtggatgacatcagccaggacctggacaacaacagcaaggactttggccagctggccctggagctgctggaccagagctacaagcatgatgagcagatcgccatgaagctgctgacctatgagctgaagaactggagcaacagcacctgcctgaagctggccgtggccgccaagcaccgggacttcatcgcccacacctgcagccagatgctgctgacagacatgtggatgggccgcctgaggatgaggaagaaccctggcctgaaggtgatcatgggcatcctgctgccccccaccatcctcttcctggagttccgcacctatgatgacttctcctaccagaccagcaaagaaaatgaagatggcaaggagaaggaggaggagaacacagatgccaatgctgatgctggcagcaggaaaggagatgaagaaaatgagcacaagaagcagaggagcatccccatcggcaccaagatctgtgagttctacaatgcccccatcgtgaagttctggttctacaccatctcctacctgggctacctgctgctcttcaactacgtgatcctggtgaggatggatggctggcccagcctgcaggagtggatcgtcatctcctacatcgtgtccctggccctggagaagatccgggagatcctgatgtctgagcccgggaagctgagccagaagatcaaggtgtggctgcaggagtactggaacatcacagacctggtggccatcagcaccttcatgattggagccatcctgcggctgcagaaccagccctacatgggctacggccgggtcatctactgtgtggacatcatcttctggtacatccgggtgctggacatcttcggcgtgaacaagtacctgggcccctacgtgatgatgattggcaagatgatgattgacatgctgtactttgtggtgatcatgctggtggtgctgatgagctttggagtggcccggcaggccatcctgcaccctgaggagaagcccagctggaagctggccaggaacatcttctacatgccctactggatgatctatggagaggtgtttgctgaccagattgacctgtatgccatggagatcaaccccccctgtggggagaacctgtatgatgaggagggcaagaggctgcccccctgcatccctggggcctggctgaccccagccctgatggcctgctacctgctggtggccaacatcctgctggtgaacctgctgattgctgtgttcaacaacaccttctttgaggtgaagagcatcagcaaccaggtgtggaagttccagcgctaccagctgatcatgaccttccatgacaggcctgtgctgcccccacccatgatcatcctgagccacatctacatcatcatcatgaggctgagcggccgctgcaggaagaagcgggagggggaccaggaggagcgggaccggggcctgaagctgttcctgagtgatgaggagctgaagaggctgcacgagtttgaggagcagtgtgtgcaggagcacttccgggagaaggaggatgagcagcagagcagcagtgatgagcgcatccgggtgaccagcgagcgggtggagaacatgtccatgaggctggaggagatcaatgaaagagagaccttcatgaagaccagcctgcagacagtggacctgcggctggcccagctggaggagctgagcaacaggatggtgaatgccctggagaacctggccggcatcgacagaagtgacctgatccaggcccggagccgggccagcagtgaatgtgaggccacctacctgctgcggcagagcagcatcaacagcgcagatggctacagcctgtaccgctaccacttcaacggggaggagctgctgtttgaggacaccagcctgagcaccagccctggcactggagtgaggaagaagacctgcagcttccgcatcaaggaggagaaggatgtgaagacccacctggtgcctgagtgccagaacagcctgcacctgagcctgggcaccagcaccagcgccaccccagatggcagccacctggccgtggatgacctgaagaatgctgaggagagcaagctgggccctgacatcggcatcagcaaagaagatgatgagcggcagacagacagcaagaaggaggagaccatcagccccagcctgaacaagacagatgtgatccacggccaggacaagagtgatgtgcagaacacccagctgactgtggagaccaccaacatcgagggcaccatctcctaccccctggaggagaccaagatcacccgctacttcccagatgagaccatcaatgcctgcaagaccatgaagagccgcagctttgtgtacagccggggcaggaagctggtgggcggcgtgaaccaggatgtggagtacagcagcatcacagaccagcagctgaccacagagtggcagtgccaggtgcagaagatcaccaggagccacagcacagacatcccctacatcgtgtctgaggccgctgtgcaggccgagcacaaggagcagtttgctgacatgcaggatgagcaccacgtggccgaggccatcccccgcatcccccggctgagcctgaccatcacagacagaaatggcatggagaacctgctgtctgtgaagccagaccagaccctgggcttccccagcctgcggagcaagagcctgcacggccaccccagaaatgtgaagagcatccagggcaagctggacaggagcggccacgccagctctgtgagcagcctggtgattgtgtctggcatgacagctgaggagaagaaggtgaagaaggagaaggccagcacagaaacagagtgctag

SEQ ID NO: 128213 - DNA, 4173 bp, Artificial Sequence
  derived and/or modified sequence
atgaaggacagcaaccgctgctgctgcggccagttcaccaaccagcacatcccccccctgcccagcgccacccccagcaagaatgaggaggagagcaagcaggtggagacccagcctgagaagtggagcgtggccaagcacacccagagctaccccacagacagctatggagtgctggagttccagggcggcggctacagcaacaaggccatgtacatccgggtgtcctatgacaccaagccagacagcctgctgcacctgatggtgaaggactggcagctggagctgcccaagctgctgatctctgtgcacggcggcctgcagaactttgagatgcagcccaagctgaagcaggtgtttgggaagggcctcatcaaggccgccatgaccactggagcctggatcttcaccggaggagtgtccactggagtcatcagccacgtgggagatgccctgaaggaccacagcagcaagagccggggccgggtgtgtgccatcggcatcgccccctggggcatcgtggagaacaaggaggacctggtgggcaaggatgtgaccagggtgtaccagaccatgagcaaccccctgagcaagctgtctgtgctgaacaacagccacacccacttcatcctggccgacaatggcaccctgggcaagtacggggctgaggtgaagctgcggcggctgctggagaagcacatcagcctgcagaagatcaacacccggctgggccagggcgtgcccctggtgggcctggtggtggagggcggccccaacgtggtgtccatcgtgctggagtacctgcaggaggagccccccatccctgtggtgatctgtgatggcagcggccgggccagtgacatcctgagctttgcccacaagtactgtgaggagggcggcatcatcaatgaaagcctgcgggagcagctgctggtgaccatccagaagaccttcaactacaacaaggcccagagccaccagctgtttgccatcatcatggagtgcatgaagaagaaggagctggtgacagtgttcaggatgggcagcgagggccagcaggacatcgagatggccatcctgacagccctgctgaagggcaccaacgtgtctgccccagaccagctgagcctggccctggcctggaacagagtggacatcgcccggagccagatctttgtgtttggcccccactggccacccctgggcagcctggccccacccacagacagcaaggccacagagaaggagaagaagccacccatggccaccaccaagggcggccggggcaagggcaagggcaagaagaagggcaaggtgaaggaggaggtggaggaggagacagaccccaggaagattgagctgctgaactgggtgaatgccctggagcaggccatgctggatgccctggtgctggacagagtggactttgtgaagctgctgattgaaaatggagtgaacatgcagcacttcctgaccatcccccggctggaggagctgtacaacacccggctgggcccccccaacaccctgcacctgctggtgagagatgtgaagaagagcaacctgcccccagactaccacatcagcctgattgatattggcctggtgctggagtacctgatgggcggggcctaccgctgcaactacaccaggaagaacttccgcaccctgtacaacaacctgtttggccccaagaggcccaaggccctgaagctgctgggcatggaggatgatgagcccccagccaagggcaagaagaagaagaagaagaagaaggaggaggagattgatattgatgtggatgatcctgctgtgagccgcttccagtaccccttccacgagctgatggtgtgggccgtgctgatgaagaggcagaagatggctgtgttcctgtggcagagaggagaggagagcatggccaaggccctggtggcctgcaagctgtacaaggccatggcccacgagagcagcgagagtgacctggtggatgacatcagccaggacctggacaacaacagcaaggactttggccagctggccctggagctgctggaccagagctacaagcatgatgagcagatcgccatgaagctgctgacctatgagctgaagaactggagcaacagcacctgcctgaagctggccgtggccgccaagcaccgggacttcatcgcccacacctgcagccagatgctgctgacagacatgtggatgggccgcctgaggatgaggaagaaccctggcctgaaggtgatcatgggcatcctgctgccccccaccatcctcttcctggagttccgcacctatgatgacttctcctaccagaccagcaaagaaaatgaagatggcaaggagaaggaggaggagaacacagatgccaatgctgatgctggcagcaggaaaggagatgaagaaaatgagcacaagaagcagaggagcatccccatcggcaccaagatctgtgagttctacaatgcccccatcgtgaagttctggttctacaccatctcctacctgggctacctgctgctcttcaactacgtgatcctggtgaggatggatggctggcccagcctgcaggagtggatcgtcatctcctacatcgtgtccctggccctggagaagatccgggagatcctgatgtctgagcccgggaagctgagccagaagatcaaggtgtggctgcaggagtactggaacatcacagacctggtggccatcagcaccttcatgattggagccatcctgcggctgcagaaccagccctacatgggctacggccgggtcatctactgtgtggacatcatcttctggtacatccgggtgctggacatcttcggcgtgaacaagtacctgggcccctacgtgatgatgattggcaagatgatgattgacatgctgtactttgtggtgatcatgctggtggtgctgatgagctttggagtggcccggcaggccatcctgcaccctgaggagaagcccagctggaagctggccaggaacatcttctacatgccctactggatgatctatggagaggtgtttgctgaccagattgacctgtatgccatggagatcaaccccccctgtggggagaacctgtatgatgaggagggcaagaggctgcccccctgcatccctggggcctggctgaccccagccctgatggcctgctacctgctggtggccaacatcctgctggtgaacctgctgattgctgtgttcaacaacaccttctttgaggtgaagagcatcagcaaccaggtgtggaagttccagcgctaccagctgatcatgaccttccatgacaggcctgtgctgcccccacccatgatcatcctgagccacatctacatcatcatcatgaggctgagcggccgctgcaggaagaagcgggagggggaccaggaggagcgggaccggggcctgaagctgttcctgagtgatgaggagctgaagaggctgcacgagtttgaggagcagtgtgtgcaggagcacttccgggagaaggaggatgagcagcagagcagcagtgatgagcgcatccgggtgaccagcgagcgggtggagaacatgtccatgaggctggaggagatcaatgaaagagagaccttcatgaagaccagcctgcagacagtggacctgcggctggcccagctggaggagctgagcaacaggatggtgaatgccctggagaacctggccggcatcgacagaagtgacctgatccaggcccggagccgggccagcagtgaatgtgaggccacctacctgctgcggcagagcagcatcaacagcgcagatggctacagcctgtaccgctaccacttcaacggggaggagctgctgtttgaggacaccagcctgagcaccagccctggcactggagtgaggaagaagacctgcagcttccgcatcaaggaggagaaggatgtgaagacccacctggtgcctgagtgccagaacagcctgcacctgagcctgggcaccagcaccagcgccaccccagatggcagccacctggccgtggatgacctgaagaatgctgaggagagcaagctgggccctgacatcggcatcagcaaagaagatgatgagcggcagacagacagcaagaaggaggagaccatcagccccagcctgaacaagacagatgtgatccacggccagtag

SEQ ID NO: 128214 - DNA, 4584 bp, Artificial Sequence
  derived and/or modified sequence
atgtacatccgggtgtcctatgacaccaagccagacagcctgctgcacctgatggtgaaggactggcagctggagctgcccaagctgctgatctctgtgcacggcggcctgcagaactttgagatgcagcccaagctgaagcaggtgtttgggaagggcctcatcaaggccgccatgaccactggagcctggatcttcaccggaggagtgtccactggagtcatcagccacgtgggagatgccctgaaggaccacagcagcaagagccggggccgggtgtgtgccatcggcatcgccccctggggcatcgtggagaacaaggaggacctggtgggcaaggatgtgaccagggtgtaccagaccatgagcaaccccctgagcaagctgtctgtgctgaacaacagccacacccacttcatcctggccgacaatggcaccctgggcaagtacggggctgaggtgaagctgcggcggctgctggagaagcacatcagcctgcagaagatcaacacccggctgggccagggcgtgcccctggtgggcctggtggtggagggcggccccaacgtggtgtccatcgtgctggagtacctgcaggaggagccccccatccctgtggtgatctgtgatggcagcggccgggccagtgacatcctgagctttgcccacaagatcatcaatgaaagcctgcgggagcagctgctggtgaccatccagaagaccttcaactacaacaaggcccagagccaccagctgtttgccatcatcatggagtgcatgaagaagaaggagctggtgacagtgttcaggatgggcagcgagggccagcaggacatcgagatggccatcctgacagccctgctgaagggcaccaacgtgtctgccccagaccagctgagcctggccctggcctggaacagagtggacatcgcccggagccagatctttgtgtttggcccccactggccacccctgggcagcctggccccacccacagacagcaaggccacagagaaggagaagaagccacccatggccaccaccaagggcggccggggcaagggcaagggcaagaagaagggcaaggtgaaggaggaggtggaggaggagacagaccccaggaagattgagctgctgaactgggtgaatgccctggagcaggccatgctggatgccctggtgctggacagagtggactttgtgaagctgctgattgaaaatggagtgaacatgcagcacttcctgaccatcccccggctggaggagctgtacaacacccggctgggcccccccaacaccctgcacctgctggtgagagatgtgaagaagagcaacctgcccccagactaccacatcagcctgattgatattggcctggtgctggagtacctgatgggcggggcctaccgctgcaactacaccaggaagaacttccgcaccctgtacaacaacctgtttggccccaagaggcccaaggccctgaagctgctgggcatggaggatgatgagcccccagccaagggcaagaagaagaagaagaagaagaaggaggaggagattgatattgatgtggatgatcctgctgtgagccgcttccagtaccccttccacgagctgatggtgtgggccgtgctgatgaagaggcagaagatggctgtgttcctgtggcagagaggagaggagagcatggccaaggccctggtggcctgcaagctgtacaaggccatggcccacgagagcagcgagagtgacctggtggatgacatcagccaggacctggacaacaacagcaaggactttggccagctggccctggagctgctggaccagagctacaagcatgatgagcagatcgccatgaagctgctgacctatgagctgaagaactggagcaacagcacctgcctgaagctggccgtggccgccaagcaccgggacttcatcgcccacacctgcagccagatgctgctgacagacatgtggatgggccgcctgaggatgaggaagaaccctggcctgaaggtgatcatgggcatcctgctgccccccaccatcctcttcctggagttccgcacctatgatgacttctcctaccagaccagcaaagaaaatgaagatggcaaggagaaggaggaggagaacacagatgccaatgctgatgctggcagcaggaaaggagatgaagaaaatgagcacaagaagcagaggagcatccccatcggcaccaagatctgtgagttctacaatgcccccatcgtgaagttctggttctacaccatctcctacctgggctacctgctgctcttcaactacgtgatcctggtgaggatggatggctggcccagcctgcaggagtggatcgtcatctcctacatcgtgtccctggccctggagaagatccgggagatcctgatgtctgagcccgggaagctgagccagaagatcaaggtgtggctgcaggagtactggaacatcacagacctggtggccatcagcaccttcatgattggagccatcctgcggctgcagaaccagccctacatgggctacggccgggtcatctactgtgtggacatcatcttctggtacatccgggtgctggacatcttcggcgtgaacaagtacctgggcccctacgtgatgatgattggcaagatgatgattgacatgctgtactttgtggtgatcatgctggtggtgctgatgagctttggagtggcccggcaggccatcctgcaccctgaggagaagcccagctggaagctggccaggaacatcttctacatgccctactggatgatctatggagaggtgtttgctgaccagattgacctgtatgccatggagatcaaccccccctgtggggagaacctgtatgatgaggagggcaagaggctgcccccctgcatccctggggcctggctgaccccagccctgatggcctgctacctgctggtggccaacatcctgctggtgaacctgctgattgctgtgttcaacaacaccttctttgaggtgaagagcatcagcaaccaggtgtggaagttccagcgctaccagctgatcatgaccttccatgacaggcctgtgctgcccccacccatgatcatcctgagccacatctacatcatcatcatgaggctgagcggccgctgcaggaagaagcgggagggggaccaggaggagcgggaccggggcctgaagctgttcctgagtgatgaggagctgaagaggctgcacgagtttgaggagcagtgtgtgcaggagcacttccgggagaaggaggatgagcagcagagcagcagtgatgagcgcatccgggtgaccagcgagcgggtggagaacatgtccatgaggctggaggagatcaatgaaagagagaccttcatgaagaccagcctgcagacagtggacctgcggctggcccagctggaggagctgagcaacaggatggtgaatgccctggagaacctggccggcatcgacagaagtgacctgatccaggcccggagccgggccagcagtgaatgtgaggccacctacctgctgcggcagagcagcatcaacagcgcagatggctacagcctgtaccgctaccacttcaacggggaggagctgctgtttgaggacaccagcctgagcaccagccctggcactggagtgaggaagaagacctgcagcttccgcatcaaggaggagaaggatgtgaagacccacctggtgcctgagtgccagaacagcctgcacctgagcctgggcaccagcaccagcgccaccccagatggcagccacctggccgtggatgacctgaagaatgctgaggagagcaagctgggccctgacatcggcatcagcaaagaagatgatgagcggcagacagacagcaagaaggaggagaccatcagccccagcctgaacaagacagatgtgatccacggccaggacaagagtgatgtgcagaacacccagctgactgtggagaccaccaacatcgagggcaccatctcctaccccctggaggagaccaagatcacccgctacttcccagatgagaccatcaatgcctgcaagaccatgaagagccgcagctttgtgtacagccggggcaggaagctggtgggcggcgtgaaccaggatgtggagtacagcagcatcacagaccagcagctgaccacagagtggcagtgccaggtgcagaagatcaccaggagccacagcacagacatcccctacatcgtgtctgaggccgctgtgcaggccgagcacaaggagcagtttgctgacatgcaggatgagcaccacgtggccgaggccatcccccgcatcccccggctgagcctgaccatcacagacagaaatggcatggagaacctgctgtctgtgaagccagaccagaccctgggcttccccagcctgcggagcaagagcctgcacggccaccccagaaatgtgaagagcatccagggcaagctggacaggagcggccacgccagctctgtgagcagcctggtgattgtgtctggcatgacagctgaggagaagaaggtgaagaaggagaaggccagcacagaaacagagtgctag

SEQ ID NO: 128215 - DNA, 4812 bp, Artificial Sequence
  derived and/or modified sequence
atcaagaccagcaagcggtgctgctgcggccagttcaccaaccagcatatcccacctctaccatcagccacgccgtccaagaatgaagaggaatctaagcaagtcgaaactcagccggaaaaatggtccgtcgcaaagcatactcaatcttatccaacagatagctacggcgtactggagttccagggaggaggctactcaaacaaagccatgtacatacgcgtgagctatgacactaaacctgattctctgctgcacctaatggtgaaggattggcaactggagcttcccaaattactgattagcgttcacggtgggctgcagaacttcgaaatgcagccaaagctgaagcaggttttcggcaaagggttgatcaaagccgccatgactactggagcatggattttcactggcggcgttagtactggcgtgatcagtcacgtgggagacgccctgaaagatcacagcagcaaaagtagagggcgagtttgcgcgattggcattgccccctgggggatcgttgagaataaggaagatctcgtgggcaaggatgtgactagggtttaccagaccatgtctaaccccctgagcaagctgtcagtacttaacaattcccatactcacttcattcttgccgataacggcacactgggcaaatacggcgctgaagtcaagttgcgtcgtctcctggaaaagcacatttcactgcagaaaatcaacacacggttggggcagggtgtgccactcgttggcttggtagttgaaggaggcccgaacgtcgtttcaattgtcctggagtatttgcaagaggagcccccaatccccgtggtgatctgcgacgggtcagggcgcgcctccgacatcttgtctttcgcccataagtattgtgaggagggcggaatcattaacgaatccctgcgggagcaattactggtaaccatccagaaaactttcaactacaacaaagctcaaagccaccagctgttcgccataatcatggaatgtatgaagaagaaagaattagtgaccgtgttccggatgggttcagaggggcagcaggacatcgaaatggcaattctcaccgcccttctgaaaggcactaatgtcagcgctccggatcaactctcattggctcttgcttggaaccgagtggatatcgcccgatctcagattttcgtcttcgggcctcattggcctcccctggggtcgctggccccgccaactgatagtaaagcaaccgagaaagagaaaaagcccccaatggccaccacaaaaggcgggcgcggaaagggtaagggaaagaaaaaggggaaggtgaaggaggaggtggaagaggagactgatccccggaaaattgagctcctgaattgggtgaacgctcttgagcaggctatgctcgacgcactggtcctggatcgagtcgactttgtgaagctcctaatcgagaacggggtgaatatgcagcacttcctgacaattcctcgtttggaagagctttacaacacccggctgggcccaccgaacactctgcacctcttggtccgcgatgttaaaaagagtaacctgccccccgactatcacatctctctgatcgatataggtctggtgctcgaatacctgatgggcggggcttatcgatgcaattatacacggaagaatttccgcaccctttataacaacctgtttggtcccaagcgtccaaaggccctgaaactcctgggtatggaagacgacgagcctcctgccaagggaaagaagaaaaagaaaaagaagaaggaagaagaaatcgatatagatgttgatgatcccgctgtgtcacgctttcagtatcctttccacgaactgatggtgtgggcagtgctgatgaaaagacagaagatggccgtgttcctctggcagcggggcgaggagtccatggccaaagccctggtggcttgcaaactctataaggcaatggctcacgagagcagcgagagtgatctggtggatgacatttcgcaggacctcgacaataactcgaaggattttgggcagctggccctggaactgctggaccagtcctacaaacatgacgaacagatcgctatgaagctattgacctatgaactcaaaaattggtccaattccacatgccttaaactggccgtggccgcgaagcatcgggacttcatcgcccatacctgcagtcagatgctgctcacagatatgtggatgggccgcctgcggatgcgaaagaatccaggcctaaaagttattatgggtattctgcttccgcccacaatcctcttcttggagttccgcacttatgacgacttctcgtatcagacctccaaggaaaatgaggacgggaaggaaaaagaggaggagaatacggatgctaatgccgatgctggatcacgcaagggggacgaggaaaatgagcataaaaaacagcgatccatcccgatcggaaccaagatttgtgagttttataacgcccccattgtgaagttttggttctacacaatctcttatttaggttacttgctgctatttaactatgttatactcgtgcgaatggacggatggccctctctacaggagtggatcgtgatctcctatattgtatcactggcccttgaaaagatccgcgaaattctcatgagcgagccaggtaagctttctcagaagatcaaagtatggttacaagagtactggaacatcaccgacctagtagccataagtacatttatgatcggggcaatcttgcgccttcagaaccaaccctacatgggctatggccgagtgatttactgcgtggacattatattctggtatatccgtgtgctcgacattttcggcgttaacaagtacctgggtccttatgtgatgatgattggcaagatgatgatagatatgctgtactttgttgtcatcatgctcgtagtcttgatgtcatttggcgtggccaggcaggcaatcctgcatcccgaggagaaacccagttggaagcttgctcggaatattttctatatgccgtactggatgatttacggggaggtctttgccgaccaaattgatctatacgcaatggagataaaccccccctgtggcgaaaacttatacgacgaagaaggtaaaagactcccgccatgtattcctggcgcctggctgactcccgctctgatggcttgttatctactcgttgctaacatacttttggtgaatctattaattgcggttttcaacaacaccttcttcgaagtgaagagtattagcaatcaggtgtggaagttccagaggtatcagctgatcatgacttttcacgaccggccagtactgccccctccgatgattattctgagccacatctacattattattatgagattatccggcaggtgtaggaaaaagcgggagggggaccaagaggaacgggatcgcgggcttaagctgttcctttcagatgaggagctcaagcgcctccacgagtttgaggagcaatgtgttcaagaacacttccgcgagaaggaagacgagcagcagtccagctctgacgagaggataagagtgacgtcggagcgggtcgagaatatgtctatgcgcctggaagagattaatgagagagaaacttttatgaagacgtcgttacagactgtggacttgcgcttggctcagttagaagaactgtccaaccgtatggtgaatgctctcgaaaatcttgccggaatcgataggtctgatttaattcaggcgaggagtagggcgagctcggaatgcgaggcgacatacttacttcgccagtcttccatcaacagcgcggacgggtattccctctaccggtatcacttcaacggagaggagttgctgtttgaggacacatctctgagtacctcaccaggtacaggcgtgcgtaaaaaaacgtgctctttccgtatcaaagaagaaaaggatgtcaaaacacatctggtacctgagtgccaaaatagcttacacctgtccttgggaacgtccaccagtgctacgccagatggatcccatctcgctgtggatgatctaaagaacgccgaggaatccaagctgggcccggatatcggaatatctaaagaagatgatgagaggcagacagatagtaagaaggaagagacaatctccccttcgctgaataaaaccgacgtgatccacgggcaggacaaaagcgatgtgcaaaacacccagcttactgtcgagactacaaacattgagggcacaatctcctacccccttgaggagacgaaaattacaaggtacttccccgatgagaccatcaatgcctgtaaaactatgaagagccgctcattcgtatattcccgggggaggaagctggtgggcggcgtgaatcaagacgttgaatactcctccattacagatcagcaactgaccacagagtggcaatgccaggtgcagaagatcacccgatcgcactcaacagatataccatatatcgttagcgaagccgccgtccaggccgaacataaggagcaatttgcggacatgcaggatgagcaccatgtcgcagaggctatcccgcgaatccctcgtttaagtcttaccatcacagataggaacggcatggagaatctgctttcggtaaagccggatcagacccttggcttcccttcgctgagatctaagtctttgcacggacatcctaggaatgtcaaaagcattcaaggaaagctcgaccgttctggacacgcctcttccgtgtctagtctagtgattgtgagcggtatgacagccgaagagaagaaagtgaaaaaggaaaaagcatcgaccgagaccgagtgctag

SEQ ID NO: 128216 - DNA, 4812 bp, Artificial Sequence
  derived and/or modified sequence
atgaaggacagcaaccggtgctgctgcggccagttcaccaaccagcacatccctccccttccctctgccacaccgagcaaaaatgaggaagaaagtaaacaggttgaaacacagcccgaaaagtggagtgtcgctaaacatactcaatcctatccgaccgactcttatggcgttttggagttccagggtggcggctacagtaacaaggcgatgtatattcgcgtgagctacgatacaaagcccgatagcctgttgcacctcatggttaaagactggcagcttgagctcccgaaactgttgatcagcgtgcacggcggattacagaacttcgaaatgcagccaaaacttaagcaagtgtttgggaagggactgatcaaggcggctatgacaaccggtgcatggatctttaccgggggtgtgtctacaggcgtgatctctcacgtcggtgacgccctgaaagatcacagcagtaaaagcaggggtagagtttgcgccattggcatcgccccctggggaatcgtggaaaataaggaggacctggtgggaaaggatgtgacccgggtatatcagactatgtcaaatcccctgtctaagcttagcgtcctgaacaatagccacacacattttatattggccgacaacggtactctgggtaaatatggtgccgaggtgaaattgcgaaggttactagaaaaacacattagtcttcaaaaaattaacactcgcctgggccagggagttcctctagtgggcttggttgtggagggaggccccaatgtggtgagcatcgtgctggaatacttgcaggaagagccgccaattcctgtggtgatatgcgacgggtctggtcgagcatctgacatcctttccttcgctcacaaatactgcgaagaaggcggaatcattaatgagtcactgagagagcagctcttagtcactatacaaaagacgtttaattacaataaagcccagagccaccaattgttcgccattatcatggaatgcatgaaaaagaaagaactggttacagtgtttcggatgggatccgaaggtcagcaggatatcgaaatggcgattctcacggcgctcctgaaagggaccaacgtctcggccccggatcagctgtcgctggctcttgcttggaacagggtagatatagcaaggagtcaaatctttgtgttcggcccccattggccgccattgggctcactggcccctcctaccgacagtaaagccactgaaaaggagaaaaagccaccgatggcgactactaagggagggcgcgggaaaggaaagggtaagaagaaaggaaaagtgaaggaggaagtggaggaggaaactgaccccagaaagatcgaattattaaattgggtcaacgctctggaacaggcaatgctggatgctcttgtcctggatcgtgtcgacttcgtaaagttgctcattgagaatggggtgaatatgcagcacttccttacaatcccccgcctcgaggagctgtacaataccaggctggggcccccaaatacgctacatttgctcgtacgggacgtgaagaagtccaatctccccccagactatcacatttccctgatcgatatcggcttggttctggagtatttaatgggcggcgcctaccgctgcaattacaccagaaaaaatttccgtaccctctataataacttatttggacctaagcgccccaaggcactgaaactgctcgggatggaggatgacgagccgccagccaagggcaagaaaaaaaaaaagaagaagaaggaagaggagatcgacatagacgtggatgatcctgcagtgtctaggttccagtaccccttccatgaattaatggtctgggccgtgctcatgaagcggcagaaaatggctgtatttctgtggcagaggggggaagagtctatggcaaaggccctggtggcctgcaagctttataaagccatggcccacgagagctctgagtcagatctggtggatgatatttctcaggacctcgataataactccaaagatttcgggcagttggctcttgagttacttgaccagtcttacaagcatgatgagcagatcgccatgaagcttctcacatatgaactgaaaaactggtcgaattccacatgtcttaaactcgctgtagcagccaaacacagggactttatagcccatacatgctctcagatgctccttacagacatgtggatgggacggctgcgcatgcgcaaaaaccctggtctgaaggttatcatgggtatcctattgcctcctaccattctatttctcgagtttcgcacatatgatgacttcagctatcagacttcaaaagaaaatgaggacggaaaggagaaggaagaagaaaatacagatgcgaacgctgatgcaggttctaggaagggtgatgaagagaacgaacacaaaaagcagagatccatccctatcggaacaaagatctgcgagttttacaatgcacctattgtcaagttctggttttacaccatttcctaccttggctatttacttctgttcaattacgtgattctggtgcggatggacggatggccttcactacaagaatggattgtgatctcatacatcgtttcgctcgccctggagaagattagggagatcttgatgagtgagccaggcaaactgtcacagaagatcaaagtgtggctccaggagtactggaacattactgatcttgttgcaatctccacctttatgatcggggccatcctcaggttgcaaaaccagccttacatgggttacggacgcgtgatatactgcgtggatattatcttttggtatattcgggtgctcgatatcttcggggttaacaaatacctcggtccctatgtgatgatgatcgggaaaatgatgatagacatgttatactttgtggtcatcatgttggtggtacttatgtcgtttggcgtggctaggcaggccatcctccatcccgaggaaaagccctcctggaagcttgcgcgaaatattttttacatgccctactggatgatctatggtgaagtgtttgccgaccagatcgatctttacgctatggaaataaacccaccatgtggggaaaatttgtatgacgaggagggcaaacgcctgccaccatgcattccaggcgcttggctaacgccagctcttatggcatgttacctgctagtagcaaatatcttgctggtgaatctgctgattgcagtcttcaacaatacattcttcgaggtcaagtcaatttccaaccaagtgtggaaattccaacgctatcagctgattatgacattccacgacagaccagtcctgccaccgccaatgatcatactgtctcatatatacatcataatcatgcgactgagtggccgatgtaggaagaagagggaaggagaccaggaagagagggatcgcggactaaagctgtttttgtccgacgaagagttgaaaagattacatgagttcgaagaacagtgcgtgcaagagcactttcgggaaaaggaagatgaacaacaaagcagctctgacgaaagaatccgggtcacctctgagcgtgtcgagaacatgagcatgagactggaggaaattaatgagcgagaaaccttcatgaaaacgtctcttcagacagtggatctccggctggcccagctggaggaacttagcaatagaatggtcaacgctctggagaacctcgccgggatcgaccgaagcgacttgattcaagcgcggtcacgcgcctcttctgaatgcgaagccacctacctcctccggcagagcagtatcaatagtgccgacggatattctctgtataggtatcactttaatggcgaagagttgcttttcgaagacaccagcctgagtacttctccggggaccggtgtgcgaaaaaaaacttgttcatttcggattaaagaggaaaaggacgtcaaaacacacctggtgccagaatgtcagaatagcctgcacctatcattggggacctctacaagcgctacgccggacggctcccacctagccgtggatgatctgaaaaatgccgaagagtctaagctcggaccagatattggcatctccaaggaagatgacgagcgtcagactgactctaagaaagaggaaacaatctctcctagcctcaataagaccgacgtcatccacggccaagacaaaagcgatgtccagaatacccagctgactgttgagacaactaacatcgaaggcactattagctaccccctcgaggagacaaagatcacgagatactttccagatgaaacaatcaacgcctgcaagaccatgaaatctcgcagttttgtttactctaggggcagaaaactggtgggcggcgtgaaccaggatgtcgaatattcatctataaccgatcagcaattgaccaccgagtggcagtgccaagtccaaaaaatcaccagaagtcacagcacagatataccttacatcgtctctgaggctgctgtacaggctgagcataaagaacagttcgctgatatgcaagacgaacaccatgtcgccgaggccatcccccggatcccccgcttaagtctgaccattaccgaccggaatggcatggaaaatctactgagcgtgaagcctgaccagacgctgggatttccttcactaagatctaagtcacttcacgggcaccctagaaacgtgaaatcaatacagggcaagctagatcggagtggccacgcctcctccgtgtcaagcctggtaatcgtgagcgggatgacagcagaggagaagaaggtgaagaaagagaaggcttctaccgaaaccgaatgttag

SEQ ID NO: 128217 - DNA, 4173 bp, Artificial Sequence
  derived and/or modified sequence
atgaaggacagcaaccggtgctgctgcggccagttcaccaaccagcatatccccccacttccttccgcaacaccgagcaaaaatgaggaggaatctaaacaggtcgagactcagcctgaaaagtggtctgtcgccaagcacacccagtcctaccctacagacagctatggcgttcttgaatttcagggtgggggttacagcaataaagctatgtacattcgagtctcctatgacaccaagccggactccctactacatctgatggtgaaggattggcagctcgaacttccaaaactgctcatctcagtacatggaggattgcagaactttgagatgcagcccaagctgaagcaggtctttggcaaggggttaatcaaggcagccatgactacgggagcctggatcttcactgggggggtgtcaactggcgtgataagtcacgtcggggacgcattaaaagaccatagctcgaagtcccggggcagagtgtgtgcaatcggcatcgctccctggggcatcgtagagaataaagaagatctcgttggtaaagatgtgaccagagtttaccagaccatgtcaaatcccctcagcaaactgagtgtgctgaacaattcgcacacacatttcattctggccgataacggtacgcttggaaagtacggcgccgaggtcaaactaagacgactgctggagaagcacattagcctgcagaagattaatacaaggctgggtcagggtgtgcctctggtggggttggtggtggaaggagggcccaacgtagtaagcatcgtcctcgaatatctgcaggaagagccacccattcccgttgtgatctgcgatggcagcggtagagcatctgatattctgtccttcgctcacaaatattgtgaggaagggggcatcatcaatgaaagcctaagagagcagctcctcgtcacaattcagaagactttcaactataataaggcacagagccaccagctctttgctatcatcatggaatgcatgaaaaaaaaggagttagtgaccgtgtttcgtatggggagtgagggccagcaggatattgaaatggctatactaaccgctctccttaaggggaccaacgtatcagctcccgaccagctgagtctcgctctggcctggaacagggtggatattgcgcggtcacagattttcgtgttcggcccccattggcctcccctcggcagtctcgctccaccaacagacagcaaggccaccgagaaggagaagaagccccccatggccactacaaagggcggccgcgggaaaggcaaggggaagaagaagggtaaagtgaaggaggaggtagaagaggagacggaccctcgaaagattgagttgctgaattgggttaatgccctggagcaggccatgctggatgccctggtcctggaccgcgtcgattttgtcaaactgttgatcgagaacggggtaaatatgcagcactttctgaccatcccaaggcttgaggagttgtataatacgaggctgggcccccctaataccttacatcttctggtaagggacgtgaagaaaagcaacctcccaccagactatcatattagcctgatcgacataggccttgtcctggagtatctgatgggtggggcctacaggtgcaactacacccggaaaaattttcggaccttatacaataatctgtttggacctaaaaggccaaaggctcttaagctgctggggatggaggacgatgagcctcctgccaagggcaaaaagaagaagaaaaagaagaaggaagaggagatcgatatcgacgttgatgatcccgcggtgagcagatttcagtatccctttcatgagctcatggtgtgggccgttctcatgaagagacaaaagatggctgtgttcttgtggcagagaggggaggagtctatggctaaggccttggtcgcatgtaagttgtacaaggccatggcgcacgaaagcagcgagagcgatcttgtggatgatatttcgcaggatctcgacaacaacagcaaggacttcgggcagctcgccttagagctgcttgaccagtcatataaacacgatgaacaaatagcgatgaaactgttgacatacgaactcaaaaattggtccaactccacttgcttaaaattggcagtcgccgccaaacatagggactttatagcacatacctgtagccaaatgctgctgaccgacatgtggatggggaggctcaggatgcggaagaatccaggattgaaggtgatcatgggcattttgcttccacctaccatcctgtttctggagtttagaacatacgacgatttcagttatcagacatccaaggagaacgaggacggcaaagagaaggaagaggaaaacaccgacgccaacgctgacgccggtagtagaaagggtgacgaggaaaacgagcacaaaaagcagcggagtatccccatcggaaccaagatctgtgagttttataacgctcctatcgtgaaattttggttttataccatatcctaccttggctacctgctgctttttaattacgtgatactggtgcggatggacgggtggccaagccttcaagaatggatagtcatctcatacattgtgtctttggcactagaaaagatcagagaaatcttaatgtccgagcctggaaaactctcccaaaaaatcaaagtgtggctgcaggagtattggaatattactgacctggtggctatttctacattcatgattggagcgattttgcgcctgcagaaccagccttacatgggctatggcagagttatctactgcgttgatataatcttctggtacatccgcgttctggacattttcggggtgaacaagtatctgggaccttatgtaatgatgatcggtaaaatgatgatagatatgctgtattttgtggtgatcatgctcgtggtgcttatgtcattcggtgtggcccggcaggccatacttcatcccgaagaaaagccctcatggaaattagccagaaacatcttttacatgccttattggatgatttacggtgaggtgtttgcggatcagatagacctgtacgctatggagatcaaccccccttgcggagaaaacctgtacgacgaggaaggcaagcgtctccctccatgtattccgggggcgtggctgacgcccgctttgatggcatgctatctcctggtcgcaaacatcctgctcgtgaatcttctcatagctgtctttaacaatacttttttcgaggtaaaaagcatttcaaatcaagtgtggaagttccagagatatcagctcatcatgacttttcatgaccgccctgtgctgccacctccaatgattatcctctcccacatttatatcattatcatgcgattgtccggccggtgcaggaaaaagagggagggagaccaggaggaacgagaccgaggcttgaaactgttcctgtctgatgaagagcttaaaaggctgcatgagttcgaagagcagtgcgtgcaggagcactttcgggagaaggaagatgagcagcagtcttcaagcgacgaacggataagggtgaccagcgaaagagtcgagaacatgagcatgcggcttgaagagatcaacgaaagggaaacctttatgaaaacctcccttcagactgtcgatctgaggctggctcaactggaggagctctctaataggatggtgaatgcccttgagaacctggctggcatcgataggagtgacttaatccaagctagatccagggcgagctccgagtgcgaagccacgtatttgctgcggcagtcttctattaattctgcggatggttacagcctatataggtatcacttcaatggtgaagaactcctgtttgaagacaccagtctctctacttcccccggtaccggcgtgagaaagaagacatgcagctttagaataaaggaagaaaaggatgtgaagacacacctcgtgcccgaatgtcagaacagcctgcatctgtccctgggtacgagcacctctgccacaccggatggcagccaccttgctgtggacgacctgaagaatgctgaagagagcaagctgggccccgacatcgggatctcaaaagaagatgatgagcggcagactgatagcaaaaaggaggagactatttctccatccctcaataagactgatgtgatccatgggcagtag

SEQ ID NO: 128218 - DNA, 4584 bp, Artificial Sequence
  derived and/or modified sequence
atgtacatccgggtgagctacgacaccaagcccgacagcctgctgcacctgatggtgaaggattggcagctcgagctgccgaagctgttaatcagcgttcacggagggctacagaattttgaaatgcagccgaaacttaaacaggtctttggaaaaggtcttatcaaagccgccatgaccaccggagcctggattttcactgggggagtcagtaccggcgtcatttcccacgtgggagatgccctgaaggaccactcatcaaagagccggggccgggtctgtgctatcgggattgcaccttgggggattgtggagaataaggaagacttagtcggtaaggacgtgacacgagtgtaccagacaatgtcaaaccccttgagcaagctgtcagtgctgaacaatagtcacacacacttcatcttggccgataacggaacattgggtaaatacggagccgaggtgaagctcagacgcctgctggagaagcatatttccctacaaaaaattaatacccgtttgggtcaaggagtacccctcgtgggtcttgtcgtggagggcggccctaacgtcgtctccattgtccttgagtacttgcaggaggaacctcccatcccggtagtcatctgcgatggctctggccgggcatctgatatcctgagctttgctcataagatcattaatgaatcactgagagagcaactgttggtgaccattcagaaaaccttcaattacaataaggcccagtcacatcagctgttcgctataatcatggaatgtatgaagaagaaagaactggtgacagtattccgcatgggctctgaggggcagcaggatatagagatggctatcttgacagctcttctgaaaggcacaaacgtttccgcacctgatcaactcagcctcgcgctcgcctggaatagggtcgacatcgcacgttctcaaatattcgtgtttgggccccactggccacctctggggagcttagcacctccgacggacagcaaggctacagagaaggaaaagaaaccccctatggccacaaccaagggcggccgtggaaagggaaagggtaaaaagaaagggaaagtgaaagaggaggtcgaggaggagactgatccacggaagatcgaattgcttaactgggtgaacgctttggagcaggccatgctggacgctcttgtgctggaccgggtggattttgtcaagctcctgatcgagaatggcgtgaatatgcagcatttcctgacaattccccgacttgaggagctgtacaacacccggctcggaccacccaataccttacacctgctggtgcgggacgttaagaagtccaatctgccaccagattaccacataagtctgattgacatcgggcttgtgctggaatatctgatgggcggggcctatcgatgcaattatacacgcaagaacttcaggactctttataacaatctgttcggacctaagcgtcccaaggctctcaagctgctcggtatggaagacgatgaaccgccagccaagggtaagaagaaaaagaagaagaaaaaggaagaagagattgacatcgatgtcgatgacccggccgtgtcaaggttccagtacccattccatgagctgatggtgtgggccgttctcatgaagcggcagaaaatggcagttttcctctggcagcgtggggaggaaagtatggctaaggccttggtggcctgcaagctgtacaaggcaatggcgcatgaatcctcagagagcgacttagttgacgacatcagtcaggacctagataacaactcaaaggattttgggcagttagctctggaactgctcgatcagagctataagcacgacgagcagatcgccatgaaactcctaacttacgaactgaaaaactggtctaactctacctgccttaagctagcagtcgccgctaagcaccgagactttatcgcccacacttgcagtcagatgctccttaccgatatgtggatgggtagactgcggatgagaaaaaaccccgggctcaaggtcattatgggcatcctactaccaccgaccatcttgttcctcgagttccgcacttacgatgattttagctaccagaccagtaaagagaacgaagatggcaaggaaaaagaggaagaaaacaccgacgccaatgctgacgcgggctccagaaagggtgacgaggagaatgagcacaaaaaacagagatcaattccaattgggacaaaaatttgcgagttttacaacgccccgatcgtaaagttctggttttacacaatctcctacttgggctatctcctcctctttaactacgtgatactggtcaggatggacggctggcctagcttacaggagtggatcgttatctcctatatagtgagtcttgccttagagaaaattcgcgaaatcctgatgtctgaaccagggaagcttagccaaaagatcaaagtctggctccaggaatattggaatatcacagatctggttgctatcagcactttcatgattggcgctatcctccggctccagaaccagccatacatgggctacggacgcgtgatttattgtgttgatataattttttggtatattcgagttctagatattttcggtgttaataaataccttggcccttatgtaatgatgattggaaaaatgatgatagacatgctatacttcgtagtgatcatgctggtcgttctgatgtcttttggtgtcgcccgccaggccatcttgcacccagaggagaagccctcatggaaactggctcggaatatattttatatgccatactggatgatttatggtgaagtttttgctgatcaaatcgatctgtatgctatggagattaatcctccctgtggagaaaatctatacgacgaggagggtaagcgtctgcctccctgtattccaggtgcttggctgactccagcactcatggcgtgttatcttctagtggcaaacatactgcttgtaaacctgctcattgcggtgtttaataataccttctttgaagtgaagagcatcagcaaccaggtctggaagttccaacggtaccagttgataatgacgttccatgatagaccagtgctgcccccacccatgataattctctctcatatctacatcatcattatgcgcctgagcgggcgttgccgcaaaaaaagggagggcgaccaagaggaacgtgacagaggcctgaagctgtttctgtcagacgaggaactgaagagactccacgagttcgaggaacaatgcgtgcaggagcatttcagagagaaggaagacgaacaacagtcgtcctctgacgaaagaatacgtgtgactagcgagcgggttgagaatatgtctatgcgtctggaggagataaatgaacgggagacattcatgaaaactagcctgcagaccgttgacttaaggctagcccagctggaagagctctccaacagaatggtgaacgccctggagaatctcgctggcatagacagatcggacttaatccaggcccgctcacgcgcaagttctgagtgtgaggcaacttatctgttgcggcaatcatccatcaatagtgctgacggatattcactgtaccgataccatttcaatggcgaagaactcctgtttgaggataccagtctttctacaagccctggaaccggggttcgcaagaagacatgcagctttcggatcaaggaggagaaggacgtgaagacccacctagtccccgagtgtcagaattccctgcatttgagtctgggcactagcacttcggccaccccagatggatcacacttagccgtcgacgatctcaagaacgccgaggagagtaagctcggaccagatattggcatttcgaaggaggacgatgaaaggcaaacagatagcaaaaaggaggagacaatctctccaagtttgaataagaccgacgtgatccatggacaggataaatctgacgtgcaaaacactcagctgacagtggagaccactaacatcgaaggcactattagttaccccctcgaggagacaaagattactagatatttcccagacgagacaatcaatgcctgcaagacaatgaagtctcgcagtttcgtttatagccggggcagaaagctggtaggtggggtgaatcaggatgtagagtactcctctataacggaccagcagcttactactgagtggcagtgtcaggtccagaagattacaaggagccacagtacggacatcccatacattgtgagtgaggcggccgtgcaagccgaacacaaggagcagttcgccgatatgcaagatgaacaccacgtggctgaggcaatcccccgcattccacggcttagcctgacaataaccgaccgtaatggaatggaaaacttgttgagcgtcaagccggaccaaacacttgggttcccgtccctcaggtctaaatcgctgcatggccaccccaggaatgttaagagcatccagggaaagttggacagatctggccatgcaagtagcgtctcatccttggtaatcgtgtccggaatgacagcagaagagaagaaggtgaaaaaagagaaggctagtactgaaactgagtgctag

SEQ ID NO: 128219 - DNA, 4812 bp, Artificial Sequence
  derived and/or modified sequence
attaagacttctaagcggtgctgctgtggccagttcaccaaccaacacatcccaccacttccttccgccactccgtcaaagaacgaggaagagtcaaagcaggtcgagacacagcccgaaaaatggagtgtggcaaagcacacacaatcctacccaacggattcctatggagtgctggaattccaaggcggaggctactccaataaagccatgtacatcagagtgtcatacgataccaaaccagattccctgctgcatttaatggtgaaagattggcaactggaactgcccaaattactcattagtgttcacggcggtctccagaactttgagatgcagccgaagcttaagcaagtcttcggtaaaggcctgatcaaagctgctatgaccactggcgcttggatatttacgggaggtgtgtccaccggggtcatctcacacgtaggagacgcattaaaagaccactcaagtaaatctcgaggaagagtgtgcgccattggcattgccccatgggggatcgttgaaaacaaagaagacctcgtgggcaaggacgtgaccagggtgtaccaaacaatgtctaatcccctcagcaagctctccgtgctcaacaacagtcatacccatttcatactcgctgacaatggaacattggggaaatatggagcagaggtgaaattgcggagactcttagagaaacacatctctctgcagaagatcaatacgcgccttggacagggggtgcctctggtgggcctggtggtggagggtggacctaatgtagtttccattgttttggagtacctgcaagaggaaccaccaattccagtcgtaatctgtgacggcagcggtcgggcatccgacattctgtcatttgctcacaaatactgcgaagagggaggcatcataaatgagagtttgcgtgaacaactgctggttacaatccagaagacttttaattacaacaaagctcagtcccaccaattgtttgccattatcatggagtgtatgaaaaagaaagaacttgttaccgtattcaggatgggctctgagggacagcaggatattgagatggcaatattaaccgcgctcttaaaagggacaaatgttagcgctcctgatcagttgtctctggccctggcctggaacagagtggatatagccagatctcaaattttcgtgttcgggccacactggccacccctgggttcactggctccgcctaccgatagcaaagcaaccgagaaggagaagaaaccacccatggccacgactaagggtggacggggaaaaggtaaaggtaaaaagaaggggaaagtcaaagaggaagtggaggaggaaaccgatccacggaagattgagttgctgaactgggtcaatgccctggaacaggcaatgcttgacgctctggttctggatcgcgtggattttgtcaaactgctcattgaaaatggtgtgaacatgcagcattttctgactatacctagactagaagaattgtacaacacacggttggggcctcccaatacactccaccttctggtacgcgacgtcaaaaagtccaacctaccgcctgactatcacatatctctgatcgacatcggccttgttctggagtacctgatgggaggcgcatatcgatgcaactacacacggaaaaacttccgcaccctctataacaatctgttcggaccaaagagacccaaagctttaaagctcctcggcatggaggacgatgagccacccgcaaaagggaaaaaaaaaaagaagaaaaagaaagaagaggagatcgatatagacgtcgatgaccctgccgtgtctcgctttcagtaccccttccacgagctgatggtctgggccgtcctgatgaagaggcagaagatggcggtgttcctctggcaaagaggggaagaatctatggctaaggcactggtggcctgcaaactgtacaaagccatggcccacgagtcaagcgaatcggatctcgtcgacgacatcagccaggacctggacaataactctaaagattttggacagctggcactcgaactgttggaccagagctacaagcacgacgagcaaatcgcaatgaaactcctcacctatgagctgaagaactggagtaacagcacctgtctgaaactagcggtcgcggcaaagcatagagactttatcgctcatacctgttcacagatgttgttgaccgacatgtggatgggacgcctccgtatgcggaagaaccccggtctgaaggtgataatgggtatccttctgccacctactatcctgtttctagaattcaggacttacgacgatttttcctatcaaacttcaaaagagaacgaagacggcaaggagaaagaagaagaaaatacagacgccaacgccgacgctgggagccgtaaaggggacgaagaaaatgagcataaaaaacaaagatcaattcctatcggcacaaaaatttgtgaattttacaacgcgcctatcgtaaagttctggttttacacaatttcctacctgggttacctgctgctgttcaattacgtgattctagtgcgcatggatggttggcccagcctccaggaatggatagtgatttcatacatagtcagcctggccctcgagaaaatcagggaaattctgatgagcgagcccggaaagctgagtcagaagatcaaagtgtggctccaggagtattggaacattactgacctggttgccatcagcacattcatgattggcgcaatcctccggctacagaaccagccttacatgggatacggcagggtgatctattgcgtggacatcatcttttggtacataagggttctggatattttcggggtcaataaatatcttggaccttatgtcatgatgataggtaaaatgatgatcgacatgctgtatttcgtggtgattatgctcgtggtattgatgagcttcggggtcgctcgacaggctattctgcaccctgaagagaagccttcttggaaattagcccgtaacattttttatatgccgtactggatgatatatggcgaagtgttcgccgaccagatcgacctttacgctatggagattaaccctccgtgtggcgaaaatctgtatgacgaggaaggcaaacggctccctccatgtatccccggtgcctggctcactccagctctgatggcgtgctacctgctggttgccaacatattgctagtcaacctgttgattgctgttttcaacaacactttctttgaagttaagagtatctccaatcaggtgtggaaatttcagcgctaccagctgattatgacctttcatgaccggcctgtgctgcccccacccatgatcatcctgtctcatatttatattattattatgagactctcgggacgctgccgcaagaagcgcgagggtgaccaggaagaaagagaccggggactgaagttgtttctttctgacgaagaattaaaacgactccacgagtttgaagaacagtgtgtacaagaacatttccgagagaaggaggatgagcagcaatcttcctctgatgagagaatccgagtgacttctgaacgcgtggagaatatgtccatgaggctagaggagatcaatgaaagagagacattcatgaagacatctctccaaacagtcgatctaagattggcacagctcgaggaactgagcaaccggatggtgaacgccttggagaacttagcaggaattgatagatctgacttgattcaagctcgatcccgagccagttctgagtgcgaggccacttacctgcttcgccagtcctccattaattccgctgacggctattccttgtatcgataccacttcaacggggaggaacttcttttcgaggatacaagcctgtctacatcgccaggcacgggagtacggaagaaaacttgttccttcaggatcaaggaggagaaggatgtcaaaacccaccttgtcccggaatgccaaaatagtctgcacctgtccttgggtactagtacctctgcaactcccgacgggtctcacctcgccgttgacgacttgaaaaatgctgaggagagcaaactggggcctgatatcggcatctcaaaagaagatgatgagaggcaaacagacagtaaaaaggaggaaactatctcccccagtctgaacaaaaccgatgtgatccatggccaggataagagcgacgtccagaacacccagctcaccgtggaaacaacaaacatagaggggacaatctcgtacccacttgaagaaacaaagatcaccaggtacttcccagacgaaactatcaatgcatgcaagactatgaaatcaagatcgtttgtctactcaagggggaggaaactcgttggaggcgtgaaccaagatgtcgagtactcaagtataaccgatcagcagctcacaacagaatggcagtgtcaggtgcaaaaaatcactcgaagccacagcaccgatattccctacatcgtttccgaagcggcagtccaggcagagcataaggagcaattcgccgacatgcaagatgaacaccatgttgcggaagctatcccaaggataccgaggttatccttgacaataaccgatcggaatggcatggagaacctgctctccgttaagccagaccagacacttggttttccctctttgcgctcaaagtctttgcatggtcaccctaggaatgttaaaagcatccaaggaaagctcgaccgtagtggccacgcttcaagcgttagctctctcgtgatcgtctcaggaatgacagcggaggagaagaaagttaaaaaagaaaaggcatcgactgagactgagtgctag

SEQ ID NO: 128220 - DNA, 4812 bp, Artificial Sequence
  derived and/or modified sequence
atgaaagactccaacaggtgttgctgtggacagttcaccaatcagcatatccctcctcttccttccgccaccccttctaagaacgaggaggagtccaaacaggtggagacacagccggaaaagtggagcgtggccaagcacacccagagttaccctacagactcctacggggtcttagagttccagggtggaggctactctaataaagccatgtatatccgcgtgtcatacgacactaagcccgacagcctgctgcacctcatggttaaagattggcagcttgagctacctaagctgctcatcagcgtccatggagggttgcagaatttcgagatgcagccaaagcttaagcaggtcttcggaaagggcttgataaaggccgctatgaccactggggcatggatctttaccgggggtgtcagcacgggtgtgatctcacacgttggtgatgccctgaaggatcacagctccaaaagtagggggcgtgtttgtgccatcggcatcgccccatggggtatcgtcgaaaacaaggaggacctggtaggtaaagatgtcacacgagtctaccagacgatgtctaacccactgtccaaactgagcgtgctcaacaactcccacacccactttattttagcggataatggtacgctcggtaagtatggagccgaggtaaaactgcggagacttctggagaagcacattagtctacaaaagatcaatacccgtctggggcagggggtgccattggtggggcttgtggtcgaaggcggtcccaacgtagtgtctatcgtcctggagtatttgcaggaagagcccccaatccctgtcgtaatctgtgatggttcgggtcgcgctagtgatattctgtccttcgctcacaagtactgcgaggagggcggtataatcaatgagtctctgcgtgaacaactgttggtgacaatacagaagacattcaattataacaaggcacagagccatcagctgttcgcaatcataatggaatgcatgaagaaaaaggagctcgtcactgtttttaggatgggctccgagggacagcaagacatcgagatggctatactgacagcacttttaaaagggaccaatgtgagtgctcccgaccagctgagtctggctctggcctggaatagagtcgacatcgctagatctcagatctttgtttttggacctcattggccccctctagggagcctggcccctccaacagactctaaggcaacggagaaggagaagaagcctcccatggcaaccacaaaaggcggacggggtaaaggtaaggggaagaagaaggggaaagttaaagaagaggtggaagaggagacagaccctcggaagatcgagctcttaaattgggtgaacgcccttgaacaggccatgctggacgccctggtgcttgatcgcgtggatttcgtcaagttgctcattgaaaacggagttaacatgcagcactttcttacaattcccagactcgaagagctgtataatacacgcctcgggccaccaaatacccttcacctcctagtccgcgatgtcaaaaaatcaaatctgcctcctgactatcatatttctctgatcgacatcggcctggtgctagaatatctgatgggcggagcctatcggtgcaactacacccggaaaaatttcagaacgctctacaataacctgtttgggccaaaacgcccaaaagccctaaagttgctcggcatggaggacgacgaacctcctgcgaagggaaagaagaaaaagaaaaaaaagaaggaggaggagattgatatagatgtggacgatccagccgtgagccggtttcagtacccttttcacgaactgatggtctgggccgtcctgatgaagcgtcagaagatggctgtgttcctgtggcagcggggagaggagtctatggccaaggctcttgtggcgtgtaagttgtacaaagcgatggcccacgaaagtagcgagtccgacttagtggacgacatctcccaggatctggataataattcaaaagattttggccaactcgcgttagaacttctggaccagtcgtataagcatgatgaacaaatagctatgaagctgctgacctacgaactgaagaattggtctaacagtacatgcctgaagctagcggttgccgctaaacatcgtgatttcattgctcatacatgtagccagatgttattaacggacatgtggatgggccgacttcggatgcgtaagaaccctggtctgaaagtgattatgggcatcctactcccccctacaattcttttcctagaattcaggacctacgacgatttctcataccagacaagtaaagagaacgaggacggcaaagagaaggaagaggagaacacggatgccaacgccgatgccggtagccgcaaaggggatgaggaaaatgaacataaaaagcagaggtccatcccgatcgggaccaagatttgtgaattctacaacgcacctatcgtgaagttttggttctacacaatttcctacttaggctatcttctcctatttaactacgtaatactcgtcaggatggacggctggcctagcctgcaggaatggatcgttatctcatatatcgtgtcactggctctcgagaagatacgcgagattctgatgagcgaacccggaaagttgtcccagaagatcaaggtgtggctgcaggagtattggaatataacagatctcgtggctatcagcaccttcatgattggcgctattctgaggctacaaaaccagccatacatgggctatggacgggtgatttactgcgtggatatcatcttctggtatataagagtcttagacattttcggtgtgaacaaatatttgggcccttacgtgatgatgatcggcaaaatgatgatcgacatgctctacttcgtggtcataatgttagttgttctaatgtcgttcggggtggctcgccaggctatactacaccctgaggagaaaccctcttggaaactagcgcgaaatatcttctacatgccttactggatgatttatggggaggtcttcgccgaccagattgatctgtacgctatggaaattaaccccccttgtggggagaacctgtatgatgaagaggggaaaaggctcccaccatgcattccgggagcctggctgacacctgcactgatggcgtgttatcttctggtggctaatattctgttggtgaatttgctcatcgcagtgttcaataacacattcttcgaggtgaagagcatctccaaccaggtgtggaagttccagagataccaattgattatgacgtttcacgaccgaccagtgctgcccccaccgatgattatcctgtctcacatctatattattatcatgcggctgtctggcaggtgccggaaaaagcgcgagggtgatcaggaagagcgcgaccggggactcaagttgttcctgtccgatgaggaactgaaaaggctgcacgagtttgaggagcagtgcgtccaggaacactttagagagaaggaggatgaacagcagtcatcctccgatgaaaggattcgtgtgacgtcagagcgggtggagaatatgtccatgagacttgaggagattaatgaacgggaaacctttatgaaaacttccctgcagactgtggaccttcgcctggcccagctggaagaattatccaatagaatggtgaatgctctggagaatctggccggtattgacagaagtgatttgatacaagctagatctagggctagttcagagtgcgaggcgacatacctgctccggcagtcaagcatcaattccgcagacggatactccctgtaccggtaccacttcaacggagaagagttgctgtttgaagatacttcgctgtccacgagtcccggaactggtgttagaaagaaaacttgctcatttaggatcaaggaggagaaagacgtcaaaacacatcttgtaccggaatgtcagaattcactgcacttaagtctggggacttccacatccgccacacctgacgggagccatttagcagtcgatgatttgaaaaacgcagaagaaagcaaactcggtcccgacatcggcatctctaaggaagacgatgagagacagactgattctaagaaggaggaaactatctctccttctctcaacaaaacagacgtgatccacggccaagataagtccgacgtgcagaacacacagttgacggtcgagactaccaacatcgagggaacaatcagctacccactcgaagaaacaaagataactcgttactttccagatgaaacgataaatgcatgcaagaccatgaagtccagatctttcgtctactcaagaggccgaaagctggtaggtggagtgaaccaagacgtggaatacagctcaattaccgaccagcagctgacgactgaatggcagtgtcaggttcagaagataactaggtcgcacagcactgacattccatacattgtttccgaggccgcagtgcaggccgaacacaaggagcaattcgccgatatgcaggacgagcatcacgtggctgaagctatcccaaggatccctcgactgagcctgacaataaccgaccggaacggtatggagaaccttttgtctgtgaaaccagaccaaacccttggattcccgagtcttcgcagtaaatcactccacgggcacccacgaaatgttaaatccatccaagggaaactggaccggtccggccacgccagcagtgtcagttcactagtaatcgtctctggtatgacggccgaggagaagaaggtaaaaaaggaaaaggcctctactgagaccgagtgttag

SEQ ID NO: 128221 - DNA, 4173 bp, Artificial Sequence
  derived and/or modified sequence
atgaaagactcaaaccgctgttgttgtgggcagtttacgaatcaacacatcccgcctttgccttccgccacaccatctaagaatgaagaagagtccaagcaagtggagacgcagcctgagaagtggagcgtggcgaagcatacacagtcctatcccactgactcgtacggtgtactggagtttcaggggggaggctacagcaataaagcaatgtacatcagagtcagctatgacacgaaacccgactctctgcttcatctgatggtcaaagattggcagcttgagctcccgaaattgcttatttctgtgcatgggggtctgcagaactttgagatgcagcccaaactgaagcaggtgttcggcaagggactcatcaaagctgcaatgactactggcgcttggatattcacagggggagtgagcacaggagtcatcagccatgtgggagacgcactcaaggatcacagttccaaatcgcggggaagagtgtgcgcaattggcatcgccccatggggtatcgtggagaacaaggaagatctggttggtaaggacgtcacaagggtttatcagaccatgagtaacccgctgtcgaagctcagcgtgctcaacaatagccacacgcattttatcttggccgacaacggaacattgggtaaatacggtgctgaggtgaagcttaggcgtctccttgagaagcacatctccctgcaaaagatcaacacacgcttaggccaaggcgttcctttggttggcctggtggtcgaaggagggccaaacgtggttagcatagtactggagtaccttcaggaagaaccacccatcccagtcgtgatttgtgatggaagcgggagagcttctgatatcttgtccttcgcacataagtattgtgaggaagggggtattatcaatgaatcactgcgagaacagcttctcgtcaccatccaaaagacatttaactataataaagcgcaaagccatcagctcttcgccataatcatggagtgtatgaagaagaaggagctggtgacggtgttcagaatggggtctgaaggacagcaggatatcgaaatggcaatattaaccgccttactcaaggggacaaatgtctcggctcctgatcaactgagtctggccttagcctggaaccgggtggacatagcaagatcccagattttcgtgtttgggccacactggcctccactaggttccctcgccccacctacggacagcaaagctaccgagaaggagaagaaaccgccaatggcgaccactaaggggggtcgaggcaaggggaagggaaagaagaagggaaaagtgaaggaagaagttgaagaagagactgatcccaggaagatcgaactcctgaactgggtgaacgcactggagcaggctatgcttgatgctctagtcctggacagagtcgatttcgtaaagctcctaatagaaaatggagtgaacatgcaacactttctgacgattcccaggctcgaggaactttataatacaaggctgggaccaccaaatacgctgcatcttctcgtgcgagacgtgaaaaagagcaacttgcccccagattaccacatcagtctgattgacattggcctcgtgttagaatacctgatggggggtgcgtataggtgcaattacactcgtaaaaacttcaggacactttataataacctgttcgggcctaagaggcccaaggctctgaaactgctgggcatggaggatgacgagcccccagcaaagggcaagaagaaaaaaaagaagaagaaagaggaggagattgatattgatgtcgatgaccctgccgttagcaggtttcagtacccgtttcatgaactaatggtgtgggcagtccttatgaaaagacagaagatggcggtctttctgtggcagaggggagaggagagcatggccaaggctctcgtggcttgcaaactatataaggccatggcacacgaatcctctgaatccgatctggtcgacgatatcagccaggatttagataacaatagtaaagatttcgggcagctcgctctcgagctgttggatcagtcgtacaagcacgacgaacagatagctatgaagcttctcacctatgagcttaagaattggagcaactccacgtgcttaaagcttgctgttgccgctaagcaccgggactttattgcccatacatgctcccagatgctgctaaccgacatgtggatgggcagattacggatgagaaagaatcctggcctgaaagtgatcatgggcattctactgccccctacaattctgttccttgagtttcggacgtatgatgatttttcttatcagacctccaaagagaatgaggatggtaaagaaaaggaagaggaaaataccgacgcgaacgcggatgccggaagcaggaagggtgacgaagaaaacgagcataagaaacagaggtctattcctatcggaaccaagatttgtgaattctacaacgcacccatcgtgaaattttggttttataccatttcttaccttggttaccttctgcttttcaattacgtgattctggttcgaatggatggttggccatcgctgcaggaatggatcgtcatctcttatatcgtgagtctagccctcgaaaaaatccgggagatcctcatgtccgagcccggaaagctgtctcagaaaatcaaagtgtggctccaggagtactggaacataactgatcttgtcgccatatctaccttcatgattggcgcaattcttaggttgcagaaccagccctatatgggctacggcagggtgatatactgtgtagacatcatcttttggtatattcgcgtcttagatattttcggagttaacaagtatctggggccatacgtaatgatgattgggaagatgatgatagacatgttatatttcgtggtcatcatgttggtggtgctcatgagtttcggggtggcacgccaggccatcctccatccggaggagaagcccagttggaagctggctagaaacatcttttacatgccctattggatgatttacggtgaggtattcgcggaccagattgacctgtacgccatggagatcaatcctccttgcggcgagaacttatacgatgaagaaggtaagcgtcttcccccatgcattccgggagcctggctaactccagcactgatggcatgttatttactggtcgccaatattcttctggtgaacctcctgattgcagtttttaacaacacgttctttgaagtgaaaagcatttcaaaccaggtgtggaagttccagcgttatcagctgattatgactttccatgacagacccgtgttgcctcctcccatgatcattctctctcacatctacattataatcatgcgtttaagcggcaggtgccgcaaaaaaagggagggcgaccaggaagaaagagatcggggacttaaacttttcctctctgacgaggagctaaagagattacacgagttcgaggaacagtgcgtccaggaacactttagggaaaaagaggatgaacagcaatctagtagcgatgagcgaattcgggttacatccgagcgggttgaaaatatgagcatgagacttgaggaaattaacgagagagagacatttatgaagacctctctgcagaccgtggatctgcgcctggctcagctcgaagagctcagcaatagaatggtgaacgctctggagaacctcgctgggatcgataggagtgatctaattcaggcgcgatcacgggcttcaagcgagtgtgaggcaacctatctgcttcgccagtctagtataaattcggcagacggctattcattgtatcggtatcatttcaatggagaggagctgctgtttgaagacacctcgctctccactagtccgggaactggcgtaaggaagaagacatgcagttttaggattaaagaagagaaagacgtgaagacccatcttgtgcctgagtgtcagaactccctacacctctcactaggcacaagcacctctgcaacgccagacggctcccacctggccgtagatgacctgaagaatgccgaggaatctaaactgggacccgatatcggcatcagtaaggaagacgacgagcgacaaacagacagcaagaaagaggaaactatctcgcctagcctgaataaaaccgatgtcattcacgggcagtag

SEQ ID NO: 128222 - DNA, 4584 bp, Artificial Sequence
  derived and/or modified sequence
atgtacattagggttagctacgacaccaagcctgatagtttgttacacctgatggtaaaagattggcagttagaactgcctaaactgctaatctctgttcacggcggacttcagaattttgagatgcaacctaaactgaagcaggtcttcggcaaggggctgattaaagccgctatgaccacgggagcgtggatcttcaccggtggagtctccaccggcgttatcagccacgtgggcgatgcactaaaggaccactcttccaagagccgcggaagagtctgtgctatcgggattgccccttgggggatcgtggagaataaggaggatctcgtgggcaaggacgttacccgagtttatcagactatgagcaatcccctctcaaagctctccgtgctcaacaacagccacacgcacttcattctggccgataatggtactcttggcaagtatggagccgaggtaaagctgcgccgtttattagaaaaacacatctcactgcagaaaatcaataccagactgggccagggtgtgcctctggtgggattggtggtcgaggggggtcccaacgtggtgtctattgtgctagaatacctgcaggaggaaccacctattccagtagttatatgcgacggatccgggagggcctccgatatcctgtcattcgcacataagattattaacgaaagcctgcgtgaacagctgctcgtgacaatccagaaaacctttaattacaacaaagcccagagccaccagctgtttgccattatcatggagtgtatgaagaagaaagagctggtcacagtattcaggatgggaagcgaaggccagcaggatatcgagatggccatactgaccgccctgctcaaaggcacaaatgtctctgcaccagaccagctgtcgctcgcgctcgcctggaatcgcgtggacatcgcccgatcccaaatctttgtgttcgggccacactggcctcccctgggctcacttgcgccaccaaccgacagtaaagcgaccgagaaagaaaaaaagcccccaatggcaaccacaaagggagggcgtgggaaaggtaagggcaagaaaaaagggaaggtcaaggaagaagtggaagaagaaacagacccccgtaagattgagctcctaaactgggttaacgctttggaacaggcaatgctggacgcccttgttcttgatcgcgtggattttgtgaaacttcttatcgagaatggcgtcaatatgcagcatttcctaacaattcctcgcctagaagagctgtataacaccaggctcgggccacccaataccttgcatctcctcgtccgggatgtgaagaagagtaatcttccccctgattaccatatcagtctgatagatataggattagttttggaataccttatggggggagcataccggtgcaactacacacggaagaattttaggacgttatacaataatttgttcggtcccaagagaccaaaagccttaaaacttctaggaatggaggatgacgagccaccagccaaaggcaagaagaagaaaaagaaaaaaaaggaagaagagatcgatattgacgtcgatgaccccgctgtgtcgagatttcagtatccctttcacgagcttatggtctgggccgtgctgatgaagcggcaaaagatggctgtgttcctgtggcagagaggggaagaatcgatggccaaagctctggtggcttgcaaattatataaggccatggctcatgaaagctctgagtcagacctggtcgacgacatttcccaggacctcgacaataattcaaaagattttggacagttggcactggagctgctagaccagagttacaagcacgacgaacagatcgccatgaagctgctgacgtacgaactgaaaaactggagtaactccacttgccttaaattagccgtggctgccaagcaccgggacttcattgcccatacctgctctcaaatgctgctgaccgacatgtggatgggccgattaagaatgcgtaagaaccccggattgaaggtgatcatgggaatcttacttcctcctacaattctgtttctcgagttcagaacctacgacgatttcagctaccagacatccaaagagaatgaagatggtaaagagaaggaggaagagaacaccgacgccaacgccgacgccggtagtcggaagggcgatgaggagaatgagcataagaaacaacggagcatcccaataggaacaaaaatctgcgagttctacaatgccccaatcgtaaaattttggttttacaccataagctacctgggttatttgctactttttaattacgtcatactcgttaggatggatggatggcccagcctccaggaatggatcgtaatctcttacattgtgagcctggcgttagagaagataagggagattcttatgtcagaacctggtaaactgagtcagaagattaaagtgtggcttcaggagtattggaatatcaccgatctcgttgcgataagcacgttcatgattggggctatcctcaggcttcagaatcagccttatatggggtacggccgagttatctactgtgttgacattatcttctggtacattcgtgtgcttgacatctttggagtgaataagtatctgggaccctatgttatgatgatcggaaagatgatgatcgatatgctttactttgtggtgatcatgctggtcgtattgatgtcctttggagtcgcccgacaagcgattctgcatccagaggaaaagccgtcatggaagctggctcgaaacatcttttacatgccttactggatgatttacggggaggttttcgctgatcagatagacctatatgcaatggagatcaatcctccgtgtggcgaaaatctctacgacgaggaggggaaaagacttccaccctgtatccccggagcttggttgacccccgcactcatggcttgctacctcctcgtcgctaacattttgctggttaatcttttgatcgccgtcttcaataacacgttcttcgaggttaaaagtatcagtaatcaggtctggaagttccaacgttatcagctgatcatgacatttcacgatcgacccgttctcccgcctcctatgattattctttctcacatatacattatcattatgcgcttaagcggcaggtgtcggaaaaagcgtgaaggcgaccaggaggagagggacagagggttaaagttatttctctctgatgaggagctcaaaagactgcacgaattcgaagagcagtgcgtgcaagagcactttagagagaaggaggacgaacagcagagcagttcagatgaaaggatccgagtgacttcagaaagggtggagaatatgagcatgagactcgaagagatcaacgaaagggaaacgtttatgaagacatctctgcagacggtggacctccggctggctcagctcgaggagctgtccaaccggatggttaatgccctagagaatctggctggaattgaccgctcagatcttatacaggcccgatcacgtgctagctccgagtgcgaggcgacctacctgctgcgtcaatcctccattaactccgcagatggctactcactctacagataccactttaatggggaggagttgctgttcgaagataccagtttaagcaccagcccaggcacgggagtgaggaagaagacctgttcttttcggattaaggaggagaaagatgtaaagacacacttagtaccagaatgccaaaacagcctgcatctaagtctaggtacaagcaccagcgcaaccccagacgggtctcacctggccgtcgacgatctgaagaacgcagaggaatcgaaactgggacctgacataggtatttctaaggaggatgacgagcggcagacagattccaagaaagaggagactatctctcccagcctgaataagacggacgttatccacggacaagacaagagcgacgtgcagaacacacagctgaccgtggagacgaccaatatcgaagggacgatctcctatcctctcgaggagacaaagataacgagatacttcccagatgagactattaacgcttgcaaaaccatgaagagcagatcattcgtctactcacgtggaagaaagctggtagggggagtaaaccaggatgtcgaatattcgtctatcaccgatcagcagttgaccaccgagtggcaatgtcaggtacagaagataacccggagccactccacagacatcccctatattgtgtcagaagctgccgttcaggctgagcataaggaacaattcgctgacatgcaggatgagcaccatgtggcagaggctatcccgaggatccctcgcctctccctgacgataactgatcggaatggtatggagaatcttttatccgtgaaacctgatcagactctcggctttccatccttgaggtcaaaaagcctgcacgggcaccctcgaaatgtcaaaagcatccaggggaaactggatcgttctggacacgcttcatcagtaagtagcctggtgatcgtgtctgggatgactgccgaggagaaaaaagttaagaaagagaaagcgtccaccgaaacagagtgctag

SEQ ID NO: 128223 - DNA, 5284 bp, Artificial Sequence
  derived and/or modified sequence
atcaagacatcaaaaaggtgttgctgtggccagttcaccaaccagcatatcccccctctgccaagtgcaacacccagcaaaaatgaagaggaaagcaaacaggtggagactcagcctgagaaatggtctgttgccaagcacacccagagctacccaacagattcctatggagttcttgaattccagggtggcggatattccaataaagccatgtatatccgtgtatcctatgacaccaagccagactcactgctccatctcatggtgaaagattggcagctggaactccccaagctcttaatatctgtgcatggaggcctccagaactttgagatgcagcccaagctgaaacaagtctttgggaaaggcctgatcaaggctgctatgaccaccggggcctggatcttcaccgggggtgtcagcacaggtgttatcagccacgtaggggatgccttgaaagaccactcctccaagtccagaggccgggtttgtgctataggaattgctccatggggcatcgtggagaataaggaagacctggttggaaaggatgtaacaagagtgtaccagaccatgtccaaccctctaagtaagctctctgtgctcaacaactcccacacccacttcatcctggctgacaatggcaccctgggcaagtatggcgccgaggtgaagctgcgaaggctgctggaaaagcacatctccctgcagaagatcaacacaagactggggcagggcgtgcccctcgtgggtctcgtggtggaggggggccctaacgtggtgtccatcgtcttggaatacctgcaagaagagcctcccatccctgtggtgatttgtgatggcagcggacgtgcctcggacatcctgtcctttgcgcacaagtactgtgaagaaggcggaataataaatgagtccctcagggagcagcttctagttaccattcagaaaacatttaattataataaggcacaatcacatcagctgtttgcaattataatggagtgcatgaagaagaaagaactcgtcactgtgttcagaatgggttctgagggccagcaggacatcgagatggcaattttaactgccctgctgaaaggaacaaacgtatctgctccagatcagctgagcttggcactggcttggaaccgcgtggacatagcacgaagccagatctttgtctttgggccccactggccgcccctgggaagcctggcacccccgacggacagcaaagccacggagaaggagaagaagccacccatggccaccaccaagggaggaagaggaaaagggaaaggcaagaagaaagggaaagtgaaagaggaagtggaggaagaaactgacccccggaagatagagctgctgaactgggtgaatgctttggagcaagcgatgctagatgctttagtcttagatcgtgtcgactttgtgaagctcctgattgaaaacggagtgaacatgcaacactttctgaccattccgaggctggaggagctttataacacaagactgggtccaccaaacacacttcatctgctggtgagggatgtgaaaaagagcaaccttccgcctgattaccacatcagcctcatagacatcgggctcgtgctggagtacctcatgggaggagcctaccgctgcaactacactcggaaaaactttcggaccctttacaacaacttgtttggaccaaagaggcctaaagctcttaaacttctgggaatggaagatgatgagcctccagctaaagggaagaaaaagaaaaagaagaaaaaggaggaagagatcgacattgatgtggacgaccctgccgtgagtcggttccagtatcccttccacgagctgatggtgtgggcagtgctgatgaaacgccagaaaatggcagtgttcctctggcagcgaggggaagagagcatggccaaggccctggtggcctgcaagctctacaaggccatggcccacgagtcctccgagagtgatctggtggatgacatctcccaggacttggataacaattccaaagacttcggccagcttgctttggagttattagaccagtcctataagcatgacgagcagatcgctatgaaactcctgacctacgagctgaaaaactggagcaactcgacctgcctcaaactggccgtggcagccaaacaccgggacttcattgctcacacctgcagccagatgctgctgaccgatatgtggatgggaagactgcggatgcggaagaaccccggcctgaaggttatcatggggattcttctaccccccaccatcttgtttttggaatttcgcacatatgatgatttctcgtatcaaacatccaaggaaaatgaggatggcaaagaaaaagaagaggaaaatacggatgcaaatgcagatgctggctcaagaaagggggatgaggagaacgagcacaaaaaacagagaagtattcccatcggaacaaagatctgtgaattctataacgcgcccattgtcaagttctggttttacacaatatcatacttgggctacctgctgctgtttaactacgtcatcctggtgcggatggatggctggccgtccctccaggagtggatcgtcatctcctacatcgtgagcctggcgttagagaagatacgagagatcctcatgtcagaaccaggcaaactcagccagaaaatcaaagtttggcttcaggagtactggaacatcacagatctcgtggccatttccacattcatgattggagcaattcttcgcctacagaaccagccctacatgggctatggccgggtgatctactgtgtggatatcatcttctggtacatccgtgtcctggacatctttggtgtcaacaagtatctggggccatacgtgatgatgattggaaagatgatgatcgacatgctgtactttgtggtcatcatgctggtcgtgctcatgagtttcggagtagcccgtcaagccattctgcatccagaggagaagccctcttggaaactggcccgaaacatcttctacatgccctactggatgatctatggagaggtgtttgcagaccagatagacctctacgccatggaaattaatcctccttgtggtgagaacctatatgatgaggagggcaagcggcttcctccctgtatccccggcgcctggctcactccagcactcatggcgtgctatctactggtcgccaacatcctgctggtgaacctgctgattgctgtgttcaacaataccttctttgaagtaaaatcaatatccaaccaggtgtggaagttccagcgatatcagctgattatgacatttcatgacaggccagtcctgcccccaccgatgatcattttaagccacatctacatcatcattatgcgtctcagcggccgctgcaggaaaaagagagaaggggaccaagaggaacgggatcgtggattgaagctcttccttagcgacgaggagctaaagaggctgcatgagttcgaggagcagtgcgtgcaggagcacttccgggagaaggaggatgagcagcagtcgtccagcgacgagcgcatccgggtcacttctgaaagagttgaaaatatgtcaatgaggttggaagaaatcaatgaaagagaaacttttatgaaaacttccctgcagactgttgaccttcgacttgctcagctagaagaattatctaacagaatggtgaatgctcttgaaaatcttgcgggaatcgacaggtctgacctgatccaggcacggtcccgggcttcttctgaatgtgaggcaacgtatcttctccggcaaagcagcatcaatagcgctgatggctacagcttgtatcgatatcattttaacggagaagagttattatttgaggatacatctctctccacgtcaccagggacaggagtcaggaaaaaaacctgttccttccgtataaaggaagagaaggacgtgaaaacgcacctagtcccagaatgtcagaacagtcttcacctttcactgggcacaagcacatcagcaaccccagatggcagtcaccttgcagtagatgacttaaagaacgctgaagagtcaaaattaggtccagatattgggatttcaaaggaagatgatgaaagacagacagactctaaaaaagaagaaactatttccccaagtttaaataaaacagatgtgatacatggacaggacaaatcagatgttcaaaacactcagctaacagtggaaacgacaaatatagaaggcactatttcctatcccctggaagaaaccaaaattacacgctatttccccgatgaaacgatcaatgcttgtaaaacaatgaagtccagaagcttcgtctattcccggggaagaaagctggtcggtggggttaaccaggatgtagagtacagttcaatcacggaccagcaattgacgacggaatggcaatgccaagttcaaaagatcacgcgctctcatagcacagatattccttacattgtgtcggaagctgcagtgcaagctgagcataaagagcagtttgcagatatgcaagatgaacaccatgtcgctgaagcaattcctcgaatccctcgcttgtccctaaccattactgacagaaatgggatggaaaacttactgtctgtgaagccagatcaaactttgggattcccatctctcaggtcaaaaagtttacatggacatcctaggaatgtgaaatccattcagggaaagttagacagatctggacatgccagtagtgtaagcagcttagtaattgtgtctggaatgacagcagaagaaaaaaaggttaagaaagagaaagcttccacagaaactgaatgctagtctgttttgtttctttaatttttttttttaacagtcagaaccactaatgggtgtcatcttggccatctaaacatcatcaatttctaaaaacattttccttaaaaaattttggaaattcagacttgatttacaatttaatgcactaaaagtagtattttgttagcatatgttagtaggcttagttttttcagttgcagtagtatcaaatgaaagtgatgatactgtaacgaagataaattggctaatcagtatacaagattatacaatctctttattactgagggccaccaaatagcctaggaagtgccctcgagcactgaagtcaccattaggtcacttaagaagtaagcaactagctgggcacagtggctcatgcctgtaatcctagcactttgggaggccaaggcagaaagatagcttgagtccaggagtttgagaccagcctgggcaacatagtgataccccatctctt

SEQ ID NO: 128224 - DNA, 4584 bp, Artificial Sequence
  derived and/or modified sequence
atgtatatccgtgtatcctatgacaccaagccagactcactgctccatctcatggtgaaagattggcagctggaactccccaagctcttaatatctgtgcatggaggcctccagaactttgagatgcagcccaagctgaaacaagtctttgggaaaggcctgatcaaggctgctatgaccaccggggcctggatcttcaccgggggtgtcagcacaggtgttatcagccacgtaggggatgccttgaaagaccactcctccaagtccagaggccgggtttgtgctataggaattgctccatggggcatcgtggagaataaggaagacctggttggaaaggatgtaacaagagtgtaccagaccatgtccaaccctctaagtaagctctctgtgctcaacaactcccacacccacttcatcctggctgacaatggcaccctgggcaagtatggcgccgaggtgaagctgcgaaggctgctggaaaagcacatctccctgcagaagatcaacacaagactggggcagggcgtgcccctcgtgggtctcgtggtggaggggggccctaacgtggtgtccatcgtcttggaatacctgcaagaagagcctcccatccctgtggtgatttgtgatggcagcggacgtgcctcggacatcctgtcctttgcgcacaaaataataaatgagtccctcagggagcagcttctagttaccattcagaaaacatttaattataataaggcacaatcacatcagctgtttgcaattataatggagtgcatgaagaagaaagaactcgtcactgtgttcagaatgggttctgagggccagcaggacatcgagatggcaattttaactgccctgctgaaaggaacaaacgtatctgctccagatcagctgagcttggcactggcttggaaccgcgtggacatagcacgaagccagatctttgtctttgggccccactggccgcccctgggaagcctggcacccccgacggacagcaaagccacggagaaggagaagaagccacccatggccaccaccaagggaggaagaggaaaagggaaaggcaagaagaaagggaaagtgaaagaggaagtggaggaagaaactgacccccggaagatagagctgctgaactgggtgaatgctttggagcaagcgatgctagatgctttagtcttagatcgtgtcgactttgtgaagctcctgattgaaaacggagtgaacatgcaacactttctgaccattccgaggctggaggagctttataacacaagactgggtccaccaaacacacttcatctgctggtgagggatgtgaaaaagagcaaccttccgcctgattaccacatcagcctcatagacatcgggctcgtgctggagtacctcatgggaggagcctaccgctgcaactacactcggaaaaactttcggaccctttacaacaacttgtttggaccaaagaggcctaaagctcttaaacttctgggaatggaagatgatgagcctccagctaaagggaagaaaaagaaaaagaagaaaaaggaggaagagatcgacattgatgtggacgaccctgccgtgagtcggttccagtatcccttccacgagctgatggtgtgggcagtgctgatgaaacgccagaaaatggcagtgttcctctggcagcgaggggaagagagcatggccaaggccctggtggcctgcaagctctacaaggccatggcccacgagtcctccgagagtgatctggtggatgacatctcccaggacttggataacaattccaaagacttcggccagcttgctttggagttattagaccagtcctataagcatgacgagcagatcgctatgaaactcctgacctacgagctgaaaaactggagcaactcgacctgcctcaaactggccgtggcagccaaacaccgggacttcattgctcacacctgcagccagatgctgctgaccgatatgtggatgggaagactgcggatgcggaagaaccccggcctgaaggttatcatggggattcttctaccccccaccatcttgtttttggaatttcgcacatatgatgatttctcgtatcaaacatccaaggaaaatgaggatggcaaagaaaaagaagaggaaaatacggatgcaaatgcagatgctggctcaagaaagggggatgaggagaacgagcacaaaaaacagagaagtattcccatcggaacaaagatctgtgaattctataacgcgcccattgtcaagttctggttttacacaatatcatacttgggctacctgctgctgtttaactacgtcatcctggtgcggatggatggctggccgtccctccaggagtggatcgtcatctcctacatcgtgagcctggcgttagagaagatacgagagatcctcatgtcagaaccaggcaaactcagccagaaaatcaaagtttggcttcaggagtactggaacatcacagatctcgtggccatttccacattcatgattggagcaattcttcgcctacagaaccagccctacatgggctatggccgggtgatctactgtgtggatatcatcttctggtacatccgtgtcctggacatctttggtgtcaacaagtatctggggccatacgtgatgatgattggaaagatgatgatcgacatgctgtactttgtggtcatcatgctggtcgtgctcatgagtttcggagtagcccgtcaagccattctgcatccagaggagaagccctcttggaaactggcccgaaacatcttctacatgccctactggatgatctatggagaggtgtttgcagaccagatagacctctacgccatggaaattaatcctccttgtggtgagaacctatatgatgaggagggcaagcggcttcctccctgtatccccggcgcctggctcactccagcactcatggcgtgctatctactggtcgccaacatcctgctggtgaacctgctgattgctgtgttcaacaataccttctttgaagtaaaatcaatatccaaccaggtgtggaagttccagcgatatcagctgattatgacatttcatgacaggccagtcctgcccccaccgatgatcattttaagccacatctacatcatcattatgcgtctcagcggccgctgcaggaaaaagagagaaggggaccaagaggaacgggatcgtggattgaagctcttccttagcgacgaggagctaaagaggctgcatgagttcgaggagcagtgcgtgcaggagcacttccgggagaaggaggatgagcagcagtcgtccagcgacgagcgcatccgggtcacttctgaaagagttgaaaatatgtcaatgaggttggaagaaatcaatgaaagagaaacttttatgaaaacttccctgcagactgttgaccttcgacttgctcagctagaagaattatctaacagaatggtgaatgctcttgaaaatcttgcgggaatcgacaggtctgacctgatccaggcacggtcccgggcttcttctgaatgtgaggcaacgtatcttctccggcaaagcagcatcaatagcgctgatggctacagcttgtatcgatatcattttaacggagaagagttattatttgaggatacatctctctccacgtcaccagggacaggagtcaggaaaaaaacctgttccttccgtataaaggaagagaaggacgtgaaaacgcacctagtcccagaatgtcagaacagtcttcacctttcactgggcacaagcacatcagcaaccccagatggcagtcaccttgcagtagatgacttaaagaacgctgaagagtcaaaattaggtccagatattgggatttcaaaggaagatgatgaaagacagacagactctaaaaaagaagaaactatttccccaagtttaaataaaacagatgtgatacatggacaggacaaatcagatgttcaaaacactcagctaacagtggaaacgacaaatatagaaggcactatttcctatcccctggaagaaaccaaaattacacgctatttccccgatgaaacgatcaatgcttgtaaaacaatgaagtccagaagcttcgtctattcccggggaagaaagctggtcggtggggttaaccaggatgtagagtacagttcaatcacggaccagcaattgacgacggaatggcaatgccaagttcaaaagatcacgcgctctcatagcacagatattccttacattgtgtcggaagctgcagtgcaagctgagcataaagagcagtttgcagatatgcaagatgaacaccatgtcgctgaagcaattcctcgaatccctcgcttgtccctaaccattactgacagaaatgggatggaaaacttactgtctgtgaagccagatcaaactttgggattcccatctctcaggtcaaaaagtttacatggacatcctaggaatgtgaaatccattcagggaaagttagacagatctggacatgccagtagtgtaagcagcttagtaattgtgtctggaatgacagcagaagaaaaaaaggttaagaaagagaaagcttccacagaaactgaatgctag

SEQ ID NO: 128225 - protein, 469 aa, Artificial Sequence
  derived and/or modified sequence
MHSFPPLLLLLFWGVVSHSFPATLETQEQDVDLVQKYLEKYYNLKNDGRQVEKRRNSGPVVEKLKQMQEFFGLKVTGKPDAETLKVMKQPRCGVPDVAQFVLTEGNPRWEQTHLTYRIENYTPDLPRADVDHAIEKAFQLWSNVTPLTFTKVSEGQADIMISFVRGDHRDNSPFDGPGGNLAHAFQPGPGIGGDAHFDEDERWTNNFREYNLHRVAAHELGHSLGLSHSTDIGALMYPSYTFSGDVQLAQDDIDGIQAIYGRSQNPVQPIGPQTPKACDSKLTFDAITTIRGEVMFFKDRFYMRTNPFYPEVELNFISVFWPQLPNGLEAAYEFADRDEVRFFKGNKYWAVQGQNVLHGYPKDIYSSFGFPRTVKHIDAALSEENTGKTYFFVANKYWRYDEYKRSMDPGYPKMIAHDFPGIGHKVDAVFMKDGFFYFFHGTRQYKFDPKTKRILTLQKANSWFNCRKN

SEQ ID NO: 128226 - DNA, 1410 bp, Artificial Sequence
  derived and/or modified sequence
atgcacagcttcccccccctgctgctgctgctgttctggggcgtggtgagccacagcttccccgccaccctggagacccaggagcaggacgtggacctggtgcagaagtacctggagaagtactacaacctgaagaacgacggcagacaggtggagaagagaagaaacagcggccccgtggtggagaagctgaagcagatgcaggagttcttcggcctgaaggtgaccggcaagcccgacgccgagaccctgaaggtgatgaagcagcccagatgcggcgtgcccgacgtggcccagttcgtgctgaccgagggcaaccccagatgggagcagacccacctgacctacagaatcgagaactacacccccgacctgcccagagccgacgtggaccacgccatcgagaaggccttccagctgtggagcaacgtgacccccctgaccttcaccaaggtgagcgagggccaggccgacatcatgatcagcttcgtgagaggcgaccacagagacaacagccccttcgacggccccggcggcaacctggcccacgccttccagcccggccccggcatcggcggcgacgcccacttcgacgaggacgagagatggaccaacaacttcagagagtacaacctgcacagagtggccgcccacgagctgggccacagcctgggcctgagccacagcaccgacatcggcgccctgatgtaccccagctacaccttcagcggcgacgtgcagctggcccaggacgacatcgacggcatccaggccatctacggcagaagccagaaccccgtgcagcccatcggcccccagacccccaaggcctgcgacagcaagctgaccttcgacgccatcaccaccatcagaggcgaggtgatgttcttcaaggacagattctacatgagaaccaaccccttctaccccgaggtggagctgaacttcatcagcgtgttctggccccagctgcccaacggcctggaggccgcctacgagttcgccgacagagacgaggtgagattcttcaagggcaacaagtactgggccgtgcagggccagaacgtgctgcacggctaccccaaggacatctacagcagcttcggcttccccagaaccgtgaagcacatcgacgccgccctgagcgaggagaacaccggcaagacctacttcttcgtggccaacaagtactggagatacgacgagtacaagagaagcatggaccccggctaccccaagatgatcgcccacgacttccccggcatcggccacaaggtggacgccgtgttcatgaaggacggcttcttctacttcttccacggcaccagacagtacaagttcgaccccaagaccaagagaatcctgaccctgcagaaggccaacagctggttcaactgcagaaagaactag

SEQ ID NO: 128227 - DNA, 1410 bp, Artificial Sequence
  derived and/or modified sequence
atgcatagctttccgcccctcctcctccttctgttttggggggtggttagtcatagcttccccgccactttagaaactcaagaacaagatgttgacctagttcaaaagtacctcgagaagtactacaatctcaagaacgatggcagacaagtggagaaacgtagaaatagtggccccgtggtagaaaagctcaaacagatgcaggaattctttggacttaaggtgaccggcaaaccagacgccgagaccctcaaagttatgaagcagcctaggtgcggcgtgccagacgtcgcacagtttgtcctgactgaaggcaatcctaggtgggagcaaacacatctaacctaccgcattgagaattacacccccgatctgcccagggcagatgttgatcacgctatcgagaaggcattccaactctggagtaatgtcaccccgttgaccttcacgaaggttagcgaggggcaggcggatattatgatctcttttgtacgcggggatcaccgagacaacagtcccttcgatggaccaggaggcaacctagctcacgcatttcagccgggaccaggcatcggcggagacgcccactttgatgaggatgaacgttggaccaataattttcgggaatataacctgcaccgcgtggccgcacatgagctgggccactccctgggcctctcgcacagtactgatatcggtgcgctgatgtacccaagctatacgttctctggtgacgtccagctggctcaagatgacatcgacggcatccaggccatctatggacgctcccagaaccccgtgcaacccattgggccacagactcccaaggcttgtgactcgaagcttaccttcgatgccattactacaatcagaggagaggtcatgttctttaaggacaggttctatatgcgcaccaaccccttttatccagaagtcgagttgaatttcatcagcgttttctggcctcagctcccaaatgggttagaggccgcctatgaatttgctgacagggatgaggtgcgcttttttaagggtaataagtactgggcagtgcaaggtcagaatgtgctgcatggctaccctaaggatatctattccagcttcggcttccctaggaccgtcaaacatatcgatgccgctctgagcgaggaaaatactggcaaaacatatttctttgtcgcgaataagtactggcggtacgacgaatataagcgtagcatggaccctggctatcccaaaatgattgcgcacgacttccccggaattggtcacaaagttgacgccgtgttcatgaaggatgggttcttctatttcttccacggcacacgccagtacaaatttgacccaaagaccaagcgtatactgactctgcaaaaagccaattcatggttcaattgtcggaagaattag

SEQ ID NO: 128228 - DNA, 1410 bp, Artificial Sequence
  derived and/or modified sequence
atgcacagcttcccccccctgctgctgctgctcttctggggcgtggtgagccacagcttccctgccaccctggagacccaggagcaggatgtggacctggtgcagaagtacctggagaagtactacaacctgaagaatgatggccggcaggtggagaagagaagaaattctggccctgtggtggagaagctgaagcagatgcaggagttcttcggcctgaaggtgacaggcaagccagatgctgagaccctgaaggtgatgaagcagccccgctgtggggtgcctgatgtggcccagtttgtgctgacagagggcaacccccgctgggagcagacccacctgacctacagaattgagaactacaccccagacctgcccagggcagatgtggaccacgccatcgagaaggccttccagctgtggagcaatgtgacccccctgaccttcaccaaggtgtctgagggccaggccgacatcatgatcagctttgtgcggggggaccaccgggacaacagcccctttgatggccctgggggcaacctggcccacgccttccagcccggccctggcattggaggagatgcccactttgatgaagatgagcgctggaccaacaacttccgggagtacaacctgcaccgggtggccgcccacgagctgggccacagcctgggcctgagccacagcacagacatcggggccctgatgtaccccagctacaccttctctggagatgtgcagctggcccaggatgacattgatggcatccaggccatctacggccgcagccagaaccctgtgcagcccatcggcccccagacccccaaggcctgtgacagcaagctgacctttgatgccatcaccaccatccggggggaggtgatgttcttcaaggaccgcttctacatgaggaccaaccccttctacccagaggtggagctgaacttcatcagcgtcttctggccccagctgcccaacggcctggaggccgcctatgaatttgctgacagagatgaggtgcgcttcttcaagggcaacaagtactgggccgtgcagggccagaatgtgctgcacggctaccccaaggacatctacagcagctttggcttccccaggacagtgaagcacattgatgctgccctgtctgaggagaacacaggcaagacctacttctttgtggccaacaagtactggaggtatgatgagtacaagaggtccatggaccccggctaccccaagatgattgcccatgacttccctggcatcggccacaaggtggatgctgtgttcatgaaggatggcttcttctacttcttccacggcacccggcagtacaagtttgaccccaagaccaagaggatcctgaccctgcagaaggccaacagctggttcaactgcaggaagaactag

SEQ ID NO: 128229 - DNA, 1970 bp, Artificial Sequence
  derived and/or modified sequence
atattggagcagcaagaggctgggaagccatcacttaccttgcactgagaaagaagacaaaggccagtatgcacagctttcctccactgctgctgctgctgttctggggtgtggtgtctcacagcttcccagcgactctagaaacacaagagcaagatgtggacttagtccagaaatacctggaaaaatactacaacctgaagaatgatgggaggcaagttgaaaagcggagaaatagtggcccagtggttgaaaaattgaagcaaatgcaggaattctttgggctgaaagtgactgggaaaccagatgctgaaaccctgaaggtgatgaagcagcccagatgtggagtgcctgatgtggctcagtttgtcctcactgaggggaaccctcgctgggagcaaacacatctgacctacaggattgaaaattacacgccagatttgccaagagcagatgtggaccatgccattgagaaagccttccaactctggagtaatgtcacacctctgacattcaccaaggtctctgagggtcaagcagacatcatgatatcttttgtcaggggagatcatcgggacaactctccttttgatggacctggaggaaatcttgctcatgcttttcaaccaggcccaggtattggaggggatgctcattttgatgaagatgaaaggtggaccaacaatttcagagagtacaacttacatcgtgttgcagctcatgaactcggccattctcttggactctcccattctactgatatcggggctttgatgtaccctagctacaccttcagtggtgatgttcagctagctcaggatgacattgatggcatccaagccatatatggacgttcccaaaatcctgtccagcccatcggcccacaaaccccaaaagcgtgtgacagtaagctaacctttgatgctataactacgattcggggagaagtgatgttctttaaagacagattctacatgcgcacaaatcccttctacccggaagttgagctcaatttcatttctgttttctggccacaactgccaaatgggcttgaagctgcttacgaatttgccgacagagatgaagtccggtttttcaaagggaataagtactgggctgttcagggacagaatgtgctacacggataccccaaggacatctacagctcctttggcttccctagaactgtgaagcatatcgatgctgctctttctgaggaaaacactggaaaaacctacttctttgttgctaacaaatactggaggtatgatgaatataaacgatctatggatccaggttatcccaaaatgatagcacatgactttcctggaattggccacaaagttgatgcagttttcatgaaagatggatttttctatttctttcatggaacaagacaatacaaatttgatcctaaaacgaagagaattttgactctccagaaagctaatagctggttcaactgcaggaaaaattgaacattactaatttgaatggaaaacacatggtgtgagtccaaagaaggtgttttcctgaagaactgtctattttctcagtcatttttaacctctagagtcactgatacacagaatataatcttatttatacctcagtttgcatatttttttactatttagaatgtagccctttttgtactgatataatttagttccacaaatggtgggtacaaaaagtcaagtttgtggcttatggattcatataggccagagttgcaaagatcttttccagagtatgcaactctgacgttgatcccagagagcagcttcagtgacaaacatatcctttcaagacagaaagagacaggagacatgagtctttgccggaggaaaagcagctcaagaacacatgtgcagtcactggtgtcaccctggataggcaagggataactcttctaacacaaaataagtgttttatgtttggaataaagtcaaccttgtttctactgtttt

SEQ ID NO: 128230 - DNA, 1410 bp, Artificial Sequence
  derived and/or modified sequence
atgcacagcttcccccccctgctgctgctgctgttctggggcgtggtgagccattcctttcccgccaccctggagactcaagagcaggacgtagatcttgtgcaaaagtaccttgagaaatactacaacctgaagaatgatggcaggcaggtggagaagcgcaggaactctggcccggtcgtcgagaaactgaagcagatgcaggagtttttcgggcttaaggtgaccgggaaacctgatgcagaaacactgaaggtgatgaaacagccccgttgtggcgtgccagacgtagctcagtttgttctaacagagggaaacccgagatgggagcagacccatctgacctatcgaattgagaactatactccagatctgcctcgcgccgacgtggaccatgctatagagaaagctttccaactgtggagcaacgtgacgccactaacgttcacaaaggtgtcagagggacaagcagacataatgatcagctttgtgcggggtgatcatagggataactccccattcgacggtccaggaggaaacctcgcgcatgctttccagccaggtcctggcattgggggggacgcgcacttcgacgaggatgaacggtggaccaacaactttagggagtataacctgcaccgcgtggccgcgcacgagctgggccatagcctaggtttatctcacagcacagacatcggcgcgttgatgtatccgtcatatactttttccggagacgtacagctcgcacaggatgatattgatggcatccaggcaatttatggcaggtcacaaaatcccgtgcagcccattggacctcagaccccaaaggcttgcgattccaagctgacatttgacgccattacaactattcggggcgaggtgatgttttttaaagaccggttctatatgcgaaccaatcccttctaccctgaagtggagctgaatttcatctccgtcttttggccccaactgcccaacggactcgaggccgcttacgagtttgccgaccgtgatgaggtgaggttctttaaaggcaacaagtattgggcagtgcaggggcagaatgtgctgcatgggtatccaaaagatatttacagtagttttggattcccgagaacagtcaaacatatcgacgccgccctgtctgaggagaacaccggcaagacttatttttttgtggccaataagtattggagatacgatgaatacaaaagaagcatggatcccggatatcccaagatgatcgcacacgacttccccgggatcggccataaagtggacgctgtgtttatgaaagacgggttcttctatttttttcatgggacccgacagtacaagttcgatccgaaaactaagaggattctgaccctgcagaaggccaattcttggttcaactgtcgaaagaactag

SEQ ID NO: 128231 - DNA, 1410 bp, Artificial Sequence
  derived and/or modified sequence
atgcactcttttcccccactgttgctcctgctattttggggagtggtgtcccattcctttccggctacgctagaaacccaggaacaagacgtagacctcgtgcagaagtacctagagaagtattataatcttaagaacgacggcagacaggtagagaaacgaagaaatagcgggccagtagtagaaaagctaaagcagatgcaggagtttttcgggctgaaagtgaccggcaaacctgacgcagagacccttaaagtgatgaagcaaccaaggtgcggcgtcccagacgttgcccagtttgtgctgactgaaggaaacccccgttgggagcagacacacttgacatatagaattgaaaattatacgccagacctgcctcgcgcagacgtagatcacgccatcgagaaggcgtttcaactctggtcaaacgtgacccctctgacgtttacgaaggtaagcgaggggcaggctgatatcatgatatcctttgtaagaggagatcacagggataattcgcctttcgatggccctggcggtaatttggcacacgctttccagcccggtcccggaattggtggcgatgctcacttcgatgaagacgagaggtggaccaataatttccgcgagtacaacctgcacagagtggccgctcacgagctgggacacagcctggggctgtcgcactccaccgacatcggcgctcttatgtacccgagctatacattttcaggcgatgtccagctggcacaggatgatatcgacgggatacaagccatctacggcaggagtcaaaaccctgtgcagcccatcgggccacagactcctaaggcctgtgacagtaaactcacttttgatgccattaccacaatcagaggcgaggttatgttttttaaggacaggttttacatgagaacaaatcctttctaccctgaggtggagctgaacttcatttctgttttctggcctcagctacccaatggtctggaggccgcttacgaattcgccgacagggatgaggtcaggtttttcaagggaaataagtactgggcagtgcagggtcagaacgtgcttcacggctatcctaaggacatatattcttctttcggctttcctagaaccgtgaagcacatagatgcagccctgtctgaagagaatactggcaaaacctattttttcgttgccaataaatactggaggtatgatgagtacaaaaggagcatggaccccggttacccgaagatgatcgctcacgatttcccaggtattggacacaaagtagacgcggtcttcatgaaggacggctttttttactttttccacgggacacgccaatacaagtttgatccaaaaaccaagagaattctgactctgcaaaaggctaactcatggtttaactgcaggaaaaattag

SEQ ID NO: 128232 - protein, 477 aa, Artificial Sequence
  derived and/or modified sequence
MKSLPILLLLCVAVCSAYPLDGAARGEDTSMNLVQKYLENYYDLKKDVKQFVRRKDSGPVVKKIREMQKFLGLEVTGKLDSDTLEVMRKPRCGVPDVGHFRTFPGIPKWRKTHLTYRIVNYTPDLPKDAVDSAVEKALKVWEEVTPLTFSRLYEGEADIMISFAVREHGDFYPFDGPGNVLAHAYAPGPGINGDAHFDDDEQWTKDTTGTNLFLVAAHEIGHSLGLFHSANTEALMYPLYHSLTDLTRFRLSQDDINGIQSLYGPPPDSPETPLVPTEPVPPEPGTPANCDPALSFDAVSTLRGEILIFKDRHFWRKSLRKLEPELHLISSFWPSLPSGVDAAYEVTSKDLVFIFKGNQFWAIRGNEVRAGYPRGIHTLGFPPTVRKIDAAISDKEKNKTYFFVEDKYWRFDEKRNSMEPGFPKQIAEDFPGIDSKIDAVFEEFGFFYFFTGSSQLEFDPNAKKVTHTLKSNSWLNC

SEQ ID NO: 128233 - DNA, 1434 bp, Artificial Sequence
  derived and/or modified sequence
atgaagagcctgcccatcctgctgctgctgtgcgtggccgtgtgcagcgcctaccccctggacggcgccgccagaggcgaggacaccagcatgaacctggtgcagaagtacctggagaactactacgacctgaagaaggacgtgaagcagttcgtgagaagaaaggacagcggccccgtggtgaagaagatcagagagatgcagaagttcctgggcctggaggtgaccggcaagctggacagcgacaccctggaggtgatgagaaagcccagatgcggcgtgcccgacgtgggccacttcagaaccttccccggcatccccaagtggagaaagacccacctgacctacagaatcgtgaactacacccccgacctgcccaaggacgccgtggacagcgccgtggagaaggccctgaaggtgtgggaggaggtgacccccctgaccttcagcagactgtacgagggcgaggccgacatcatgatcagcttcgccgtgagagagcacggcgacttctaccccttcgacggccccggcaacgtgctggcccacgcctacgcccccggccccggcatcaacggcgacgcccacttcgacgacgacgagcagtggaccaaggacaccaccggcaccaacctgttcctggtggccgcccacgagatcggccacagcctgggcctgttccacagcgccaacaccgaggccctgatgtaccccctgtaccacagcctgaccgacctgaccagattcagactgagccaggacgacatcaacggcatccagagcctgtacggccccccccccgacagccccgagacccccctggtgcccaccgagcccgtgccccccgagcccggcacccccgccaactgcgaccccgccctgagcttcgacgccgtgagcaccctgagaggcgagatcctgatcttcaaggacagacacttctggagaaagagcctgagaaagctggagcccgagctgcacctgatcagcagcttctggcccagcctgcccagcggcgtggacgccgcctacgaggtgaccagcaaggacctggtgttcatcttcaagggcaaccagttctgggccatcagaggcaacgaggtgagagccggctaccccagaggcatccacaccctgggcttcccccccaccgtgagaaagatcgacgccgccatcagcgacaaggagaagaacaagacctacttcttcgtggaggacaagtactggagattcgacgagaagagaaacagcatggagcccggcttccccaagcagatcgccgaggacttccccggcatcgacagcaagatcgacgccgtgttcgaggagttcggcttcttctacttcttcaccggcagcagccagctggagttcgaccccaacgccaagaaggtgacccacaccctgaagagcaacagctggctgaactgctag

SEQ ID NO: 128234 - DNA, 1434 bp, Artificial Sequence
  derived and/or modified sequence
atgaagagccttcctatcttactcttgctatgtgtagcggtttgcagtgcctacccactggacggcgctgcccggggggaagacacctctatgaaccttgtgcaaaagtacctcgagaattactacgatttaaaaaaggatgtgaagcagttcgtgaggcgtaaagatagcggaccggtggtcaagaagatccgtgaaatgcagaaattcctcgggctggaagtaactggaaagctcgattcggacactctcgaagtgatgaggaagccacgctgcggggtgcccgatgttgggcactttagaacctttccgggtatcccaaaatggaggaagacacatctcacctatcggattgttaattacacacctgacctgcccaaagatgccgtggactccgcagttgaaaaggccctgaaggtgtgggaggaggttactcctttaaccttctcgcggctgtacgagggtgaggctgatattatgatcagtttcgctgtgagggagcacggagatttttatcctttcgacggccccggtaacgttctggcgcacgcatacgccccaggtcctgggatcaatggagacgcccacttcgatgatgacgaacagtggaccaaagacactacagggaccaatctgttcctggtcgcagctcacgaaatagggcactcactgggcttgtttcacagcgctaatacagaggcactgatgtacccgctttaccattcactgacagatctgacgagatttagactcagtcaggatgacataaacgggatacagtctctttatggtcccccacccgacagccctgagaccccgctcgtaccaacagagcccgtaccaccagagcctggaacacccgcaaactgcgatcctgcgctgtctttcgatgctgtgtctactctacgcggcgagatactaatttttaaagatagacacttctggcggaagtctttgaggaaattagaaccagagctccacctcatttctagcttttggccttcacttccctcgggcgtagacgctgcctatgaggtcacatcaaaagatctcgtgttcattttcaagggaaaccagttttgggccatcagaggaaatgaggtaagggctggttaccctcgcgggattcacacactcggttttcccccgaccgtaagaaagatagatgcagctatcagtgacaaggaaaaaaataaaacctacttctttgtggaggataagtactggaggttcgatgaaaagcggaatagtatggaacctgggttcccaaagcagattgccgaggattttccaggcattgactctaagattgacgcagtcttcgaagagtttggattcttttacttttttactgggtcttcccaactggagttcgaccctaacgcaaagaaggtcacacacactttaaagagcaactcttggttgaactgttag

SEQ ID NO: 128235 - DNA, 1434 bp, Artificial Sequence
  derived and/or modified sequence
atgaagagcctgcccatcctgctgctgctgtgtgtggccgtgtgcagcgcctaccccctggatggagctgcccggggggaggacacctccatgaacctggtgcagaagtacctggagaactactatgacctgaagaaggatgtgaagcagtttgtgcggaggaaggacagcggccctgtggtgaagaagatccgggagatgcagaagttcctgggcctggaggtgacaggcaagctggacagcgacaccctggaggtgatgaggaagccccgctgtggggtgcctgatgtgggccacttccgcaccttccctggcatccccaagtggaggaagacccacctgacctaccgcatcgtgaactacaccccagacctgcccaaggatgctgtggacagcgctgtggagaaggccctgaaggtgtgggaggaggtgacccccctgaccttcagccggctgtatgaaggagaggccgacatcatgatcagctttgctgtgcgggagcacggggacttctacccctttgatggccctggaaatgtgctggcccacgcctatgcccctggccctggcatcaatggagatgcccactttgatgatgatgagcagtggaccaaggacaccaccggcaccaacctcttcctggtggccgcccacgagatcggccacagcctgggcctcttccacagcgccaacacagaggccctgatgtaccccctgtaccacagcctgacagacctgacccgcttccggctgagccaggatgacatcaatggcatccagagcctgtatggccccccaccagacagccctgagacccccctggtgcccacagagcctgtgcccccagagcccggcaccccagccaactgtgaccctgccctgagctttgatgctgtgtccaccctgcggggggagatcctgatcttcaaggacagacacttctggaggaagagcctgaggaagctggagcctgagctgcacctgatcagcagcttctggcccagcctgcccagcggcgtggatgctgcctatgaggtgaccagcaaggacctggtgttcatcttcaagggcaaccagttctgggccatcagaggaaatgaggtgcgggccggctacccccggggcatccacaccctgggcttcccccccaccgtgaggaagattgatgctgccatcagtgacaaggagaagaacaagacctacttctttgtggaggacaagtactggaggtttgatgagaagagaaattccatggagcccggcttccccaagcagattgctgaggacttccctggcatcgacagcaagattgatgctgtgtttgaggagtttggcttcttctacttcttcaccggcagcagccagctggagtttgaccccaatgccaagaaggtgacccacaccctgaagagcaacagctggctgaactgctag

SEQ ID NO: 128236 - DNA, 2016 bp, Artificial Sequence
  derived and/or modified sequence
aatcactgtgttgccttgcaaaattgggaaggttgagagaaattagtaaagtaggttgtatcatcctactttgaatttggaatgtttggaaatggtcctgctgccatttggatgaaagcaaggatgagtcaagctgcgggtgatccaaacaaacactgtcactctttaaaagctgcgctcccgaggttggacctacaaggaggcaggcaagacagcaaggcatagagacaacatagagctaagtaaagccagtggaaatgaagagtcttccaatcctactgttgctgtgcgtggcagtttgctcagcctatccattggatggagctgcaaggggtgaggacaccagcatgaaccttgttcagaaatatctagaaaactactacgacctcaaaaaagatgtgaaacagtttgttaggagaaaggacagtggtcctgttgttaaaaaaatccgagaaatgcagaagttccttggattggaggtgacggggaagctggactccgacactctggaggtgatgcgcaagcccaggtgtggagttcctgatgttggtcacttcagaacctttcctggcatcccgaagtggaggaaaacccaccttacatacaggattgtgaattatacaccagatttgccaaaagatgctgttgattctgctgttgagaaagctctgaaagtctgggaagaggtgactccactcacattctccaggctgtatgaaggagaggctgatataatgatctcttttgcagttagagaacatggagacttttacccttttgatggacctggaaatgttttggcccatgcctatgcccctgggccagggattaatggagatgcccactttgatgatgatgaacaatggacaaaggatacaacagggaccaatttatttctcgttgctgctcatgaaattggccactccctgggtctctttcactcagccaacactgaagctttgatgtacccactctatcactcactcacagacctgactcggttccgcctgtctcaagatgatataaatggcattcagtccctctatggacctccccctgactcccctgagacccccctggtacccacggaacctgtccctccagaacctgggacgccagccaactgtgatcctgctttgtcctttgatgctgtcagcactctgaggggagaaatcctgatctttaaagacaggcacttttggcgcaaatccctcaggaagcttgaacctgaattgcatttgatctcttcattttggccatctcttccttcaggcgtggatgccgcatatgaagttactagcaaggacctcgttttcatttttaaaggaaatcaattctgggctatcagaggaaatgaggtacgagctggatacccaagaggcatccacaccctaggtttccctccaaccgtgaggaaaatcgatgcagccatttctgataaggaaaagaacaaaacatatttctttgtagaggacaaatactggagatttgatgagaagagaaattccatggagccaggctttcccaagcaaatagctgaagactttccagggattgactcaaagattgatgctgtttttgaagaatttgggttcttttatttctttactggatcttcacagttggagtttgacccaaatgcaaagaaagtgacacacactttgaagagtaacagctggcttaattgttgaaagagatatgtagaaggcacaatatgggcactttaaatgaagctaataattcttcacctaagtctctgtgaattgaaatgttcgttttctcctgcctgtgctgtgactcgagtcacactcaagggaacttgagcgtgaatctgtatcttgccggtcatttttatgttattacagggcattcaaatgggctgctgcttagcttgcaccttgtcacatagagtgatctttcccaagagaaggggaagcactcgtgtgcaacagacaagtgactgtatctgtgtagactatttgcttatttaataaagacgatttgtcagttatttta

SEQ ID NO: 128237 - DNA, 1434 bp, Artificial Sequence
  derived and/or modified sequence
atgaagagcctgcccatcctgctgctgctgtgcgtggccgtgtgcagtgcctacccattggatggcgccgcgcgcggggaggatacttccatgaacttagtccagaaatatcttgaaaactattacgacttaaagaaggatgttaagcaatttgtccggcggaaagacagtggcccggtcgtaaagaagattcgggagatgcagaaatttttggggctggaggtgacaggcaagttggactctgacacgttggaggttatgcggaagcctcgctgcggcgtccctgatgttggtcatttcagaacctttccggggatccccaagtggcggaagacgcatcttacttatcgcatcgtcaactacacacctgacttacctaaggacgctgtggactcagcagtggaaaaagccctaaaagtctgggaagaagtgacaccactcacctttagtcgcctatatgaaggcgaagctgatattatgatatccttcgccgtgcgcgagcacggggatttctacccatttgacggaccgggcaatgtgctggcacatgcttacgcccccggtcctggcattaacggagacgctcactttgacgatgatgagcaatggactaaagataccacaggaacaaacctgtttctcgtggccgcccacgagatcggccatagtctaggcctcttccatagcgctaacaccgaggccctcatgtacccactgtaccactcattaactgatctcacccgctttaggttgagtcaggacgacattaacggtattcaatccttgtacggccctcctcctgacagtcctgaaaccccactcgtgcccaccgagccggtgcctccagagcctggcactcctgctaactgcgaccccgccctctccttcgatgccgtgagcacactgagaggagagatcctgatatttaaagacaggcatttctggaggaagtctctgagaaagctggaacctgagctccatctgatatctagtttttggccttctctgccgagcggcgtggacgccgcttacgaggtgacctctaaggaccttgtgtttatctttaagggcaatcagttttgggctattcgcgggaatgaagtccgcgcgggttatcctagaggaattcacacccttgggtttcctccgactgtgcgaaaaattgatgcagccatttcagacaaagaaaagaataaaacatatttctttgtggaggataaatattggagattcgacgagaagagaaatagtatggagccgggatttcccaagcagatcgcggaagacttcccaggcattgatagcaaaatcgatgctgtttttgaagagttcgggttcttttatttttttacggggagttcccagcttgaattcgatccaaatgcgaaaaaggttactcacacgttaaaaagcaattcttggctgaattgctag

SEQ ID NO: 128238 - DNA, 1434 bp, Artificial Sequence
  derived and/or modified sequence
atgaagtcactcccaatcctcctgcttctctgcgtggccgtatgtagtgcttatccacttgatggggcagctagaggagaggatacaagtatgaatttggtgcagaaatatttggaaaactactatgacctaaagaaggatgttaaacaatttgtgcgcagaaaagatagcggacctgtggtgaagaagattcgagagatgcagaagttcttagggcttgaggtcaccggaaagctcgacagcgataccctcgaagtaatgcgaaaacctagatgtggcgtccctgatgtcgggcactttcgaactttccccggtatccccaagtggagaaaaacccaccttacatatcggattgtgaactatacgccagacctgccaaaagatgcagtggactcagccgtggaaaaggctctgaaagtgtgggaggaggtcacccctctgacgttcagcagattgtacgagggtgaagctgatattatgatatccttcgcggtccgcgagcatggcgatttttaccccttcgatggcccaggcaacgtcctagcacatgcgtacgctcctggacccggtatcaacggcgatgcccattttgacgatgatgaacagtggacaaaagataccacaggaaccaaccttttcttagtagctgcccatgaaattggccattcactgggtctgtttcactcagcgaacaccgaggccctgatgtaccctctgtatcattctctgaccgatctgactcggttccggctgtcccaggatgacattaacggaattcagagcctgtacggcccaccccctgattctcctgaaacaccactggttcccacggagccagtgccaccagagccgggtacgcctgccaattgtgatccagccctgtcatttgatgccgttagtacattaagaggtgaaatcctgatcttcaaggataggcatttctggagaaaatctctgaggaagctcgagccagaattgcatctcatcagctctttctggccctcactcccttctggcgtcgatgctgcctacgaggtgactagtaaggacctggtgtttatcttcaagggcaatcagttttgggcgattcggggaaatgaagtcagagcgggttacccacgaggcattcacactctgggcttcccgcctactgtcagaaagatagacgccgcaatttccgacaaagagaaaaataaaacatattttttcgtggaggacaagtattggcggttcgatgagaagaggaatagcatggagcctggattccccaaacagattgctgaagattttcccggtatcgattctaagattgacgctgtgttcgaagagttcggattcttctattttttcacggggtctagccagctggaatttgatccgaatgctaaaaaagtcacccacaccctgaagtccaattcatggttgaactgctag

SEQ ID NO: 128239 - protein, 267 aa, Artificial Sequence
  derived and/or modified sequence
MRLTVLCAVCLLPGSLALPLPQEAGGMSELQWEQAQDYLKRFYLYDSETKNANSLEAKLKEMQKFFGLPITGMLNSRVIEIMQKPRCGVPDVAEYSLFPNSPKWTSKVVTYRIVSYTRDLPHITVDRLVSKALNMWGKEIPLHFRKVVWGTADIMIGFARGAHGDSYPFDGPGNTLAHAFAPGTGLGGDAHFDEDERWTDGSSLGINFLYAATHELGHSLGMGHSSDPNAVMYPTYGNGDPQNFKLSQDDIKGIQKLYGKRSNSRKK

SEQ ID NO: 128240 - DNA, 804 bp, Artificial Sequence
  derived and/or modified sequence
atgagactgaccgtgctgtgcgccgtgtgcctgctgcccggcagcctggccctgcccctgccccaggaggccggcggcatgagcgagctgcagtgggagcaggcccaggactacctgaagagattctacctgtacgacagcgagaccaagaacgccaacagcctggaggccaagctgaaggagatgcagaagttcttcggcctgcccatcaccggcatgctgaacagcagagtgatcgagatcatgcagaagcccagatgcggcgtgcccgacgtggccgagtacagcctgttccccaacagccccaagtggaccagcaaggtggtgacctacagaatcgtgagctacaccagagacctgccccacatcaccgtggacagactggtgagcaaggccctgaacatgtggggcaaggagatccccctgcacttcagaaaggtggtgtggggcaccgccgacatcatgatcggcttcgccagaggcgcccacggcgacagctaccccttcgacggccccggcaacaccctggcccacgccttcgcccccggcaccggcctgggcggcgacgcccacttcgacgaggacgagagatggaccgacggcagcagcctgggcatcaacttcctgtacgccgccacccacgagctgggccacagcctgggcatgggccacagcagcgaccccaacgccgtgatgtaccccacctacggcaacggcgacccccagaacttcaagctgagccaggacgacatcaagggcatccagaagctgtacggcaagagaagcaacagcagaaagaagtag

SEQ ID NO: 128241 - DNA, 804 bp, Artificial Sequence
  derived and/or modified sequence
atgcgcctcactgttctttgtgcagtatgcctgctcccgggctccctggcattacccctccctcaggaggccggtggcatgagtgagcttcaatgggagcaagcccaggactaccttaaaagattttatctatatgactcagagaccaagaatgctaattctcttgaagctaaacttaaggagatgcagaaatttttcgggctgccgattaccggcatgctgaactcccgggtgatcgagatcatgcaaaagccacgatgtggagtgccggacgttgccgagtactccttattccccaatagcccaaagtggacatctaaggtggtgacttatcgcattgtctcatacacacgcgatctccctcacatcaccgtggataggttggtctctaaagcactgaacatgtgggggaaggagattccattacatttccgcaaggtggtgtgggggaccgctgatatcatgatcggcttcgcacgaggagcgcatggagattcttatccctttgacgggccagggaacacactggctcatgccttcgcacccggaacaggcctggggggcgacgctcactttgacgaagatgagcgatggacggacggcagcagcctcgggataaattttctgtacgcagccactcatgagttgggtcatagcctgggcatgggccacagctcggaccccaatgccgtgatgtaccccacttacggcaacggagacccccagaacttcaagctgtcccaggatgatataaagggaatccagaagctttacggcaaaaggtccaactctcgtaagaagtag

SEQ ID NO: 128242 - DNA, 804 bp, Artificial Sequence
  derived and/or modified sequence
atgaggctgactgtgctgtgtgctgtgtgcctgctgcccggcagcctggccctgcccctgccccaggaggccggcggcatgtctgagctgcagtgggagcaggcccaggactacctgaagcgcttctacctgtatgattctgagaccaagaatgccaacagcctggaggccaagctgaaggagatgcagaagttcttcggcctgcccatcaccggcatgctgaacagccgggtgattgagatcatgcagaagccccgctgtggggtgcctgatgtggccgagtacagcctcttccccaacagccccaagtggaccagcaaggtggtgacctacagaattgtgtcctacacccgggacctgccccacatcaccgtggaccggctggtgtccaaggccctgaacatgtggggcaaggagatccccctgcacttcaggaaggtggtgtggggcacagctgacatcatgattggatttgcccggggggcccatggagacagctacccctttgatggccctggcaacaccctggcccacgcctttgcccctggcaccggcctgggcggagatgcccactttgatgaagatgagcgctggacagatggcagcagcctgggcatcaacttcctgtatgctgccacccatgagctgggccacagcctgggcatgggccacagcagtgaccccaatgctgtgatgtaccccacctatggaaatggagacccccagaacttcaagctgagccaggatgacatcaagggcatccagaagctgtatggcaagaggagcaacagcaggaagaagtag

SEQ ID NO: 128243 - DNA, 1125 bp, Artificial Sequence
  derived and/or modified sequence
gaaaacaccaaatcaaccataggtccaagaacaattgtctctggacggcagctatgcgactcaccgtgctgtgtgctgtgtgcctgctgcctggcagcctggccctgccgctgcctcaggaggcgggaggcatgagtgagctacagtgggaacaggctcaggactatctcaagagattttatctctatgactcagaaacaaaaaatgccaacagtttagaagccaaactcaaggagatgcaaaaattctttggcctacctataactggaatgttaaactcccgcgtcatagaaataatgcagaagcccagatgtggagtgccagatgttgcagaatactcactatttccaaatagcccaaaatggacttccaaagtggtcacctacaggatcgtatcatatactcgagacttaccgcatattacagtggatcgattagtgtcaaaggctttaaacatgtggggcaaagagatccccctgcatttcaggaaagttgtatggggaactgctgacatcatgattggctttgcgcgaggagctcatggggactcctacccatttgatgggccaggaaacacgctggctcatgcctttgcgcctgggacaggtctcggaggagatgctcacttcgatgaggatgaacgctggacggatggtagcagtctagggattaacttcctgtatgctgcaactcatgaacttggccattctttgggtatgggacattcctctgatcctaatgcagtgatgtatccaacctatggaaatggagatccccaaaattttaaactttcccaggatgatattaaaggcattcagaaactatatggaaagagaagtaattcaagaaagaaatagaaacttcaggcagaacatccattcattcattcattggattgtatatcattgttgcacaatcagaattgataagcactgttcctccactccatttagcaattatgtcacccttttttattgcagttggtttttgaatgtctttcactccttttaaggataaactcctttatggtgtgactgtgtcttattcatctatacttgcagtgggtagatgtcaataaatgttacatacacaaataaataaaatgtttattccatggtaaattta

SEQ ID NO: 128244 - DNA, 804 bp, Artificial Sequence
  derived and/or modified sequence
atgcggctgaccgtgctgtgcgccgtgtgcctgctgcccggcagcctggccctgcctttgccccaggaggcggggggcatgagcgagcttcagtgggagcaggctcaggattacctcaagcggttctacctgtatgactccgagacaaaaaacgcaaactcgcttgaagcaaagctgaaggaaatgcagaagtttttcgggctgcctattaccggcatgttgaactccagagttattgaaatcatgcagaagccccgctgcggcgtacctgatgttgccgagtactctctgttccccaacagccccaagtggacctctaaggtagtcacatatcgcattgttagctacacccgagacctccctcatattacagtagacagactcgtctccaaagccttaaacatgtggggtaaagagattcctttgcacttcaggaaggtagtctgggggaccgccgacataatgataggattcgccaggggagcgcacggggatagctatcccttcgacggacccggcaacacgctcgcgcatgccttcgctccaggcactggcttgggaggtgatgcacacttcgatgaggacgagcgctggacagacggaagctccctggggatcaattttctgtatgctgccactcatgagctgggccatagtttgggcatgggccactcctcagaccctaatgctgttatgtaccctacttacggcaatggtgatccacaaaactttaaactgagtcaagacgatatcaaggggattcagaagctctatggaaaacggtccaactctagaaagaagtag

SEQ ID NO: 128245 - DNA, 804 bp, Artificial Sequence
  derived and/or modified sequence
atgagactgacagtgttgtgcgcagtgtgcctattacccggtagcctggctctcccattacctcaggaagcaggtggcatgtccgagctccagtgggagcaagcacaggattatttgaagagattttacttgtatgatagtgagacaaagaatgctaatagtcttgaagccaaactgaaagagatgcagaagttctttggcttacccattacaggcatgctgaattccagggtgatcgaaattatgcagaagccaagatgtggagtgcccgatgtggccgagtattccctcttccccaattccccaaagtggaccagcaaggtggtgacctaccggatcgtttcttacactagggacttgcctcatatcacagttgatcgcctcgtgtccaaagcccttaatatgtggggaaaagaaatccctctccattttcgtaaagttgtttgggggacggcagatatcatgatcggatttgcaagaggggcacatggagactcataccctttcgatggcccaggaaatactctggcgcacgccttcgcacctgggactgggctcggcggtgacgcccatttcgatgaagacgagagatggaccgatggaagttcccttggtataaatttcctatacgcagcaactcatgagcttgggcactccctgggaatgggtcatagcagtgatcctaacgccgtgatgtacccaacgtatggtaatggtgacccacagaatttcaagttgtcccaggatgacataaagggaatccagaaactgtatgggaaaagatcaaattccagaaagaaatag

SEQ ID NO: 128246 - protein, 467 aa, Artificial Sequence [sequence omitted]

SEQ ID NO: 128247 - DNA, 1404 bp, Artificial Sequence
  derived and/or modified sequence
atgttcagcctgaagaccctgcccttcctgctgctgctgcacgtgcagatcagcaaggccttccccgtgagcagcaaggagaagaacaccaagaccgtgcaggactacctggagaagttctaccagctgcccagcaaccagtaccagagcaccagaaagaacggcaccaacgtgatcgtggagaagctgaaggagatgcagagattcttcggcctgaacgtgaccggcaagcccaacgaggagaccctggacatgatgaagaagcccagatgcggcgtgcccgacagcggcggcttcatgctgacccccggcaaccccaagtgggagagaaccaacctgacctacagaatcagaaactacaccccccagctgagcgaggccgaggtggagagagccatcaaggacgccttcgagctgtggagcgtggccagccccctgatcttcaccagaatcagccagggcgaggccgacatcaacatcgccttctaccagagagaccacggcgacaacagccccttcgacggccccaacggcatcctggcccacgccttccagcccggccagggcatcggcggcgacgcccacttcgacgccgaggagacctggaccaacaccagcgccaactacaacctgttcctggtggccgcccacgagttcggccacagcctgggcctggcccacagcagcgaccccggcgccctgatgtaccccaactacgccttcagagagaccagcaactacagcctgccccaggacgacatcgacggcatccaggccatctacggcctgagcagcaaccccatccagcccaccggccccagcacccccaagccctgcgaccccagcctgaccttcgacgccatcaccaccctgagaggcgagatcctgttcttcaaggacagatacttctggagaagacacccccagctgcagagagtggagatgaacttcatcagcctgttctggcccagcctgcccaccggcatccaggccgcctacgaggacttcgacagagacctgatcttcctgttcaagggcaaccagtactgggccctgagcggctacgacatcctgcagggctaccccaaggacatcagcaactacggcttccccagcagcgtgcaggccatcgacgccgccgtgttctacagaagcaagacctacttcttcgtgaacgaccagttctggagatacgacaaccagagacagttcatggagcccggctaccccaagagcatcagcggcgccttccccggcatcgagagcaaggtggacgccgtgttccagcaggagcacttcttccacgtgttcagcggccccagatactacgccttcgacctgatcgcccagagagtgaccagagtggccagaggcaacaagtggctgaactgcagatacggctag

SEQ ID NO: 128248 - DNA, 1404 bp, Artificial Sequence
  derived and/or modified sequence
atgttcagtctgaagacgctaccgttcttgttgctgctgcacgtgcagataagtaaggcatttccggtatctagcaaggagaagaacactaagaccgtgcaggattacctagaaaagttctaccaactgccctcaaatcagtatcagtccacccgaaaaaatggcacaaacgtgattgtggaaaagctcaaggagatgcagcggttcttcgggttaaatgtgaccggaaaaccaaacgaagagaccctcgatatgatgaaaaagccacgttgcggtgtgcccgactctggaggtttcatgctaaccccaggtaacccaaaatgggagcgaactaacttaacctatcgcataagaaactacaccccacaactaagtgaagcggaagtcgagagggccattaaggatgcgttcgaactgtggagcgtagcatctccactcatcttcacccgaatctcacagggtgaagcagatattaacatcgcgttttaccagcgggaccacggggacaattccccattcgacggcccaaatggaatattagcccatgccttccaacctgggcagggcatcggaggcgatgcccactttgacgccgaagaaacatggaccaacacaagtgccaattacaatctttttctcgtagcagcccacgaatttggacattccttgggcctggcgcattctagcgatccaggggccctcatgtaccctaactatgccttccgggaaacatccaattactcgttgccccaggacgatattgacggtattcaagccatatacggcctttcaagcaaccctattcaacccaccggtccctccactcccaagccatgtgatccgtccttaaccttcgacgccattactactctgcggggagaaatcttgtttttcaaggacaggtatttttggagaaggcacccacagctacagcgcgtcgagatgaattttatctcactcttctggccatcactgcctacaggaatccaggcggcatacgaggacttcgacagggacctgatttttctgttcaaagggaaccagtactgggccctctcaggttatgacattctgcaaggctaccccaaggatatctctaattatggctttccatcctctgttcaggccattgatgctgcagtgttctatcgatcaaagacctacttttttgtgaatgatcaattttggcggtacgacaaccagcgccagttcatggaaccagggtatcctaagagcatcagtggcgcatttcccggcatcgaatctaaagttgatgccgttttccagcaggagcatttttttcatgtgttttccggtcctcgttactatgcattcgacctgattgcccagagagtcactcgggtcgcacggggtaacaagtggctgaattgtaggtacgggtag

SEQ ID NO: 128249 - DNA, 1404 bp, Artificial Sequence
  derived and/or modified sequence
atgttcagcctgaagaccctgcccttcctgctgctgctgcacgtgcagatcagcaaggccttccctgtgagcagcaaggagaagaacaccaagacagtgcaggactacctggagaagttctaccagctgcccagcaaccagtaccagagcaccaggaagaatggcaccaacgtgattgtggagaagctgaaggagatgcagcgcttcttcggcctgaatgtgacaggcaagcccaatgaggagaccctggacatgatgaagaagccccgctgtggggtgcctgacagcggcggcttcatgctgaccccaggcaaccccaagtgggagaggaccaacctgacctaccgcatccggaactacaccccccagctgtctgaggccgaggtggagcgggccatcaaggatgcctttgagctgtggagcgtggccagccccctcatcttcacccgcatcagccagggcgaggccgacatcaacatcgccttctaccagagggaccatggagacaacagcccctttgatggccccaacggcatcctggcccacgccttccagcccggccagggcattggaggagatgcccactttgatgctgaggagacctggaccaacaccagcgccaactacaacctcttcctggtggccgcccatgaatttggccacagcctgggcctggcccacagcagtgaccccggggccctgatgtaccccaactatgccttccgggagaccagcaactacagcctgccccaggatgacattgatggcatccaggccatctacggcctgagcagcaaccccatccagcccaccggccccagcacccccaagccctgtgaccccagcctgacctttgatgccatcaccaccctgcggggggagatcctcttcttcaaggaccgctacttctggaggaggcacccccagctgcagagggtggagatgaacttcatcagcctcttctggcccagcctgcccaccggcatccaggccgcctatgaggactttgaccgggacctgatcttcctgttcaagggcaaccagtactgggccctgagcggctatgacatcctgcagggctaccccaaggacatcagcaactacggcttccccagctctgtgcaggccattgatgctgctgtgttctaccgcagcaagacctacttctttgtgaatgaccagttctggaggtatgacaaccagaggcagttcatggagcccggctaccccaagagcatcagcggggccttccctggcatcgagagcaaggtggatgctgtgttccagcaggagcacttcttccacgtgttcagcggcccccgctactatgcctttgacctgattgcccagagggtgaccagggtggcccggggcaacaagtggctgaactgccgctatggatag

SEQ ID NO: 128250 - DNA, 1404 bp, Artificial Sequence
  derived and/or modified sequence
atgttcagcctgaagaccctgcccttcctgctgctgctgcacgtgcagatatccaaggcttttcctgtgagctcaaaggagaaaaacacaaaaacggtgcaagactacctggagaagttctaccagctcccaagcaaccagtaccagagcacacggaagaatgggacgaacgtgattgttgaaaagctcaaagaaatgcagagattttttggactcaacgtgactggaaaacccaatgaagaaacattggacatgatgaagaagcctagatgcggcgttcccgacagcgggggatttatgttgacccctggcaatcctaaatgggagagaacaaatctgacctatagaattcgaaattatactcctcagttgtcagaggctgaggtcgagcgtgctatcaaagacgcattcgaactctggtcggtggcctctcccctgatatttactcggatatctcaaggggaagccgacataaatattgccttttaccagagagatcacggagacaacagcccattcgatgggccaaatggtatcctggcccatgccttccagcctgggcagggaatcggtggggatgcccacttcgacgccgaggagacttggactaacacctctgccaattacaatctgtttctagtggccgctcatgagttcggccactcattaggcctggcccactccagtgacccaggtgctttgatgtatcccaattatgcctttcgcgagacctcaaattacagccttccacaggacgacatagacggaattcaagccatatatggcctctcctccaatcccattcagccgactggcccctcaactccaaagccatgcgatccctccttaaccttcgacgcgataaccacccttcggggtgaaattctgttctttaaagataggtatttctggcggcgacacccccagctccaacgcgtggagatgaacttcatatctcttttctggccaagcttgccgactggaattcaggctgcgtacgaagatttcgacagagacttaattttcctttttaaggggaaccaatattgggccctgagcggatatgatatactgcagggctacccaaaggatatttctaactacggctttccaagtagtgtgcaggctatagatgccgccgtgttttatcgttctaagacatactttttcgttaacgaccagttttggcggtacgacaatcagagacagttcatggagcccggatatccaaagtccataagcggagccttccctggcatcgagtctaaggttgatgccgtgtttcaacaggaacactttttccatgttttcagcggaccgcggtactatgcttttgatctaattgcccaaagagtgacacgagtggccagggggaacaaatggttaaactgtagatatggctag

SEQ ID NO: 128251 - DNA, 1404 bp, Artificial Sequence
  derived and/or modified sequence
atgttctccctaaaaactctcccattcttgttgctgctgcacgtgcagatcagtaaagccttccctgtgtcttcaaaggagaagaacacaaagaccgttcaggactacctagagaagttctaccagcttcccagtaatcaatatcagagcacaagaaagaatggcaccaatgttatcgtggagaaattgaaagaaatgcagcgctttttcggactcaacgtcacgggtaaacctaacgaggagaccttggatatgatgaaaaagcccaggtgtggtgtgccagactctggcggatttatgctcacccccggaaaccctaaatgggagaggactaacctgacatatcgcattagaaactacacacctcagctgagtgaggccgaagtcgagcgcgctattaaggacgcatttgagttgtggagcgtggcttctcctctaatcttcactcgtatttctcagggtgaagccgatatcaatatcgctttttaccagagagaccacggcgataatagcccatttgatggaccaaacgggattctagcacatgcctttcagcctggccaaggaatcggtggcgacgcccatttcgacgccgaggagacctggacaaacacctccgcgaactacaacctctttttggttgcagcacatgaatttgggcacagtctagggctggcccacagctctgatcccggtgcacttatgtacccaaattacgcgttcagggaaaccagcaactatagtctgccccaggatgatattgacgggattcaggccatctacggactgtcatccaaccctattcaacccaccggtcccagcacccccaagccgtgtgatcctagtctgacattcgacgcgatcaccactctacgaggcgaaatccttttttttaaggatcgctatttctggcgcagacacccccaactgcagagagtcgaaatgaacttcatcagcctattctggccttccctgccgaccggcatccaggccgcatatgaagattttgatcgggatctaatctttctgtttaaaggcaaccagtattgggcgctgagcgggtacgatatattacagggatatccaaaggacatttctaattatggcttccccagctcggtgcaagctatcgatgcagccgttttctaccggtctaaaacttacttcttcgtgaacgatcagttctggagatatgataaccaacgtcagttcatggagcctggctaccccaagtcaatttcaggtgccttccccggaatcgagagcaaggtggacgccgtcttccagcaggagcacttcttccacgtgttctccggcccacggtactacgcgttcgatctcatcgctcagagggtgacacgagttgcacggggtaataaatggttgaattgtcgatacgggtag

SEQ ID NO: 128252 - DNA, 3056 bp, Artificial Sequence
  derived and/or modified sequence
gacacatgatgctgtgaacgtcagggtgctcgccagggaagggccctacccagagggacagaaagaaagccaggaggggtagagtttgaagagaagatcatgttctccctgaagacgcttccatttctgctcttactccatgtgcagatttccaaggcctttcctgtatcttctaaagagaaaaatacaaaaactgttcaggactacctggaaaagttctaccaattaccaagcaaccagtatcagtctacaaggaagaatggcactaatgtgatcgttgaaaagcttaaagaaatgcagcgattttttgggttgaatgtgacggggaagccaaatgaggaaactctggacatgatgaaaaagcctcgctgtggagtgcctgacagtggtggttttatgttaaccccaggaaaccccaagtgggaacgcactaacttgacctacaggattcgaaactataccccacagctgtcagaggctgaggtagaaagagctatcaaggatgcctttgaactctggagtgttgcatcacctctcatcttcaccaggatctcacagggagaggcagatatcaacattgctttttaccaaagagatcacggtgacaattctccatttgatggacccaatggaatccttgctcatgcctttcagccaggccaaggtattggaggagatgctcattttgatgccgaagaaacatggaccaacacctccgcaaattacaacttgtttcttgttgctgctcatgaatttggccattctttggggctcgctcactcctctgaccctggtgccttgatgtatcccaactatgctttcagggaaaccagcaactactcactccctcaagatgacatcgatggcattcaggccatctatggactttcaagcaaccctatccaacctactggaccaagcacacccaaaccctgtgaccccagtttgacatttgatgctatcaccacactccgtggagaaatacttttctttaaagacaggtacttctggagaaggcatcctcagctacaaagagtcgaaatgaattttatttctctattctggccatcccttccaactggtatacaggctgcttatgaagattttgacagagacctcattttcctatttaaaggcaaccaatactgggctctgagtggctatgatattctgcaaggttatcccaaggatatatcaaactatggcttccccagcagcgtccaagcaattgacgcagctgttttctacagaagtaaaacatacttctttgtaaatgaccaattctggagatatgataaccaaagacaattcatggagccaggttatcccaaaagcatatcaggtgcctttccaggaatagagagtaaagttgatgcagttttccagcaagaacatttcttccatgtcttcagtggaccaagatattacgcatttgatcttattgctcagagagttaccagagttgcaagaggcaataaatggcttaactgtagatatggctgaagcaaaatcaaatgtggctgtatccactttcagaatgttgaagggaagttcagcaagcattttcgttacattgtgtcctgcttatacttttctcaatattaagtcattgtttcccatcactgtatccattctacctgtcctccgtgaaaatatgtttggaatattccactatttgcagaggcttattcagttcttacacattccatcttacattagtgattccatcaaagagaaggaaagtaagcctttttgtcacctcaatatttactatttcaatacttacatatctgacttctaggatttattgttatattacttgcctatctgacttcatacatccctcagtttcttaaaatgtcctatgtatatcttctacatgcaatttagaactagattttggttagaagtaaggattataaacaacctagacagtacccttggcctttacagaaaatatggtgctgttttctacccttggaaagaaatgtagatgatatgtttcgtgggttgaattgtgtcccccataaaagatatgttgaagttctaaccccaggtacccatgaatgtgagcttaccagggtctttgcagatgtaattagttaagttaaggtgagatcacactgaattagggtgggctctaaatccattatgactgttgttcttataagaagaagagaggcatagtcacctaggggaggaggccgtatgaagacagaggcagagattggagtgacgcatctccaagccaaggaattccaaggactgtaagccaccagtagaagctttgaagaggcaaggaaggattccctccaatagccttcaagtgtgaccctgctgacacctgcagaattcggacttctatcctccaaaaccgtgagggaataaatttcctttgttttaagccaccaactttgcaatactttgttacagcaaccctagacatgaggtactagacacagtacatctacacatatgaaaatgaatcaacacagaatgcagaagtagaacccttgctaaggactactgggcatcttcccaggacagcagccaaaagagaaccaccacttcctctcctgcctcctccttgctctctcctagagtccaaacccaaatgggccagttggatctgatgttcgtcagttctttacttctatttcctggggtactcaggagggcacacactatagataacttgggttagctgcataaaattcaatgtctcattaagttgcattaaactgagcttagatgtgtaagtttgctaacggatgggtttttttgttaagaactataggatttatgggaccaagtctagcgagtccagatatcaaaatcattataatgttatatttgctgttattagaatataatatagcttattatacaataaatatgtagactgtaaaatatatttctcactagtacctcctattttctttctctgttgaagtttttaaatcccacagataattaaattggcacctttatgcttgttcaaaaattaaaataatctattaaataagttcaaattaaagatttttacttcaaatgac

SEQ ID NO: 128253 - protein, 476 aa, Artificial Sequence
  derived and/or modified sequence
MMHLAFLVLLCLPVCSAYPLSGAAKEEDSNKDLAQQYLEKYYNLEKDVKQFRRKDSNLIVKKIQGMQKFLGLEVTGKLDTDTLEVMRKPRCGVPDVGHFSSFPGMPKWRKTHLTYRIVNYTPDLPRDAVDSAIEKALKVWEEVTPLTFSRLYEGEADIMISFAVKEHGDFYSFDGPGHSLAHAYPPGPGLYGDIHFDDDEKWTEDASGTNLFLVAAHELGHSLGLFHSANTEALMYPLYNSFTELAQFRLSQDDVNGIQSLYGPPPASTEEPLVPTKSVPSGSEMPAKCDPALSFDAISTLRGEYLFFKDRYFWRRSHWNPEPEFHLISAFWPSLPSYLDAAYEVNSRDTVFIFKGNEFWAIRGNEVQAGYPRGIHTLGFPPTIRKIDAAVSDKEKKKTYFFAADKYWRFDENSQSMEQGFPRLIADDFPGVEPKVDAVLQAFGFFYFFSGSSQFEFDPNARMVTHILKSNSWLHC

SEQ ID NO: 128254 - DNA, 1431 bp, Artificial Sequence
  derived and/or modified sequence
atgatgcacctggccttcctggtgctgctgtgcctgcccgtgtgcagcgcctaccccctgagcggcgccgccaaggaggaggacagcaacaaggacctggcccagcagtacctggagaagtactacaacctggagaaggacgtgaagcagttcagaagaaaggacagcaacctgatcgtgaagaagatccagggcatgcagaagttcctgggcctggaggtgaccggcaagctggacaccgacaccctggaggtgatgagaaagcccagatgcggcgtgcccgacgtgggccacttcagcagcttccccggcatgcccaagtggagaaagacccacctgacctacagaatcgtgaactacacccccgacctgcccagagacgccgtggacagcgccatcgagaaggccctgaaggtgtgggaggaggtgacccccctgaccttcagcagactgtacgagggcgaggccgacatcatgatcagcttcgccgtgaaggagcacggcgacttctacagcttcgacggccccggccacagcctggcccacgcctacccccccggccccggcctgtacggcgacatccacttcgacgacgacgagaagtggaccgaggacgccagcggcaccaacctgttcctggtggccgcccacgagctgggccacagcctgggcctgttccacagcgccaacaccgaggccctgatgtaccccctgtacaacagcttcaccgagctggcccagttcagactgagccaggacgacgtgaacggcatccagagcctgtacggccccccccccgccagcaccgaggagcccctggtgcccaccaagagcgtgcccagcggcagcgagatgcccgccaagtgcgaccccgccctgagcttcgacgccatcagcaccctgagaggcgagtacctgttcttcaaggacagatacttctggagaagaagccactggaaccccgagcccgagttccacctgatcagcgccttctggcccagcctgcccagctacctggacgccgcctacgaggtgaacagcagagacaccgtgttcatcttcaagggcaacgagttctgggccatcagaggcaacgaggtgcaggccggctaccccagaggcatccacaccctgggcttcccccccaccatcagaaagatcgacgccgccgtgagcgacaaggagaagaagaagacctacttcttcgccgccgacaagtactggagattcgacgagaacagccagagcatggagcagggcttccccagactgatcgccgacgacttccccggcgtggagcccaaggtggacgccgtgctgcaggccttcggcttcttctacttcttcagcggcagcagccagttcgagttcgaccccaacgccagaatggtgacccacatcctgaagagcaacagctggctgcactgctag

SEQ ID NO: 128255 - DNA, 1431 bp, Artificial Sequence
  derived and/or modified sequence
atgatgcacctggcattcctcgttctcctctgtctcccagtctgcagcgcttatcccttatctggtgctgcaaaagaggaggactctaacaaggacctcgcgcagcagtatctcgagaagtactataacctggaaaaagatgttaagcagtttcggcgcaaagacagcaaccttatcgtcaagaagatacagggaatgcagaagttcttaggattagaagtgaccggtaagctggacaccgacactctggaagtaatgcggaagccgagatgcggggtgcccgacgtgggacatttcagctcctttccaggtatgcccaaatggaggaagacgcatcttacataccgtatcgtcaactacacacccgatcttccccgcgatgccgttgactccgccattgagaaggcactgaaggtatgggaagaggtgacgcctctgacatttagtcgactctacgagggagaggcagatatcatgattagttttgccgtgaaagaacatggggatttttattcatttgacggtcctgggcactctctcgcccatgcctatccccccggacctggcctctatggcgatatccacttcgatgacgacgagaagtggacagaggacgcatccggaacgaatctgttcctggtcgcagcccatgagctgggacacagcctgggcctattccattctgcgaacactgaggcactgatgtaccctctgtataacagcttcacagaactggcccagttccgattgtcccaggacgacgtgaacggcatccagtcattatacgggcccccccccgcttctaccgaggagccattggtccctacgaaatctgtacccagcggatcagagatgccagcgaagtgcgaccccgcccttagcttcgatgccatcagtactcttagaggagagtatctattctttaaggatcgatacttctggcggaggtctcactggaaccctgaacctgaatttcacttaatctcagcgttctggccctcactgcctagttatctggacgcagcctatgaggttaattcccgagacacagtttttatatttaagggaaatgagttctgggccattagaggcaacgaggtacaggccggctacccgcgcggcattcacactctgggatttcctccgactatcaggaagatcgatgccgcagtgagcgataaggagaagaaaaagacttacttctttgccgccgataagtattggcgcttcgacgaaaatagccagagtatggagcaggggttccccaggctcatcgctgacgattttcccggagtagaacctaaggtagacgcagttctacaggcctttggcttcttttatttcttctcaggatcttcgcagttcgagttcgatcctaatgccaggatggtaactcatatcctgaaatccaactcatggctgcattgctag

SEQ ID NO: 128256 - DNA, 1431 bp, Artificial Sequence
  derived and/or modified sequence
atgatgcacctggccttcctggtgctgctgtgcctgcctgtgtgcagcgcctaccccctgtctggagctgccaaggaggaggacagcaacaaggacctggcccagcagtacctggagaagtactacaacctggagaaggatgtgaagcagttccggaggaaggacagcaacctgattgtgaagaagatccagggcatgcagaagttcctgggcctggaggtgacaggcaagctggacacagacaccctggaggtgatgaggaagccccgctgtggggtgcctgatgtgggccacttcagcagcttccctggcatgcccaagtggaggaagacccacctgacctacagaattgtgaactacaccccagacctgcccagagatgctgtggacagcgccatcgagaaggccctgaaggtgtgggaggaggtgacccccctgaccttcagccggctgtatgaaggagaggccgacatcatgatcagctttgctgtgaaggagcacggggacttctacagctttgatggccctggccacagcctggcccacgcctacccacctggccctggcctgtatggagacatccactttgatgatgatgagaagtggacagaagatgccagcggcaccaacctcttcctggtggccgcccacgagctgggccacagcctgggcctcttccacagcgccaacacagaggccctgatgtaccccctgtacaacagcttcacagagctggcccagttccggctgagccaggatgatgtgaatggcatccagagcctgtatggccccccaccagccagcacagaggagcccctggtgcccaccaagtctgtgcccagcggcagcgagatgcctgccaagtgtgaccctgccctgagctttgatgccatcagcaccctgcggggggagtacctgttcttcaaggaccgctacttctggaggaggagccactggaaccctgagcctgagttccacctgatcagcgccttctggcccagcctgcccagctacctggatgctgcctatgaggtgaacagccgggacaccgtcttcatcttcaagggaaatgagttctgggccatcagaggaaatgaggtgcaggccggctacccccggggcatccacaccctgggcttcccccccaccatcaggaagattgatgctgctgtgtctgacaaggagaagaagaagacctacttctttgctgctgacaagtactggaggtttgatgagaacagccagagcatggagcagggcttcccccggctgattgctgatgacttccctggggtggagcccaaggtggatgctgtgctgcaggccttcggcttcttctacttcttcagcggcagcagccagtttgaatttgaccccaatgccaggatggtgacccacatcctgaagagcaacagctggctgcactgctag

SEQ ID NO: 128257 - DNA, 1758 bp, Artificial Sequence
  derived and/or modified sequence
agaagcccagtagacaaagaaggtaagggcagtgagaatgatgcatcttgcattccttgtgctgttgtgtctgccagtctgctctgcctatcctctgagtggggcagcaaaagaggaggactccaacaaggatcttgcccagcaatacctagaaaagtactacaacctcgaaaaggatgtgaaacagtttagaagaaaggacagtaatctcattgttaaaaaaatccaaggaatgcagaagttccttgggttggaggtgacagggaagctagacactgacactctggaggtgatgcgcaagcccaggtgtggagttcctgacgttggtcacttcagctcctttcctggcatgccgaagtggaggaaaacccaccttacatacaggattgtgaattatacaccagatttgccaagagatgctgttgattctgccattgagaaagctctgaaagtctgggaagaggtgactccactcacattctccaggctgtatgaaggagaggctgatataatgatctcttttgcagttaaagaacatggagacttttactcttttgatggcccaggacacagtttggctcatgcctacccacctggacctgggctttatggagatattcactttgatgatgatgaaaaatggacagaagatgcatcaggcaccaatttattcctcgttgctgctcatgaacttggccactccctggggctctttcactcagccaacactgaagctttgatgtacccactctacaactcattcacagagctcgcccagttccgcctttcgcaagatgatgtgaatggcattcagtctctctacggacctccccctgcctctactgaggaacccctggtgcccacaaaatctgttccttcgggatctgagatgccagccaagtgtgatcctgctttgtccttcgatgccatcagcactctgaggggagaatatctgttctttaaagacagatatttttggcgaagatcccactggaaccctgaacctgaatttcatttgatttctgcattttggccctctcttccatcatatttggatgctgcatatgaagttaacagcagggacaccgtttttatttttaaaggaaatgagttctgggccatcagaggaaatgaggtacaagcaggttatccaagaggcatccataccctgggttttcctccaaccataaggaaaattgatgcagctgtttctgacaaggaaaagaagaaaacatacttctttgcagcggacaaatactggagatttgatgaaaatagccagtccatggagcaaggcttccctagactaatagctgatgactttccaggagttgagcctaaggttgatgctgtattacaggcatttggatttttctacttcttcagtggatcatcacagtttgagtttgaccccaatgccaggatggtgacacacatattaaagagtaacagctggttacattgctaggcgagatagggggaagacagatatgggtgtttttaataaatctaataattattcatctaatgtattatgagccaaaatggttaatttttcctgcatgttctgtgactgaagaagatgagccttgcagatatctgcatgtgtcatgaagaatgtttctggaattcttcacttgcttttgaattgcactgaacagaattaagaaatactcatgtgcaataggtgagagaatgtattttcatagatgtgttattacttcctcaataaaaagttttattttgggcctgttcctt

SEQ ID NO: 128258 - DNA, 1431 bp, Artificial Sequence
  derived and/or modified sequence
atgatgcacctggccttcctggtgctgctgtgcctgcccgtgtgctctgcatatcctcttagcggtgccgcaaaggaggaagatagcaataaggacttggcccagcagtatctcgagaaatattataacctagagaaagatgtaaagcagtttagacggaaggattccaatttgattgtgaagaagatccaaggcatgcagaagttcctaggacttgaagtgacaggcaagctggataccgacaccctggaggttatgagaaaaccaagatgcggggtgcccgatgtggggcatttcagtagtttccctgggatgcccaaatggaggaagacccaccttacttatcggattgtgaactataccccggacctaccacgtgacgccgtagactccgccatcgaaaaagcactcaaagtctgggaggaagttacccccctgacattttccaggctgtatgagggcgaagccgatatcatgatctctttcgcagtgaaagagcacggcgacttttactcattcgatgggcctggccacagcttagcacacgcttacccccctggccctggtctatatggcgacattcacttcgacgatgacgagaaatggaccgaagacgcgagtggtactaatttgtttttagttgcagctcatgagctggggcactccctgggcctctttcatagcgctaatacggaggcccttatgtatcccctgtacaactccttcactgagcttgcccaattcagactgtcccaagatgacgtcaacggtattcagtcgctgtacggcccacccccggcttccactgaggaacccctcgtccctacgaagtcagtacccagtggatctgaaatgccggccaagtgcgatccagccttgtcgtttgacgctatctccaccctgcggggcgagtaccttttctttaaagatcggtatttttggcggcgctctcactggaaccccgaacctgagttccatctaatttcggctttttggccttctctgcccagttacttggacgccgcctatgaagtgaactcgagagatacggtgtttatcttcaagggcaacgagttctgggccataagaggcaatgaagtgcaggctggatacccccgaggtattcacaccctcggcttcccccccacaatccgcaagattgacgcagccgtcagtgacaaggagaagaagaaaacttacttctttgcagccgataaatactggcgatttgacgagaattcgcagtcgatggaacaggggttccctaggctcatagccgacgattttccaggggtcgaacccaaggttgacgccgtgcttcaggctttcggattcttctattttttttctggtagctcacaatttgagttcgatcctaatgccagaatggtgacacatattcttaagtctaattcttggctgcattgctag

SEQ ID NO: 128259 - DNA, 1431 bp, Artificial Sequence
  derived and/or modified sequence
atgatgcatctcgcctttctggtcttactgtgccttcctgtttgcagtgcctatcccctcagtggggcagctaaggaggaggactctaacaaagacctggcgcagcagtacctggaaaaatactacaacctcgaaaaagatgtgaagcagttcaggcgaaaggacagtaacctgatagtcaagaagatccaaggtatgcaaaaattccttggcttagaagtgaccggcaaactggatacagataccctggaggtcatgaggaagcccaggtgtggagtgcccgacgttggtcatttttcttcgttccctgggatgcccaaatggcgcaagacacatttgacctatcgcattgttaattatacgccagatttaccacgagatgcagtggattctgccattgagaaggctctgaaagtctgggaggaggtgactcctttgacgttctcacggttgtatgagggtgaagccgacatcatgatctcatttgctgtcaaggagcacggggatttttactctttcgatgggccagggcactccctggcgcacgcatatcctcctggccctgggctgtacggcgacatccactttgacgatgacgaaaagtggaccgaggacgctagtggcactaatctgtttctggtagccgctcacgagttaggccatagccttgggctttttcattctgccaataccgaagccctcatgtatccactgtacaactcctttactgagctcgctcagtttagattgagtcaggacgatgtgaacggtatacagagtctgtatggaccccctcccgcttccactgaggagcctctagttcccacaaagagtgtaccttctggatccgagatgcctgcaaagtgcgaccccgcactctcattcgacgctattagtaccctcagaggtgagtacttgtttttcaaggatcgctacttctggagacggagtcattggaatccggagcctgagtttcacctgatcagcgccttctggcccagcttgcccagctacttagatgcagcatatgaagtgaactcccgagacaccgtatttatctttaaaggcaatgagttctgggccattcgcggaaatgaggtacaggctggctaccccaggggcatacataccctgggattccctcctacgatccgaaaaatagatgctgcagtctcagataaggaaaagaagaagacctatttttttgcagctgataagtattggcgtttcgatgagaactcccagtctatggagcagggcttccctaggttgattgctgatgattttcctggggtggagcccaaggttgatgccgtcctccaggcattcggcttcttttacttcttcagtggatctagccagttcgagtttgaccctaacgccaggatggttacacacattctgaaaagtaactcctggttacactgttag

SEQ ID NO: 128260 - protein, 470 aa, Artificial Sequence
  derived and/or modified sequence
MKFLLILLLQATASGALPLNSSTSLEKNNVLFGERYLEKFYGLEINKLPVTKMKYSGNLMKEKIQEMQHFLGLKVTGQLDTSTLEMMHAPRCGVPDVHHFREMPGGPVWRKHYITYRINNYTPDMNREDVDYAIRKAFQVWSNVTPLKFSKINTGMADILVVFARGAHGDFHAFDGKGGILAHAFGPGSGIGGDAHFDEDEFWTTHSGGTNLFLTAVHEIGHSLGLGHSSDPKAVMFPTYKYVDINTFRLSADDIRGIQSLYGDPKENQRLPNPDNSEPALCDPNLSFDAVTTVGNKIFFFKDRFFWLKVSERPKTSVNLISSLWPTLPSGIEAAYEIEARNQVFLFKDDKYWLISNLRPEPNYPKSIHSFGFPNFVKKIDAAVFNPRFYRTYFFVDNQYWRYDERRQMMDPGYPKLITKNFQGIGPKIDAVFYSKNKYYYFFQGSNQFEYDFLLQRITKTLKSNSWFGC

SEQ ID NO: 128261 - DNA, 1413 bp, Artificial Sequence
  derived and/or modified sequence
atgaagttcctgctgatcctgctgctgcaggccaccgccagcggcgccctgcccctgaacagcagcaccagcctggagaagaacaacgtgctgttcggcgagagatacctggagaagttctacggcctggagatcaacaagctgcccgtgaccaagatgaagtacagcggcaacctgatgaaggagaagatccaggagatgcagcacttcctgggcctgaaggtgaccggccagctggacaccagcaccctggagatgatgcacgcccccagatgcggcgtgcccgacgtgcaccacttcagagagatgcccggcggccccgtgtggagaaagcactacatcacctacagaatcaacaactacacccccgacatgaacagagaggacgtggactacgccatcagaaaggccttccaggtgtggagcaacgtgacccccctgaagttcagcaagatcaacaccggcatggccgacatcctggtggtgttcgccagaggcgcccacggcgacttccacgccttcgacggcaagggcggcatcctggcccacgccttcggccccggcagcggcatcggcggcgacgcccacttcgacgaggacgagttctggaccacccacagcggcggcaccaacctgttcctgaccgccgtgcacgagatcggccacagcctgggcctgggccacagcagcgaccccaaggccgtgatgttccccacctacaagtacgtggacatcaacaccttcagactgagcgccgacgacatcagaggcatccagagcctgtacggcgaccccaaggagaaccagagactgcccaaccccgacaacagcgagcccgccctgtgcgaccccaacctgagcttcgacgccgtgaccaccgtgggcaacaagatcttcttcttcaaggacagattcttctggctgaaggtgagcgagagacccaagaccagcgtgaacctgatcagcagcctgtggcccaccctgcccagcggcatcgaggccgcctacgagatcgaggccagaaaccaggtgttcctgttcaaggacgacaagtactggctgatcagcaacctgagacccgagcccaactaccccaagagcatccacagcttcggcttccccaacttcgtgaagaagatcgacgccgccgtgttcaaccccagattctacagaacctacttcttcgtggacaaccagtactggagatacgacgagagaagacagatgatggaccccggctaccccaagctgatcaccaagaacttccagggcatcggccccaagatcgacgccgtgttctacagcaagaacaagtactactacttcttccagggcagcaaccagttcgagtacgacttcctgctgcagagaatcaccaagaccctgaagagcaacagctggttcggctgctag

SEQ ID NO: 128262 - DNA, 1413 bp, Artificial Sequence
  derived and/or modified sequence
atgaaatttctactgatcctgcttctgcaagccacagccagcggggcactccccttgaacagctcaacctcgctagaaaaaaacaatgtgcttttcggagagcgctatctcgagaagttttacgggctggagattaacaaactgcctgtgacgaaaatgaagtattccggaaacctcatgaaggaaaaaatccaggaaatgcaacattttctggggctgaaggttaccggtcagctggacactagcaccctagaaatgatgcacgcgcccagatgcggtgttccggatgtgcaccactttcgcgagatgccgggcggtcctgtttggcgcaagcactacatcacatatcgaatcaacaattatacaccggacatgaacagggaagacgtggactacgcaataaggaaagctttccaggtgtggtccaacgtgactcctctgaagttctcaaaaatcaacacaggcatggccgatattctcgtggtgtttgcacgcggagcacacggggactttcacgctttcgatggtaaaggaggcatcctggcacacgctttcggtcctggaagtggaatcggaggcgacgcccatttcgacgaagatgaattctggaccacgcactcaggcggaacaaacttattcttgacagccgtccacgagattggccattctcttggtcttggtcactcatccgacccaaaggctgtgatgttccccacttacaaatatgtggacatcaatacattcaggctgagcgctgatgatatacggggaatacagagcctgtatggtgatccaaaagagaaccagcgtctgcctaaccctgacaactctgagccagctttatgcgaccccaacctgtcgtttgatgcagtgaccactgttggcaacaaaatcttctttttcaaggaccggtttttctggttgaaggtttctgagcggccaaagacttccgtgaatttgatctcatcgctgtggcccactttaccctccgggatcgaagcggcctacgagatcgaggcacggaatcaggtgttcctcttcaaggatgacaaatattggctgatcagtaatcttcggcccgagccaaactaccccaaatccatccattccttcgggttcccaaacttcgtcaagaaaattgacgccgcagttttcaatccccgtttctatcgtacatatttcttcgtggataaccagtactggaggtatgacgagcgccggcagatgatggaccctggataccccaagctgatcactaagaactttcagggtatcgggccaaaaatcgatgcggtattctactccaaaaataaatactattacttcttccagggctctaatcagtttgagtacgatttcctgttgcagagaattaccaaaaccttaaaaagtaattcctggtttggatgttag

SEQ ID NO: 128263 - DNA, 1413 bp, Artificial Sequence
  derived and/or modified sequence
atgaagttcctgctgatcctgctgctgcaggccacagccagcggggccctgcccctgaacagcagcaccagcctggagaagaacaacgtgctgtttggagagcgctacctggagaagttctacggcctggagatcaacaagctgcctgtgaccaagatgaagtacagcggcaacctgatgaaggagaagatccaggagatgcagcacttcctgggcctgaaggtgacaggccagctggacaccagcaccctggagatgatgcacgccccccgctgtggggtgcctgatgtgcaccacttccgggagatgcctgggggccctgtgtggaggaagcactacatcacctaccgcatcaacaactacaccccagacatgaaccgggaggatgtggactatgccatcaggaaggccttccaggtgtggagcaatgtgacccccctgaagttcagcaagatcaacacaggcatggctgacatcctggtggtgtttgcccggggggcccacggggacttccacgcctttgatggaaaaggaggcatcctggcccacgcctttggacctggcagcggcattggaggagatgcccactttgatgaagatgagttctggaccacccacagcggcggcaccaacctcttcctgacagctgtgcatgagatcggccacagcctgggcctgggccacagcagtgaccccaaggctgtgatgttccccacctacaagtatgtggacatcaacaccttccggctgtctgcagatgacatccggggcatccagagcctgtatggagaccccaaggagaaccagaggctgcccaacccagacaacagcgagcccgccctgtgtgaccccaacctgagctttgatgctgtgaccaccgtgggcaacaagatcttcttcttcaaggaccgcttcttctggctgaaggtgtctgagcggcccaagacctctgtgaacctgatcagcagcctgtggcccaccctgcccagcggcatcgaggccgcctatgaaattgaggccaggaaccaggtgttcctgttcaaggatgacaagtactggctgatcagcaacctgcggcctgagcccaactaccccaagagcatccacagctttggcttccccaactttgtgaagaagattgatgctgctgtgttcaacccccgcttctaccgcacctacttctttgtggacaaccagtactggaggtatgatgagcggcggcagatgatggaccccggctaccccaagctgatcaccaagaacttccagggcatcggccccaagattgatgctgtgttctacagcaagaacaagtactactacttcttccagggcagcaaccagtttgaatatgacttcctgctgcagaggatcaccaagaccctgaagagcaacagctggtttggctgctag

SEQ ID NO: 128264 - DNA, 1874 bp, Artificial Sequence
  derived and/or modified sequence
cagaacccggactaagggctatataaagaggaacagttcaggaacttaggctagaaaggaacacagtaaactgaattgatccgtttagaagtttacaatgaagtttcttctaatactgctcctgcaggccactgcttctggagctcttcccctgaacagctctacaagcctggaaaaaaataatgtgctatttggtgaaagatacttagaaaaattttatggccttgagataaacaaacttccagtgacaaaaatgaaatatagtggaaacttaatgaaggaaaaaatccaagaaatgcagcacttcttgggtctgaaagtgaccgggcaactggacacatctaccctggagatgatgcacgcacctcgatgtggagtccccgatgtccatcatttcagggaaatgccaggggggcccgtatggaggaaacattatatcacctacagaatcaataattacacacctgacatgaaccgtgaggatgttgactacgcaatccggaaagctttccaagtatggagtaatgttacccccttgaaattcagcaagattaacacaggcatggctgacattttggtggtttttgcccgtggagctcatggagacttccatgcttttgatggcaaaggtggaatcctagcccatgcttttggacctggatctggcattggaggggatgcacatttcgatgaggacgaattctggactacacattcaggaggcacaaacttgttcctcactgctgttcacgagattggccattccttaggtcttggccattctagtgatccaaaggccgtaatgttccccacctacaaatatgttgacatcaacacatttcgcctctctgctgatgacatacgtggcattcagtccctgtatggagacccaaaagagaaccaacgcttgccaaatcctgacaattcagaaccagctctctgtgaccccaatttgagttttgatgctgtcactaccgtgggaaataagatctttttcttcaaagacaggttcttctggctgaaggtttctgagagaccaaagaccagtgttaatttaatttcttccttatggccaaccttgccatctggcattgaagctgcttatgaaattgaagccagaaatcaagtttttctttttaaagatgacaaatactggttaattagcaatttaagaccagagccaaattatcccaagagcatacattcttttggttttcctaactttgtgaaaaaaattgatgcagctgtttttaacccacgtttttataggacctacttctttgtagataaccagtattggaggtatgatgaaaggagacagatgatggaccctggttatcccaaactgattaccaagaacttccaaggaatcgggcctaaaattgatgcagtcttctactctaaaaacaaatactactatttcttccaaggatctaaccaatttgaatatgacttcctactccaacgtatcaccaaaacactgaaaagcaatagctggtttggttgttagaaatggtgtaattaatggtttttgttagttcacttcagcttaataagtatttattgcatatttgctatgtcctcagtgtaccactacttagagatatgtatcataaaaataaaatctgtaaaccataggtaatgattatataaaatacataatatttttcaattttgaaaactctaattgtccattcttgcttgactctactattaagtttgaaaatagttaccttcaaaggccaagagaattctatttgaagcatgctctgtaagttgcttcctaacatccttggactgagaaattatacttacttctggcataactaaaattaagtatatatattttggctcaaataaaattgaaaaaaaaa

SEQ ID NO: 128265 - DNA, 1413 bp, Artificial Sequence
  derived and/or modified sequence
atgaagttcctgctgatcctgctgctgcaggccaccgccagcggcgcactgcccctgaactcctctacgtcactggaaaaaaacaatgtgctgtttggggagcgctatctggagaagttttatggacttgaaatcaataaactgcctgtgactaaaatgaagtacagcggaaatctgatgaaggagaaaatccaggaaatgcagcatttcttggggctgaaagtgactggtcagctcgacacctctacactcgagatgatgcatgctcctcgttgcggtgtgcccgacgtacaccacttccgcgagatgcccggtgggccagtgtggcggaaacactacattacatacaggatcaacaattatacacccgatatgaatcgtgaggatgtcgattacgctatccgcaaggcttttcaggtgtggagcaatgtcacccctctgaagttttcaaaaatcaacacaggcatggcggacatacttgttgtgtttgcccgcggcgctcacggggattttcatgccttcgacggaaaggggggaatcttggctcatgcttttgggccggggtcaggaattgggggtgacgcacattttgatgaggatgagttttggaccactcattccggcggcacgaacttattcctcaccgccgtgcacgagatcggtcattctctcggactggggcattcctctgatcccaaggcagtgatgtttccaacttataaatatgtggatataaatactttcaggttgagcgctgacgatattcggggcatccagtccctgtatggtgaccccaaagagaaccagagactgcctaatccagacaactctgagccagcactttgcgatcccaacttaagtttcgacgctgtaacaacagtgggcaacaaaatcttcttttttaaggatcgcttcttctggctgaaagtgtccgagagacccaaaacctccgtaaatctcatcagcagcctatggcctaccttgccctctggaatcgaagctgcttacgagatcgaggccagaaaccaggtgtttctatttaaggatgacaagtattggttgatttcaaacctgcggccagagcccaattatcctaagtcaattcactccttcggttttcccaattttgtgaaaaaaatcgacgccgctgtgttcaaccctcgtttctatcgaacttatttctttgtggacaaccagtattggagatacgacgagaggagacagatgatggacccaggataccctaagctcattactaagaatttccagggcatcggtcctaagatcgacgcagtcttctattctaagaataagtattactactttttccagggctctaatcaatttgagtacgattttcttcttcagcgcatcaccaagactttgaagtccaattcctggttcggttgctag

SEQ ID NO: 128266 - DNA, 1413 bp, Artificial Sequence
  derived and/or modified sequence
atgaaatttctgctgatattgctgttgcaagctaccgcaagcggagctttgccccttaactcctctacgtctctcgagaagaacaatgtgctctttggcgagcggtatttagagaagttctatggcctggagatcaacaagctccccgtgacaaagatgaagtatagtggcaacctcatgaaggagaaaattcaggagatgcagcacttcctgggcctcaaggtcacaggacagttggacaccagcactctggaaatgatgcacgccccaaggtgtggagttccggatgttcaccacttcagagaaatgccaggaggaccagtgtggaggaaacactatattacatatcgcatcaataactacacccccgacatgaatagggaggatgtagactacgccatcagaaaggcttttcaggtctggtctaacgtgaccccgctaaagttctctaagattaacaccgggatggctgatatcctcgtcgtcttcgcgcgaggtgcccacggagacttccacgccttcgacggtaaaggaggaattctcgcccacgcattcggcccaggcagcggcatcgggggtgatgcgcacttcgatgaagatgaattttggactacacatagcggcggaactaatctctttcttaccgccgtacatgaaattgggcactctctaggcctgggacactctagtgacccgaaggccgtgatgttccctacgtataaatacgttgacattaatacctttcgcctgtccgccgacgatatcagagggattcagtctctgtatggggaccccaaagaaaaccagagactaccgaacccggataactccgagcccgctctctgcgatccaaacctcagcttcgacgcggtgacaacagtcggtaataagatcttcttctttaaggacagattcttctggctcaaggtgtcggagagaccgaagaccagtgtgaatttaatctcttccctctggccgacactgccttcaggcattgaggccgcttacgaaatcgaggcacggaaccaggtttttttgtttaaggatgataaatattggctgatttctaacctgaggcccgagcctaactatcccaagtctatccactctttcggttttcctaacttcgttaaaaaaattgacgccgcagtgtttaaccctcggttttacagaacttacttttttgtggacaatcaatattggcgctacgatgagaggcggcaaatgatggatcccggatacccaaaactgatcactaaaaactttcagggaatcgggccaaagatcgacgctgtattctactctaaaaacaaatactactacttcttccagggatcaaaccagttcgagtatgatttcctgttacaaagaatcacaaaaacccttaagtccaacagctggtttggatgttag

SEQ ID NO: 128267 - protein, 471 aa, Artificial Sequence
  derived and/or modified sequence
MHPGVLAAFLFLSWTHCRALPLPSGGDEDDLSEEDLQFAERYLRSYYHPTNLAGILKENAASSMTERLREMQSFFGLEVTGKLDDNTLDVMKKPRCGVPDVGEYNVFPRTLKWSKMNLTYRIVNYTPDMTHSEVEKAFKKAFKVWSDVTPLNFTRLHDGIADIMISFGIKEHGDFYPFDGPSGLLAHAFPPGPNYGGDAHFDDDETWTSSSKGYNLFLVAAHEFGHSLGLDHSKDPGALMFPIYTYTGKSHFMLPDDDVQGIQSLYGPGDEDPNPKHPKTPDKCDPSLSLDAITSLRGETMIFKDRFFWRLHPQQVDAELFLTKSFWPELPNRIDAAYEHPSHDLIFIFRGRKFWALNGYDILEGYPKKISELGLPKEVKKISAAVHFEDTGKTLLFSGNQVWRYDDTNHIMDKDYPRLIEEDFPGIGDKVDAVYEKNGYIYFFNGPIQFEYSIWSNRIVRVMPANSILWC

SEQ ID NO: 128268 - protein, 489 aa, Artificial Sequence
  derived and/or modified sequence
MHPGVLAAFLFLSWTHCRALPLPSGGDEDDLSEEDLQFAERYLRSYYHPTNLAGILKENAASSMTERLREMQSFFGLEVTGKLDDNTLDVMKKPRCGVPDVGEYNVFPRTLKWSKMNLTYRIVNYTPDMTHSEVEKAFKKAFKVWSDVTPLNFTRLHDGIADIMISFGIKEHGDFYPFDGPSGLLAHAFPPGPNYGGDAHFDDDETWTSSSKGYNLFLVAAHEFGHSLGLDHSKDPGALMFPIYTYTGKSHFMLPDDDVQGIQSLYGPGDEDPNPKHPKTPDKCDPSLSLDAITSLRGETMIFKDRFFWRLHPQQVDAELFLTKSFWPELPNRIDAAYEHPSHDLIFIFRGRKFWALNGYDILEGYPKKISELGLPKEVKKISAAVHFEDTGKTLLFSGNQVWRYDDTNHIMDKDYPRLIEEDFPGIGDKVDAVYEKNESHSVTQAGVHCRNLSSLQPPPPGFKRFSCLSLWSSWDYRLYLFFQRTHTV

SEQ ID NO: 128269 - protein, 383 aa, Artificial Sequence [sequence omitted]

SEQ ID NO: 128270 - DNA, 1416 bp, Artificial Sequence
  derived and/or modified sequence
atgcaccccggcgtgctggccgccttcctgttcctgagctggacccactgcagagccctgcccctgcccagcggcggcgacgaggacgacctgagcgaggaggacctgcagttcgccgagagatacctgagaagctactaccaccccaccaacctggccggcatcctgaaggagaacgccgccagcagcatgaccgagagactgagagagatgcagagcttcttcggcctggaggtgaccggcaagctggacgacaacaccctggacgtgatgaagaagcccagatgcggcgtgcccgacgtgggcgagtacaacgtgttccccagaaccctgaagtggagcaagatgaacctgacctacagaatcgtgaactacacccccgacatgacccacagcgaggtggagaaggccttcaagaaggccttcaaggtgtggagcgacgtgacccccctgaacttcaccagactgcacgacggcatcgccgacatcatgatcagcttcggcatcaaggagcacggcgacttctaccccttcgacggccccagcggcctgctggcccacgccttcccccccggccccaactacggcggcgacgcccacttcgacgacgacgagacctggaccagcagcagcaagggctacaacctgttcctggtggccgcccacgagttcggccacagcctgggcctggaccacagcaaggaccccggcgccctgatgttccccatctacacctacaccggcaagagccacttcatgctgcccgacgacgacgtgcagggcatccagagcctgtacggccccggcgacgaggaccccaaccccaagcaccccaagacccccgacaagtgcgaccccagcctgagcctggacgccatcaccagcctgagaggcgagaccatgatcttcaaggacagattcttctggagactgcacccccagcaggtggacgccgagctgttcctgaccaagagcttctggcccgagctgcccaacagaatcgacgccgcctacgagcaccccagccacgacctgatcttcatcttcagaggcagaaagttctgggccctgaacggctacgacatcctggagggctaccccaagaagatcagcgagctgggcctgcccaaggaggtgaagaagatcagcgccgccgtgcacttcgaggacaccggcaagaccctgctgttcagcggcaaccaggtgtggagatacgacgacaccaaccacatcatggacaaggactaccccagactgatcgaggaggacttccccggcatcggcgacaaggtggacgccgtgtacgagaagaacggctacatctacttcttcaacggccccatccagttcgagtacagcatctggagcaacagaatcgtgagagtgatgcccgccaacagcatcctgtggtgctag

SEQ ID NO: 128271 - DNA, 1470 bp, Artificial Sequence
  derived and/or modified sequence
atgcaccccggcgtgctggccgccttcctgttcctgagctggacccactgcagagccctgcccctgcccagcggcggcgacgaggacgacctgagcgaggaggacctgcagttcgccgagagatacctgagaagctactaccaccccaccaacctggccggcatcctgaaggagaacgccgccagcagcatgaccgagagactgagagagatgcagagcttcttcggcctggaggtgaccggcaagctggacgacaacaccctggacgtgatgaagaagcccagatgcggcgtgcccgacgtgggcgagtacaacgtgttccccagaaccctgaagtggagcaagatgaacctgacctacagaatcgtgaactacacccccgacatgacccacagcgaggtggagaaggccttcaagaaggccttcaaggtgtggagcgacgtgacccccctgaacttcaccagactgcacgacggcatcgccgacatcatgatcagcttcggcatcaaggagcacggcgacttctaccccttcgacggccccagcggcctgctggcccacgccttcccccccggccccaactacggcggcgacgcccacttcgacgacgacgagacctggaccagcagcagcaagggctacaacctgttcctggtggccgcccacgagttcggccacagcctgggcctggaccacagcaaggaccccggcgccctgatgttccccatctacacctacaccggcaagagccacttcatgctgcccgacgacgacgtgcagggcatccagagcctgtacggccccggcgacgaggaccccaaccccaagcaccccaagacccccgacaagtgcgaccccagcctgagcctggacgccatcaccagcctgagaggcgagaccatgatcttcaaggacagattcttctggagactgcacccccagcaggtggacgccgagctgttcctgaccaagagcttctggcccgagctgcccaacagaatcgacgccgcctacgagcaccccagccacgacctgatcttcatcttcagaggcagaaagttctgggccctgaacggctacgacatcctggagggctaccccaagaagatcagcgagctgggcctgcccaaggaggtgaagaagatcagcgccgccgtgcacttcgaggacaccggcaagaccctgctgttcagcggcaaccaggtgtggagatacgacgacaccaaccacatcatggacaaggactaccccagactgatcgaggaggacttccccggcatcggcgacaaggtggacgccgtgtacgagaagaacgagagccacagcgtgacccaggccggcgtgcactgcagaaacctgagcagcctgcagccccccccccccggcttcaagagattcagctgcctgagcctgtggagcagctgggactacagactgtacctgttcttccagagaacccacaccgtgtag

SEQ ID NO: 128272 - DNA, 1152 bp, Artificial Sequence
  derived and/or modified sequence
atgcaccccggcgtgctggccgccttcctgttcctgagctggacccactgcagagccctgcccctgcccagcggcggcgacgaggacgacctgagcgaggaggacctgcagttcgccgagagatacctgagaagctactaccaccccaccaacctggccggcatcctgaaggagaacgccgccagcagcatgaccgagagactgagagagatgcagagcttcttcggcctggaggtgaccggcaagctggacgacaacaccctggacgtgatgaagaagcccagatgcggcgtgcccgacgtgggcgagtacaacgtgttccccagaaccctgaagtggagcaagatgaacctgacctacagaatcgtgaactacacccccgacatgacccacagcgaggtggagaaggccttcaagaaggccttcaaggtgtggagcgacgtgacccccctgaacttcaccagactgcacgacggcatcgccgacatcatgatcagcttcggcatcaaggagcacggcgacttctaccccttcgacggccccagcggcctgctggcccacgccttcccccccggccccaactacggcggcgacgcccacttcgacgacgacgagacctggaccagcagcagcaagggctacaacctgttcctggtggccgcccacgagttcggccacagcctgggcctggaccacagcaaggaccccggcgccctgatgttccccatctacacctacaccggcaagagccacttcatgctgcccgacgacgacgtgcagggcatccagagcctgtacggccccggcgacgaggaccccaaccccaagcaccccaagacccccgacaagtgcgaccccagcctgagcctggacgccatcaccagcctgagaggcgagaccatgatcttcaaggacagattcttctggagactgcacccccagcaggtggacgccgagctgttcctgaccaagagcttctggcccgagctgcccaacagaatcgacgccgcctacgagcaccccagccacgacctgatcttcatcttcagaggcagaaagttctgggccctgaacggctacgacatcctggagggctaccccaagaagatcagcgagctgggcctgcccaaggaggtgaacaagctgcagtag

SEQ ID NO: 128273 - DNA, 1416 bp, Artificial Sequence
  derived and/or modified sequence
atgcatcccggcgtgttggccgcctttttgtttctgtcttggacacactgcagggccctaccactgcccagcggcggggatgaagacgatctcagcgaagaggatctacagtttgccgagagataccttcggagctactatcacccaactaatcttgcaggcatcctgaaggagaacgcagcctcaagcatgacagaaagactacgcgaaatgcagagtttttttggcttggaggttaccggcaagcttgatgacaacaccctggatgtgatgaagaaacccaggtgcggagtgcccgatgtcggtgaatataacgtcttccctaggaccttaaaatggagtaagatgaatctgacctaccgcatcgtcaactataccccggacatgacccattccgaggtagagaaggcattcaaaaaagcttttaaagtatggtctgacgtaactccactcaatttcacaagactgcatgatggcattgccgacatcatgataagctttggaatcaaggagcatggtgacttttaccccttcgatggtccctcaggtctcttggcacatgcgtttcccccggggccaaactatggtggagatgcacatttcgatgacgatgagacgtggaccagcagcagtaaaggttacaaccttttccttgtggccgcccatgaattcggacattctttgggcctggatcactctaaagaccctggagcccttatgtttcctatctacacctacaccgggaaatcgcacttcatgctacctgacgacgacgtgcaggggattcagagcctctatggtcctggggatgaggaccccaatcccaaacacccaaaaacacccgacaagtgtgaccctagtctgtcgctagacgccataacctccctgcgcggcgagaccatgattttcaaagataggtttttctggcggctacaccctcagcaggtagacgcagaactgtttttaaccaagtccttctggcccgagttgcctaaccgtatagacgctgcctacgaacacccctcacatgatctcattttcatctttcgagggcgcaagttttgggccctcaacggttatgacatactcgagggatatccgaaaaagatttcagaactcggccttccaaaggaggtcaagaaaatatccgccgccgtgcactttgaagatacaggtaagactctgctattctcgggcaaccaagtttggaggtacgatgatacgaaccacattatggacaaggattaccccaggctgatcgaggaagacttccctggtatcggcgataaagtggacgccgtctacgagaagaacgggtacatctattttttcaacggacctatccagtttgaatattctatctggtccaatcgcatcgtgcgtgtgatgcctgctaattcgattctttggtgttag

SEQ ID NO: 128274 - DNA, 1470 bp, Artificial Sequence
  derived and/or modified sequence
atgcaccctggtgtgttggctgcattcctgtttctgtcctggacacattgccgggctttgcccctgccatctggtggcgacgaagacgacctaagcgaagaggacctccaattcgcagagcgctacctacgatcatactaccatcccactaatctggcggggattttgaaggaaaacgctgcaagtagtatgacggaacgcctgcgtgaaatgcagtccttttttggtcttgaagtcaccggaaagcttgacgacaacacactggatgtcatgaagaaaccaagatgcggagtcccagatgtgggggagtataatgtgttccctaggacactgaaatggtcaaagatgaacctgacataccgaatcgttaactatacgccggacatgacccattccgaggtcgagaaagccttcaagaaggccttcaaagtctggagcgacgttactccacttaactttactaggttgcacgacggcatcgccgacatcatgatctctttcggcatcaaggagcacggcgacttttatccctttgacggccctagtggccttctggcgcacgcttttcctcctggtcccaactacggcggagacgcacattttgacgacgatgaaacatggacatcctcgagtaaagggtacaacctgtttctggtggcagcacacgaattcggccacagcttgggacttgaccattctaaggatcctggtgccctgatgttcccaatctacacctataccgggaaatcccactttatgctgcctgatgatgatgtacagggcatccagagcctatacggcccaggtgatgaagacccaaatccgaagcaccccaagacccccgacaagtgcgacccttcactgtcgctggatgctatcacatctctgcggggtgagaccatgatattcaaagatcggttcttctggaggctgcatccccagcaagtagacgcagagttgttccttaccaaatccttctggcccgagttgccaaatcgcatcgacgccgcctatgagcatccgtcacacgacctgatttttatatttagggggcgcaagttttgggccttgaacgggtacgacatcctggaaggctaccctaaaaagatctcagagctgggcctgcccaaagaggttaagaagatctccgccgccgttcacttcgaagacacagggaagacactcctcttttctggcaaccaagtatggcggtacgatgataccaatcacattatggataaagactatcctcgtctgatcgaggaagattttccaggaataggcgacaaggtggatgcggtctacgagaagaacgagtctcattctgtcacccaagccggggtacactgtcggaatctgtccagtctccaaccacccccacccgggttcaaacggttttcttgcctgagcctttggtcctcatgggattacagactatatttgtttttccaacggacacatacggtctag

SEQ ID NO: 128275 - DNA, 1152 bp, Artificial Sequence
  derived and/or modified sequence
atgcatccgggcgttctcgccgcctttttgtttctttcctggacccactgtagggcactgccactgccatctgggggtgacgaggatgacctgtcagaagaggatttgcaatttgcggaacgatatctgaggagttactatcaccctacaaacctcgccgggatactgaaggaaaatgcagcatctagtatgaccgagcggttgagagagatgcagtctttctttgggctggaggtgacaggaaagcttgacgacaacactctcgatgtgatgaagaaaccaagatgcggggtgccagacgtgggggagtacaacgtgtttccaagaacgctcaagtggagtaaaatgaatctgacatacaggatagtgaactacaccccagatatgactcacagtgaggtagagaaggcctttaagaaagctttcaaggtgtggtcggacgttacccccctcaacttcacaaggctacacgatggcatcgccgatatcatgatctcatttggcataaaagaacacggcgacttttatccgttcgacggcccgtccggtttgttggcccacgcgttcccccctggacctaattacggcggcgatgcccatttcgatgacgatgaaacctggacgagctcctcgaaaggatataatctgtttcttgtagccgcccatgagttcggccactcattgggcctggaccactccaaggatcccggcgccctgatgttccccatttacacctataccggaaagtcccattttatgctccccgacgacgacgtccagggaattcagtctctgtatggacctggggatgaagaccctaacccaaaacacccaaagacccctgacaagtgtgatccaagtttatctcttgatgcgatcacatctctgcggggggaaacaatgatttttaaggacaggttcttctggcggttgcatcctcagcaagtagatgcagagctgtttttaacaaagtctttctggccggagcttcctaaccgtatcgacgcagcctacgagcatccttctcatgacttgattttcatttttcggggccggaaattttgggccttaaacggctatgatattttagaaggctatcccaagaaaattagtgagcttgggctacccaaggaggtgaacaagcttcagtag

SEQ ID NO: 128276 - DNA, 1416 bp, Artificial Sequence
  derived and/or modified sequence
atgcaccctggggtgctggccgccttcctgttcctgtcctggacccactgccgggccctgcccctgcccagcggaggagatgaagatgacctgtctgaggaggacctgcagtttgctgagcgctacctgcggagctactaccaccccaccaacctggccggcatcctgaaggaaaatgctgccagctccatgacagagcggctgcgggagatgcagagcttcttcggcctggaggtgacaggcaagctggatgacaacaccctggatgtgatgaagaagccccgctgtggggtgcctgatgtgggggagtacaacgtgttccccaggaccctgaagtggagcaagatgaacctgacctaccgcatcgtgaactacaccccagacatgacccacagcgaggtggagaaggccttcaagaaggccttcaaggtgtggagcgatgtgacccccctgaacttcacccggctgcatgatggcattgctgacatcatgatcagctttggcatcaaggagcacggggacttctacccctttgatggccccagcggcctgctggcccacgccttccccccaggccccaactatggaggagatgcccactttgatgatgatgagacctggaccagcagcagcaagggctacaacctcttcctggtggccgcccacgagtttggccacagcctgggcctggaccacagcaaggaccccggggccctgatgttccccatctacacctacacaggcaagagccacttcatgctgcctgatgatgatgtgcagggcatccagagcctgtatggccctggagatgaggaccccaaccccaagcaccccaagaccccagacaagtgtgaccccagcctgagcctggatgccatcaccagcctgcggggggagaccatgatcttcaaggaccgcttcttctggaggctgcacccccagcaggtggatgctgagctgttcctgaccaagagcttctggccagagctgcccaacagaattgatgctgcctatgagcaccccagccatgacctgatcttcatcttccggggcaggaagttctgggccctgaatggctatgacatcctggagggctaccccaagaagatcagcgagctgggcctgcccaaggaggtgaagaagatctctgctgctgtgcactttgaagatactgggaagaccctgctcttcagcggcaaccaggtgtggaggtatgatgacaccaaccacatcatggacaaggactaccccaggctcatcgaggaggacttccctggcattggagacaaggtggatgctgtgtatgagaagaatggctacatctacttcttcaacggccccatccagtttgagtacagcatctggagcaacagaattgtgcgggtgatgcctgccaacagcatcctgtggtgctag

SEQ ID NO: 128277 - DNA, 1470 bp, Artificial Sequence
  derived and/or modified sequence
atgcaccctggggtgctggccgccttcctgttcctgtcctggacccactgccgggccctgcccctgcccagcggaggagatgaagatgacctgtctgaggaggacctgcagtttgctgagcgctacctgcggagctactaccaccccaccaacctggccggcatcctgaaggaaaatgctgccagctccatgacagagcggctgcgggagatgcagagcttcttcggcctggaggtgacaggcaagctggatgacaacaccctggatgtgatgaagaagccccgctgtggggtgcctgatgtgggggagtacaacgtgttccccaggaccctgaagtggagcaagatgaacctgacctaccgcatcgtgaactacaccccagacatgacccacagcgaggtggagaaggccttcaagaaggccttcaaggtgtggagcgatgtgacccccctgaacttcacccggctgcatgatggcattgctgacatcatgatcagctttggcatcaaggagcacggggacttctacccctttgatggccccagcggcctgctggcccacgccttccccccaggccccaactatggaggagatgcccactttgatgatgatgagacctggaccagcagcagcaagggctacaacctcttcctggtggccgcccacgagtttggccacagcctgggcctggaccacagcaaggaccccggggccctgatgttccccatctacacctacacaggcaagagccacttcatgctgcctgatgatgatgtgcagggcatccagagcctgtatggccctggagatgaggaccccaaccccaagcaccccaagaccccagacaagtgtgaccccagcctgagcctggatgccatcaccagcctgcggggggagaccatgatcttcaaggaccgcttcttctggaggctgcacccccagcaggtggatgctgagctgttcctgaccaagagcttctggccagagctgcccaacagaattgatgctgcctatgagcaccccagccatgacctgatcttcatcttccggggcaggaagttctgggccctgaatggctatgacatcctggagggctaccccaagaagatcagcgagctgggcctgcccaaggaggtgaagaagatctctgctgctgtgcactttgaagatactgggaagaccctgctcttcagcggcaaccaggtgtggaggtatgatgacaccaaccacatcatggacaaggactaccccaggctcatcgaggaggacttccctggcattggagacaaggtggatgctgtgtatgagaagaatgaaagccacagcgtgacccaggccggcgtgcactgcaggaacctgagcagcctgcagcccccacctcctggcttcaagcgcttcagctgcctgagcctgtggagctcctgggactaccgcctgtacctgttcttccagaggacccacacagtgtag

SEQ ID NO: 128278 - DNA, 1152 bp, Artificial Sequence
  derived and/or modified sequence
atgcaccctggggtgctggccgccttcctgttcctgtcctggacccactgccgggccctgcccctgcccagcggaggagatgaagatgacctgtctgaggaggacctgcagtttgctgagcgctacctgcggagctactaccaccccaccaacctggccggcatcctgaaggaaaatgctgccagctccatgacagagcggctgcgggagatgcagagcttcttcggcctggaggtgacaggcaagctggatgacaacaccctggatgtgatgaagaagccccgctgtggggtgcctgatgtgggggagtacaacgtgttccccaggaccctgaagtggagcaagatgaacctgacctaccgcatcgtgaactacaccccagacatgacccacagcgaggtggagaaggccttcaagaaggccttcaaggtgtggagcgatgtgacccccctgaacttcacccggctgcatgatggcattgctgacatcatgatcagctttggcatcaaggagcacggggacttctacccctttgatggccccagcggcctgctggcccacgccttccccccaggccccaactatggaggagatgcccactttgatgatgatgagacctggaccagcagcagcaagggctacaacctcttcctggtggccgcccacgagtttggccacagcctgggcctggaccacagcaaggaccccggggccctgatgttccccatctacacctacacaggcaagagccacttcatgctgcctgatgatgatgtgcagggcatccagagcctgtatggccctggagatgaggaccccaaccccaagcaccccaagaccccagacaagtgtgaccccagcctgagcctggatgccatcaccagcctgcggggggagaccatgatcttcaaggaccgcttcttctggaggctgcacccccagcaggtggatgctgagctgttcctgaccaagagcttctggccagagctgcccaacagaattgatgctgcctatgagcaccccagccatgacctgatcttcatcttccggggcaggaagttctgggccctgaatggctatgacatcctggagggctaccccaagaagatcagcgagctgggcctgcccaaggaggtgaacaagctgcagtag

SEQ ID NO: 128279 - DNA, 2716 bp, Artificial Sequence
  derived and/or modified sequence
acaacagtccccaggcatcaccattcaagatgcatccaggggtcctggctgccttcctcttcttgagctggactcattgtcgggccctgccccttcccagtggtggtgatgaagatgatttgtctgaggaagacctccagtttgcagagcgctacctgagatcatactaccatcctacaaatctcgcgggaatcctgaaggagaatgcagcaagctccatgactgagaggctccgagaaatgcagtctttcttcggcttagaggtgactggcaaacttgacgataacaccttagatgtcatgaaaaagccaagatgcggggttcctgatgtgggtgaatacaatgttttccctcgaactcttaaatggtccaaaatgaatttaacctacagaattgtgaattacacccctgatatgactcattctgaagtcgaaaaggcattcaaaaaagccttcaaagtttggtccgatgtaactcctctgaattttaccagacttcacgatggcattgctgacatcatgatctcttttggaattaaggagcatggcgacttctacccatttgatgggccctctggcctgctggctcatgcttttcctcctgggccaaattatggaggagatgcccattttgatgatgatgaaacctggacaagtagttccaaaggctacaacttgtttcttgttgctgcgcatgagttcggccactccttaggtcttgaccactccaaggaccctggagcactcatgtttcctatctacacctacaccggcaaaagccactttatgcttcctgatgacgatgtacaagggatccagtctctctatggtccaggagatgaagaccccaaccctaaacatccaaaaacgccagacaaatgtgacccttccttatcccttgatgccattaccagtctccgaggagaaacaatgatctttaaagacagattcttctggcgcctgcatcctcagcaggttgatgcggagctgtttttaacgaaatcattttggccagaacttcccaaccgtattgatgctgcatatgagcacccttctcatgacctcatcttcatcttcagaggtagaaaattttgggctcttaatggttatgacattctggaaggttatcccaaaaaaatatctgaactgggtcttccaaaagaagttaagaagataagtgcagctgttcactttgaggatacaggcaagactctcctgttctcaggaaaccaggtctggagatatgatgatactaaccatattatggataaagactatccgagactaatagaagaagacttcccaggaattggtgataaagtagatgctgtctatgagaaaaatggttatatctattttttcaacggacccatacagtttgaatacagcatctggagtaaccgtattgttcgcgtcatgccagcaaattccattttgtggtgttaagtgtctttttaaaaattgttatttaaatcctgaagagcatttggggtaatacttccagaagtgcggggtaggggaagaagagctatcaggagaaagcttggttctgtgaacaagcttcagtaagttatctttgaatatgtagtatctatatgactatgcgtggctggaaccacattgaagaatgttagagtaatgaaatggaggatctctaaagagcatctgattcttgttgctgtacaaaagcaatggttgatgatacttcccacaccacaaatgggacacatggtctgtcaatgagagcataatttaaaaatatatttataaggaaattttacaagggcataaagtaaatacatgcatataatgaataaatcattcttactaaaaagtataaaatagtatgaaaatggaaatttgggagagccatacataaaagaaataaaccaaaggaaaatgtctgtaataatagactgtaacttccaaataaataattttcattttgcactgaggatattcagatgtatgtgcccttcttcacacagacactaacgaaatatcaaagtcattaaagacaggagacaaaagagcagtggtaagaatagtagatgtggcctttgaattctgtttaattttcacttttggcaatgactcaaagtctgctctcatataagacaaatattcctttgcatattataaaggataaagaaggatgatgtctttttattaaaatatttcaggttcttcagaagtcacacattacaaagttaaaattgttatcaaaatagtctaaggccatggcatccctttttcataaattatttgattatttaagactaaaagttgcattttaaccctattttacctagctaattatttaattgtccagtttgtcttggatatataggctattttctaaagacttgtatagcatgaaataaaatatatcttataaagtggaagtatgtatattaaaaaagagacatccaaatttttttttaaagcagtctactagattgtgatcccttgagatatggaaggatgcctttttttctctgcatttaaaaaaatcccccagcacttcccacagtgcctattgatacttggggagggtgcttggcacttattgaatatatgatcggccatcaagggaagaactattgtgctcagagacactgttgataaaaactcaggcaaagaaaatgaaatgcatatttgcaaagtgtattaggaagtgtttatgttgtttataataaaaatatattttcaacaga

SEQ ID NO: 128280 - DNA, 1470 bp, Artificial Sequence
  derived and/or modified sequence
atgcatccaggggtcctggctgccttcctcttcttgagctggactcattgtcgggccctgccccttcccagtggtggtgatgaagatgatttgtctgaggaagacctccagtttgcagagcgctacctgagatcatactaccatcctacaaatctcgcgggaatcctgaaggagaatgcagcaagctccatgactgagaggctccgagaaatgcagtctttcttcggcttagaggtgactggcaaacttgacgataacaccttagatgtcatgaaaaagccaagatgcggggttcctgatgtgggtgaatacaatgttttccctcgaactcttaaatggtccaaaatgaatttaacctacagaattgtgaattacacccctgatatgactcattctgaagtcgaaaaggcattcaaaaaagccttcaaagtttggtccgatgtaactcctctgaattttaccagacttcacgatggcattgctgacatcatgatctcttttggaattaaggagcatggcgacttctacccatttgatgggccctctggcctgctggctcatgcttttcctcctgggccaaattatggaggagatgcccattttgatgatgatgaaacctggacaagtagttccaaaggctacaacttgtttcttgttgctgcgcatgagttcggccactccttaggtcttgaccactccaaggaccctggagcactcatgtttcctatctacacctacaccggcaaaagccactttatgcttcctgatgacgatgtacaagggatccagtctctctatggtccaggagatgaagaccccaaccctaaacatccaaaaacgccagacaaatgtgacccttccttatcccttgatgccattaccagtctccgaggagaaacaatgatctttaaagacagattcttctggcgcctgcatcctcagcaggttgatgcggagctgtttttaacgaaatcattttggccagaacttcccaaccgtattgatgctgcatatgagcacccttctcatgacctcatcttcatcttcagaggtagaaaattttgggctcttaatggttatgacattctggaaggttatcccaaaaaaatatctgaactgggtcttccaaaagaagttaagaagataagtgcagctgttcactttgaggatacaggcaagactctcctgttctcaggaaaccaggtctggagatatgatgatactaaccatattatggataaagactatccgagactaatagaagaagacttcccaggaattggtgataaagtagatgctgtctatgagaaaaatgagtctcactctgtcacccaggctggagttcattgtcgcaatctgagctcgctgcaacctccgcctcctgggttcaagagattctcctgcctcagcctctggagtagctgggattacaggttatatctattttttcaacggacccatacagtttga

SEQ ID NO: 128281 - DNA, 1152 bp, Artificial Sequence
  derived and/or modified sequence
atgcatccaggggtcctggctgccttcctcttcttgagctggactcattgtcgggccctgccccttcccagtggtggtgatgaagatgatttgtctgaggaagacctccagtttgcagagcgctacctgagatcatactaccatcctacaaatctcgcgggaatcctgaaggagaatgcagcaagctccatgactgagaggctccgagaaatgcagtctttcttcggcttagaggtgactggcaaacttgacgataacaccttagatgtcatgaaaaagccaagatgcggggttcctgatgtgggtgaatacaatgttttccctcgaactcttaaatggtccaaaatgaatttaacctacagaattgtgaattacacccctgatatgactcattctgaagtcgaaaaggcattcaaaaaagccttcaaagtttggtccgatgtaactcctctgaattttaccagacttcacgatggcattgctgacatcatgatctcttttggaattaaggagcatggcgacttctacccatttgatgggccctctggcctgctggctcatgcttttcctcctgggccaaattatggaggagatgcccattttgatgatgatgaaacctggacaagtagttccaaaggctacaacttgtttcttgttgctgcgcatgagttcggccactccttaggtcttgaccactccaaggaccctggagcactcatgtttcctatctacacctacaccggcaaaagccactttatgcttcctgatgacgatgtacaagggatccagtctctctatggtccaggagatgaagaccccaaccctaaacatccaaaaacgccagacaaatgtgacccttccttatcccttgatgccattaccagtctccgaggagaaacaatgatctttaaagacagattcttctggcgcctgcatcctcagcaggttgatgcggagctgtttttaacgaaatcattttggccagaacttcccaaccgtattgatgctgcatatgagcacccttctcatgacctcatcttcatcttcagaggtagaaaattttgggctcttaatggttatgacattctggaaggttatcccaaaaaaatatctgaactgggtcttccaaaagaagttaacaagcttcagtaa

SEQ ID NO: 128282 - DNA, 1416 bp, Artificial Sequence
  derived and/or modified sequence
atgcaccccggcgtgctggccgccttcctgttcctgagctggacccactgtcgggccctaccactgcccagcggaggggacgaggatgatctgtcggaagaggatctgcagttcgcagaacggtatctgagaagttattatcacccaacaaacttggccggcattctgaaggagaacgccgcttcctctatgaccgagcgattgcgggagatgcagtccttcttcggactggaggttactggaaagttggatgacaacaccctggatgtaatgaaaaaacctcgatgcggggtgcctgacgttggcgaatataacgtgtttccgagaaccctcaagtggagtaagatgaatctgacctacaggatcgtaaactacacgccagatatgacccacagtgaggtggagaaggccttcaagaaggcttttaaggtgtggtctgatgtgacgccactcaattttacccggctgcacgatgggatcgccgatattatgatctcctttggaattaaggaacatggggacttctatcccttcgatgggcccagcgggttgcttgctcatgcgttccctccgggacctaactacggaggagatgcgcactttgatgatgacgaaacctggaccagctcttccaaaggctataacctcttcctcgtagctgcacacgagttcggccattctttaggtctcgatcacagcaaagatccaggggcactgatgttccccatctatacatacacaggtaagtcccactttatgttaccggatgacgatgtgcagggaatccagagtctctatgggcctggcgacgaggatccaaatcctaaacatcccaagactcctgacaaatgtgacccctccttgtcactcgacgcaattacgagtttacggggcgagacaatgatttttaaagacagatttttttggcgccttcacccccagcaggtcgatgcagagttatttctgacgaagtccttctggcccgaattgcctaaccggatcgatgctgcctacgagcaccccagtcatgaccttatcttcatcttcagaggccgtaaattctgggcattgaatgggtatgatattttggaaggttatccaaagaaaatttccgaacttgggcttcctaaagaggtaaaaaagatttccgccgctgtgcactttgaagacacgggaaaaaccttgcttttttctggaaaccaagtatggaggtacgacgataccaaccatataatggacaaggactatcctcgactgatcgaggaagattttcccggcattggggacaaagtggatgctgtatacgaaaaaaatggctacatttatttttttaatggaccgatccagttcgagtattccatatggtcaaataggattgttagagtcatgccagcaaactctatcctgtggtgttag

SEQ ID NO: 128283 - DNA, 1470 bp, Artificial Sequence
  derived and/or modified sequence
atgcaccccggcgtgctggccgccttcctgttcctgagctggacccactgtagggccttgcccttgccgtccggaggtgacgaggatgacctcagcgaggaagatctgcaatttgcggaaaggtatctccgttcatattatcacccaactaatctggccggtatacttaaggaaaacgccgccagctcaatgacagaacgcctgcgtgagatgcagagcttttttggtctcgaggtgactggtaaactggacgataacacactggatgtgatgaagaagccaaggtgcggagttcccgacgtcggggagtacaacgtgttcccaaggactctgaagtggtctaagatgaacctgacgtatcgcatcgttaattacaccccggatatgactcacagcgaggttgagaaagcctttaagaaagcttttaaggtgtggagcgacgtgacacccctcaatttcacccgactacacgacggcattgcagatatcatgatctcctttgggattaaggagcacggtgacttttatcccttcgacggcccttcaggactactcgctcatgcatttccgccagggcccaattatgggggagatgcacatttcgacgatgacgaaacatggacctccagctctaaggggtacaatttattcttagtggcagcacacgaattcggacacagccttggcctcgaccactctaaggatcctggcgcactgatgtttccaatatacacatacactggcaagagccactttatgctgccagatgatgatgtacagggaatccaatccctttacggacccggggacgaagaccctaatccgaagcaccctaagaccccagacaagtgtgaccccagcttatctctggatgcaatcacctctctgagaggagaaacaatgatctttaaagaccgatttttctggaggctgcacccacaacaggttgacgcagagttgtttctgaccaaatctttttggccagagttgcccaacaggattgatgccgcttatgagcatcccagtcacgacctgatctttatcttcaggggaagaaaattctgggcgttaaacgggtatgacattcttgaagggtatccaaagaaaatcagcgagctaggtctgcctaaagaggtgaaaaaaatcagcgctgccgtccacttcgaggataccgggaagaccctgctcttcagtggtaatcaggtttggcgctatgatgacactaatcacattatggataaggattacccccgtctgatcgaagaggattttcccggcatcggtgacaaggtggacgccgtttatgaaaaaaatgaatctcactcggtgactcaggcaggtgttcactgccgaaacttgagcagcctgcaacctccccctcccggctttaaacgctttagctgcctgtctttgtggtcctcttgggattaccgcctttatctgttcttccagagaactcacacagtgtag

SEQ ID NO: 128284 - DNA, 1152 bp, Artificial Sequence
  derived and/or modified sequence
atgcaccccggcgtgctggccgccttcctgttcctgagctggacccattgtagggccttgccactgccctccggaggggacgaggacgatctatctgaggaagacttacagttcgcggaacgctacctacgcagctactatcatcctaccaatttagcagggatcctgaaggagaatgccgcaagttccatgacagagcgactgagagagatgcagtcatttttcgggctggaagtaacaggtaagctggatgataacactctggacgtaatgaaaaagccgcggtgtggcgtgcccgacgtgggtgaatacaacgtcttcccacgcaccctgaaatggtccaagatgaatcttacctataggattgttaactatacaccagatatgacacactctgaagtcgagaaggcctttaaaaaagcctttaaggtctggagcgacgtcacaccactcaatttcaccagattacacgatggtatagcggacatcatgatctcgttcgggatcaaggagcatggcgatttctaccctttcgacggtccttcaggcctgctagcgcacgcctttcccccgggaccaaactacggcggagatgctcattttgacgacgatgaaacatggacctcttcgtctaaaggctacaacctgttcttggtggctgcgcacgagtttggacacagcctaggcctagaccacagcaaggaccccggcgctctgatgttccccatctatacatatacaggcaagtctcactttatgctccccgatgacgacgtgcaaggtattcaatcactttacggtcccggagacgaggacccaaaccctaagcatcctaaaacccctgacaaatgcgatcctagcctgtctctggacgctataacgtcactccggggggaaaccatgatcttcaaagaccgattcttctggaggctgcatcctcagcaggtggacgcggagctgtttctcacaaagtccttctggcccgagctacccaaccgaattgatgctgcgtacgaacatccctctcacgaccttatatttatttttcgaggccgaaagttttgggctttaaacgggtacgacatcctggaaggctacccgaaaaaaatttccgagctcggcctgccaaaggaggtgaacaagctgcagtag

SEQ ID NO: 128285 - DNA, 1416 bp, Artificial Sequence
  derived and/or modified sequence
atgcatcccggtgtgcttgcggcattcctgttcctgagctggactcattgccgcgcattgcccttgccatcgggtggggacgaggacgacctaagtgaagaggatctgcagttcgcggaacgttatttgagaagctactatcatcccaccaatttagccggtatccttaaggagaatgcagcttcctccatgaccgaacgactcagagaaatgcagagcttctttggcttagaggtcacgggcaaactagacgacaatacgctggacgtgatgaaaaaacctagatgcggagtgcccgacgtgggggagtacaacgtatttccgaggaccttgaagtggagcaagatgaacctaacctaccgaattgtaaattacacacccgatatgacccactcagaagtggagaaagcatttaagaaagcattcaaagtctggtcagacgtcacgcccctgaattttacccggcttcacgacggaatagctgacattatgatcagctttggaatcaaggaacacggtgacttttacccgtttgacggaccgtccgggctattggcacatgccttcccgccagggcctaattatggaggcgacgctcatttcgacgacgatgaaacttggacatcgtcttccaagggctacaacctgtttctggttgcagcacacgagttcggacattctcttggattggaccattcaaaggaccccggagcactcatgtttccaatttatacctacacaggaaagtcccactttatgctgccggatgacgacgttcagggtatacaatccctctacggaccgggagacgaggaccctaaccccaagcaccctaagactcccgataaatgcgaccccagtctgtccctggacgctatcactagtctaaggggggagactatgattttcaaagataggtttttctggaggctccaccctcagcaagtcgatgctgagttgtttctcacaaaatccttttggccagaattacccaataggatagatgctgcctacgaacaccccagccacgatctcatatttatcttccgagggaggaagttctgggcactcaacggatacgacatcctagaaggctaccctaagaagattagcgaactcgggttgcccaaggaggtaaaaaagatcagcgccgcagtgcatttcgaggacacaggcaagactctgctgttcagcggtaatcaagtgtggaggtatgacgacacaaaccatatcatggacaaggattaccccagactcatagaagaagatttccctggcataggtgacaaagtggatgcggtgtacgagaagaatggctatatttattttttcaacgggcctattcagttcgagtactccatatggtccaaccggatcgtgcgggtgatgcctgctaactctatcctgtggtgctag

SEQ ID NO: 128286 - DNA, 1470 bp, Artificial Sequence
  derived and/or modified sequence
atgcatccaggagttttagcggctttcctttttctgagctggacacactgcagagcactcccactcccaagtggaggcgatgaggatgatttgagtgaggaagacctacagttcgccgagcggtatctgcgaagttactatcatcccactaatctggcgggtatccttaaggaaaacgccgcttcttctatgaccgaaaggctgcgcgaaatgcaaagcttttttggcttagaggtaacggggaagcttgatgataacacgctggatgtcatgaaaaaacctcgatgcggggtgcccgacgtaggtgagtataacgtgttccctcgcacactgaagtggtctaaaatgaatctgacctaccggatagtgaattacacccctgacatgacacacagcgaagtcgagaaagcttttaagaaggcttttaaagtctggagtgacgtgacgcccctgaacttcacacgtctgcacgacgggatagcggatatcatgatatccttcggcattaaagagcatggggatttctatccttttgacgggcctagtgggctgctcgcacacgccttccctcccggtcccaattatggaggcgacgctcactttgacgatgacgaaacttggacatcttccagtaagggatacaaccttttcctggtggccgctcacgagttcggccattctttgggactggatcattcgaaggatccaggggctctgatgttccccatttatacatacacaggcaagagtcatttcatgttgccagacgacgacgtccagggcatccagtctctgtatggacccggagacgaggaccccaacccgaaacacccaaaaacgcctgacaaatgtgacccttccctgagcctcgatgccataacttccctgcgtggagaaaccatgatctttaaagaccggtttttctggagattgcatccccagcaggtcgacgctgagttgtttctgacaaagtccttctggcctgaactgcctaaccgtatagatgccgcatatgagcatccctcccacgacctgatctttatcttccgcggtaggaaattttgggcactgaacggatatgacatcctggaaggctaccctaaaaagattagcgagctgggcttacctaaggaagttaaaaaaatcagcgcagccgtccatttcgaggataccggaaaaacactactcttctcagggaatcaggtttggcgttatgacgacaccaatcatataatggataaagattatcctcgactcatcgaggaggattttcccggaattggtgacaaggtggacgcggtgtatgagaaaaatgagagccatagtgttacccaagctggcgtgcactgtcgaaatctatctagtctgcagccgccaccacccggattcaagagattttcttgcctgagcctttggtcatcctgggactatagactttacctgttctttcagcggacccatacagtctag

SEQ ID NO: 128287 - DNA, 1152 bp, Artificial Sequence
  derived and/or modified sequence
atgcaccccggagttctcgcagccttcctatttctgtcctggactcattgtagggcactcccactgccgtctggaggcgacgaggatgacctcagtgaggaagaccttcagttcgcagaacgctacctgagaagctattatcaccctaccaatctggccggaattctgaaagaaaatgcagcgtctagcatgaccgagaggctgcgcgagatgcagagcttctttgggcttgaggtgacaggaaagctggacgacaatactttggatgtgatgaagaagccacggtgcggcgtgcctgatgtgggcgaatataatgtcttccccagaacccttaagtggtcgaaaatgaatctgacctatcgaatcgttaactacaccccagacatgacccactcagaggtggagaaggcatttaagaaagcgttcaaagtgtggagcgatgtgacgccactgaacttcacaaggctgcatgatgggatcgctgacattatgattagtttcggtatcaaggaacacggggacttctatcctttcgatggcccttcaggacttctcgctcacgccttccctccgggacctaactacggcggagacgcacattttgatgacgacgaaacctggaccagctcctctaagggatacaatttgttcctcgttgccgctcacgagttcggtcatagcctcgggttggaccactctaaagacccgggtgctttgatgtttcctatctacacatataccgggaaatctcatttcatgctgcccgatgatgatgtgcaagggattcagagcctgtacggcccaggcgacgaagatcctaatccaaagcaccccaaaactcctgataagtgcgatccatcattatccctggatgctattacctctctgcgcggagaaaccatgatcttcaaggataggttcttctggagactccacccccagcaggttgacgccgagctgtttctcacaaaaagcttctggcctgagctgcctaaccgcattgatgccgcttacgaacacccaagccacgacctgatttttattttccggggaagaaaattttgggcactgaatgggtacgacatactcgagggttaccccaagaagatcagcgagttgggtctcccgaaggaagtgaataagctgcagtag

SEQ ID NO: 128288 - DNA, 1416 bp, Artificial Sequence
  derived and/or modified sequence
atgcaccccggagtgctggccgctttcttgtttcttagctggacccactgtcgtgctctgcctctcccatcagggggagatgaggatgatctgtccgaagaggacctccagttcgccgaacggtatctgcgctcttattaccatcccaccaacctagcaggtatactgaaggaaaacgccgcttctagtatgacggaacgcctcagggaaatgcagtcatttttcggactggaagttacagggaaacttgacgacaacacacttgacgtgatgaagaagcccagatgtggggttcctgatgtaggtgagtataatgtgttcccacgtactttaaagtggtcaaaaatgaatctaacttatcgcatcgtgaactacactcccgatatgacgcattccgaggtcgagaaggcctttaagaaagcatttaaagtatggtccgacgtaaccccccttaacttcacccgcctccacgacggaatcgcagatataatgatcagctttggaatcaaggaacacggagacttctaccccttcgatggcccttctggattacttgctcacgcctttccaccaggcccaaactatggcggcgatgcacattttgatgacgatgaaacttggacgtctagctctaagggatataaccttttcctagtcgcagcccacgaattcggccattcattaggattggatcactccaaggaccccggggcgttgatgttcccaatttacacctacactgggaaaagtcatttcatgctgcccgacgatgatgtacaaggcatccagagcctttatgggcctggagatgaggaccccaatcctaaacaccctaaaaccccagacaaatgcgatccctctctgagcctcgatgccattacaagcctgcgcggagaaacaatgattttcaaggacagattcttctggaggctacatccccaacaagttgacgctgaattatttctcacaaagtcgttctggcccgaactcccaaatcggattgatgctgcctacgagcatccctcccatgacttaattttcatatttagaggacgtaaattttgggcgctcaatggatacgatatcctggaggggtaccctaagaagatcagcgagctggggctgcccaaggaggtgaaaaagatctccgccgcagtgcactttgaagataccggaaaaactctcctgtttagtggcaaccaggtctggagatacgatgacacaaatcacattatggataaagattatccacggctaatcgaagaggacttccccggcatcggtgacaaggttgacgccgtttatgagaaaaatgggtatatttattttttcaatggacccatccaattcgagtattccatttggtccaacagaatcgtgcgagtcatgccagcaaatagtatcctgtggtgttag

SEQ ID NO: 128289 - DNA, 1470 bp, Artificial Sequence
  derived and/or modified sequence
atgcaccctggagtgctggccgccttcttgttcctgagttggacccactgtagagccctaccactgccttcggggggcgatgaggacgacttaagcgaagaggacctccaattcgctgagcgctaccttcggtcttattatcacccaactaacttagccgggattctcaaggaaaatgccgcatcctcaatgaccgaaagactgcgcgagatgcagagcttcttcggtttagaagtgaccgggaagctggacgataataccctggacgtgatgaaaaaaccacgctgtggggtgccagatgtgggcgagtacaatgtgtttcctcgaacactaaaatggagcaaaatgaacttaacgtaccgcatcgtgaactacacccctgacatgacccatagcgaggtggaaaaagcttttaagaaggcctttaaagtgtggtccgatgttacccccctgaacttcactcgtctccacgacggaattgccgatataatgatctccttcggtatcaaagagcatggagatttctatccctttgacgggcccagtggactgctggcccacgctttccctcctggccctaactacggcggagacgcacatttcgatgatgatgagacttggacctcatcaagtaaaggatacaatctttttttagtagccgcccatgaatttgggcactctctaggactagaccacagcaaagaccccggagccttgatgttcccaatctacacatatactggcaagtcgcacttcatgctgcccgacgacgatgttcagggcattcagtctctctacggccctggagacgaggacccaaaccccaaacacccaaagactcccgacaaatgcgaccctagtctgtcactggacgcaatcacttctctacgtggagaaacgatgatattcaaggaccgatttttttggcgactgcacccacaacaggttgatgctgagcttttcctcactaaaagcttctggcctgaactacccaatcggatcgacgccgcatacgaacaccctagccatgacctgatcttcattttccgcggccgaaagttctgggcgttgaacggatatgatatccttgagggatatcccaagaaaattagtgagctcggcctgcccaaagaggtgaaaaaaatctccgccgctgtgcacttcgaggacaccgggaaaaccctattattcagcggaaatcaggtgtggcgatatgatgatactaatcacatcatggacaaggattacccaagactgatcgaagaggattttcctggaataggggataaagtggatgccgtgtacgagaaaaatgaatcacattcagtgactcaggctggtgtacattgcagaaatctctctagcttgcagcccccgcctccagggttcaaacgtttttcctgccttagtctctggtcgtcctgggactatagactttatctcttcttccagaggacccacaccgtgtag

SEQ ID NO: 128290 - DNA, 1152 bp, Artificial Sequence
  derived and/or modified sequence
atgcatcccggagtgttggcagcttttctcttcttatcctggacacactgccgggctttgccgctgcccagcggtggcgacgaggatgacttatctgaagaggacttacagtttgcagaaagatacctgaggagttactaccaccctacaaacctggctggcatcttaaaagagaatgctgcctcctcaatgactgagcgcctgagggagatgcagtctttttttggtttggaggtgaccggaaagttggacgacaatacattggatgtgatgaagaaacctcgctgcggagttccagatgttggcgagtataacgtattcccaagaaccctcaagtggagcaagatgaacttgacctatcggattgtgaactacacacccgatatgacccactccgaagttgaaaaagcattcaagaaggctttcaaggtgtggagtgatgtgacacctctgaactttactcgattacacgacggaattgccgatattatgatatcctttggcattaaggaacacggagatttttatcccttcgatggccctagcggactcttggcacacgcttttcctcctggccctaattatggaggcgacgcccattttgacgacgacgagacttggactagctcttccaagggttacaatcttttcctggtggcggctcacgaatttggacactctctaggcttagatcactcaaaggatccaggggccttaatgttccccatctatacatatactggcaaatcgcacttcatgctgcctgacgacgatgtgcagggtatccaaagtttatatgggccgggggatgaggatcccaacccaaagcatccaaagactcccgataaatgtgatccatctctgagccttgacgcaatcacttcactgaggggcgagacgatgattttcaaagatcgattcttctggcggctgcatccacagcaagttgatgctgaactcttcttgacgaaaagcttttggcctgagctacctaatcgtattgatgcagcatatgagcatccatcccacgacctcattttcatatttcgaggacggaagttctgggccctgaacggatacgacattctggagggatatcccaaaaaaatctcagagctgggtctgcctaaagaggtgaataagttacaatag

SEQ ID NO: 128291 - DNA, 1416 bp, Artificial Sequence
  derived and/or modified sequence
atgcaccctggtgtacttgccgccttcctgttcctctcctggactcattgccgggcactacctttgccttctggaggtgacgaagatgacctatccgaagaagatctgcagttcgctgagcggtacttaagatcctattaccaccccaccaatctcgccggtatcctgaaggagaacgccgcctcgtctatgacggaacgtctacgcgaaatgcaatcgttcttcgggctcgaagtaaccggtaagctggacgacaatactctcgatgtcatgaaaaagcctaggtgtggggtaccagacgtaggcgaatataacgtgtttccaagaacccttaagtggtccaagatgaatttaacctaccggatagtcaattatactcctgatatgacgcactcggaagtcgagaaagccttcaaaaaagcattcaaagtatggagtgacgtcacccctcttaacttcacccgcttacatgatggaatagctgatattatgatttcttttggaataaaggaacatggggatttttatccattcgacggaccctctgggctactagctcatgcgtttcccccagggcccaactacggaggtgatgcgcacttcgatgatgacgagacctggacaagttcatcaaagggatataatctgtttttagttgcggcccatgagttcggccactcactcggacttgaccattctaaggatcccggcgctttgatgtttcccatctatacatacacaggtaagtcccatttcatgttgcctgatgatgacgtacagggcattcaaagtctgtatggtcccggagacgaagatcccaaccccaaacaccccaagaccccggacaaatgtgacccaagcttgtccttagacgccattacaagcctgcgcggcgagactatgatcttcaaggaccgcttcttctggcggctgcacccccaacaggtggacgctgaattgttccttacaaagtccttttggccagaactaccaaaccggattgacgcagcttatgaacaccctagccatgatcttatctttatattcagaggaaggaaattctgggcgcttaatggctatgatatccttgagggctacccaaaaaaaataagcgagctggggctccccaaagaggtcaagaaaatttcagctgcggtacattttgaggatactggcaagacactcctgtttagtggaaatcaagtctggagatatgacgatacaaatcatataatggataaggattatccccgcctgatcgaggaagactttccagggattggggataaggttgatgcagtttatgagaaaaatggatacatttacttttttaacgggccaatacaattcgagtacagcatatggtctaatagaatcgtgagagtgatgcctgctaattctatcctgtggtgttag

SEQ ID NO: 128292 - DNA, 1470 bp, Artificial Sequence
  derived and/or modified sequence
atgcatcccggcgtgcttgctgccttccttttcctaagctggactcattgccgcgctcttccgttaccatctgggggcgatgaagacgacctaagtgaggaagatctgcaattcgccgaaagatatctcaggagttactaccacccaaccaacctagcagggatactgaaggagaatgccgcctcaagtatgaccgagagactgagagagatgcagtctttctttggactagaagtgactggtaagttagatgacaatacgttggacgtgatgaagaaaccacgctgtggcgtacccgatgtgggtgagtataacgtgtttcccagaacactcaaatggtctaaaatgaatctcacctataggatagtgaattataccccagacatgacacattccgaggttgaaaaggcatttaagaaagcatttaaagtttggagtgacgtcaccccactcaacttcaccagactgcacgacggcatcgcagatataatgatttcttttggaataaaggaacatggcgatttttacccattcgacggccctagtggcttgctcgctcatgcctttcctcctggcccgaattacggcggcgacgctcattttgacgacgacgaaacctggactagtagctcaaaggggtataacctgtttcttgtggctgcacacgaatttgggcacagtctcggtttggaccattccaaggatcctggcgcattaatgtttcctatttacacgtataccgggaaaagccattttatgttaccagatgacgatgtgcaaggtattcagagtctctatggacccggcgacgaagatcctaatcctaaacatcccaaaacaccagataaatgtgatccctcgctttctcttgacgccatcaccagcctcagaggcgaaacaatgatcttcaaggacagatttttttggcgtctccatccacaacaggtcgacgccgaactcttcctgacaaaaagcttctggcccgaactgcccaacagaattgacgccgcttatgagcatccttcacatgatctcattttcattttccgaggcagaaagttctgggcactcaacggttatgacatcctcgagggttacccgaagaagatttccgagcttggactcccaaaagaggtaaaaaagatatctgccgcagtacattttgaagatactggcaagactctcctgttctctggtaatcaagtttggcgctatgacgacaccaaccatatcatggataaagactacccacggctcatcgaagaggatttccctggaatcggagataaagtggacgccgtctatgaaaagaacgaaagccactccgtgacacaggccggagtgcattgccgaaatctgagctcactgcagccccctccaccaggatttaaacgcttcagctgtctgtcgctctggagcagctgggactaccgcttgtacctgttttttcagcggacccatacagtttag

SEQ ID NO: 128293 - DNA, 1152 bp, Artificial Sequence
  derived and/or modified sequence
atgcacccaggcgtgttggccgccttcctgtttctgtcttggacacattgtcgtgccctacctctcccctccggcggcgatgaggatgacctgagtgaggaggatctacagttcgcagaaaggtacttaagatcatactatcatcctacgaacctcgcgggaatcttgaaagagaatgctgcctcctccatgacggagcgactgcgcgagatgcagagttttttcggcctcgaagtcaccggaaaactggacgataacacattggacgtaatgaaaaaacctagatgcggcgttccagacgtcggcgagtacaatgtttttcctagaacccttaaatggagtaagatgaaccttacttacagaattgtcaactacacacccgatatgacacactcagaagtggaaaaagctttcaaaaaggcctttaaagtctggtcagacgtaacccctttaaacttcacccggctgcacgatggtattgcggatatcatgataagcttcggtatcaaggaacacggagatttttatcctttcgatggccctagcggactgctcgcccacgccttccctcctggtcccaattacgggggcgatgcacatttcgacgatgacgagacttggacatcctcttcaaaaggctataacctgttcctggtagctgcacacgaatttggacactcactcggactagaccattcaaaagaccctggcgctctaatgtttcccatatatacctatacaggcaaaagtcattttatgctgccagacgacgatgtccaggggattcagtcactatatgggccaggggatgaagatccaaatccaaaacaccctaagactccggacaagtgtgacccttcactctccctcgacgccatcacgagtcttagaggagaaaccatgatattcaaagacaggtttttttggcggctgcaccctcagcaagtggatgctgagctcttcctaactaaaagtttttggccagagctgcctaatagaattgacgccgcgtacgaacaccctagccatgatctgatctttattttcaggggaagaaaattctgggcacttaacggctacgatatactggagggataccctaagaagatcagcgaactcggactaccgaaagaggttaataaactgcagtag

SEQ ID NO: 128294 - RNA, 1416 nt, Artificial Sequence
  derived and/or modified sequence
augcaccccggagugcuggccgcuuucuuguuucuuagcuggacccacugucgugcucugccucucccaucagggggagaugaggaugaucuguccgaagaggaccuccaguucgccgaacgguaucugcgcucuuauuaccaucccaccaaccuagcagguauacugaaggaaaacgccgcuucuaguaugacggaacgccucagggaaaugcagucauuuuucggacuggaaguuacagggaaacuugacgacaacacacuugacgugaugaagaagcccagaugugggguuccugauguaggugaguauaauguguucccacguacuuuaaaguggucaaaaaugaaucuaacuuaucgcaucgugaacuacacucccgauaugacgcauuccgaggucgagaaggccuuuaagaaagcauuuaaaguaugguccgacguaaccccccuuaacuucacccgccuccacgacggaaucgcagauauaaugaucagcuuuggaaucaaggaacacggagacuucuaccccuucgauggcccuucuggauuacuugcucacgccuuuccaccaggcccaaacuauggcggcgaugcacauuuugaugacgaugaaacuuggacgucuagcucuaagggauauaaccuuuuccuagucgcagcccacgaauucggccauucauuaggauuggaucacuccaaggaccccggggcguugauguucccaauuuacaccuacacugggaaaagucauuucaugcugcccgacgaugauguacaaggcauccagagccuuuaugggccuggagaugaggaccccaauccuaaacacccuaaaaccccagacaaaugcgaucccucucugagccucgaugccauuacaagccugcgcggagaaacaaugauuuucaaggacagauucuucuggaggcuacauccccaacaaguugacgcugaauuauuucucacaaagucguucuggcccgaacucccaaaucggauugaugcugccuacgagcaucccucccaugacuuaauuuucauauuuagaggacguaaauuuugggcgcucaauggauacgauauccuggagggguacccuaagaagaucagcgagcuggggcugcccaaggaggugaaaaagaucuccgccgcagugcacuuugaagauaccggaaaaacucuccuguuuaguggcaaccaggucuggagauacgaugacacaaaucacauuauggauaaagauuauccacggcuaaucgaagaggacuuccccggcaucggugacaagguugacgccguuuaugagaaaaauggguauauuuauuuuuucaauggacccauccaauucgaguauuccauuugguccaacagaaucgugcgagucaugccagcaaauaguauccugugguguuag

SEQ ID NO: 128295 - RNA, 1470 nt, Artificial Sequence
  derived and/or modified sequence
augcacccuggagugcuggccgccuucuuguuccugaguuggacccacuguagagcccuaccacugccuucggggggcgaugaggacgacuuaagcgaagaggaccuccaauucgcugagcgcuaccuucggucuuauuaucacccaacuaacuuagccgggauucucaaggaaaaugccgcauccucaaugaccgaaagacugcgcgagaugcagagcuucuucgguuuagaagugaccgggaagcuggacgauaauacccuggacgugaugaaaaaaccacgcuguggggugccagaugugggcgaguacaauguguuuccucgaacacuaaaauggagcaaaaugaacuuaacguaccgcaucgugaacuacaccccugacaugacccauagcgagguggaaaaagcuuuuaagaaggccuuuaaagugugguccgauguuaccccccugaacuucacucgucuccacgacggaauugccgauauaaugaucuccuucgguaucaaagagcauggagauuucuaucccuuugacgggcccaguggacugcuggcccacgcuuucccuccuggcccuaacuacggcggagacgcacauuucgaugaugaugagacuuggaccucaucaaguaaaggauacaaucuuuuuuuaguagccgcccaugaauuugggcacucucuaggacuagaccacagcaaagaccccggagccuugauguucccaaucuacacauauacuggcaagucgcacuucaugcugcccgacgacgauguucagggcauucagucucucuacggcccuggagacgaggacccaaaccccaaacacccaaagacucccgacaaaugcgacccuagucugucacuggacgcaaucacuucucuacguggagaaacgaugauauucaaggaccgauuuuuuuggcgacugcacccacaacagguugaugcugagcuuuuccucacuaaaagcuucuggccugaacuacccaaucggaucgacgccgcauacgaacacccuagccaugaccugaucuucauuuuccgcggccgaaaguucugggcguugaacggauaugauauccuugagggauaucccaagaaaauuagugagcucggccugcccaaagaggugaaaaaaaucuccgccgcugugcacuucgaggacaccgggaaaacccuauuauucagcggaaaucagguguggcgauaugaugauacuaaucacaucauggacaaggauuacccaagacugaucgaagaggauuuuccuggaauaggggauaaaguggaugccguguacgagaaaaaugaaucacauucagugacucaggcugguguacauugcagaaaucucucuagcuugcagcccccgccuccaggguucaaacguuuuuccugccuuagucucuggucguccugggacuauagacuuuaucucuucuuccagaggacccacaccguguag

SEQ ID NO: 128296 - RNA, 1152 nt, Artificial Sequence
  derived and/or modified sequence
augcaucccggaguguuggcagcuuuucucuucuuauccuggacacacugccgggcuuugccgcugcccagcgguggcgacgaggaugacuuaucugaagaggacuuacaguuugcagaaagauaccugaggaguuacuaccacccuacaaaccuggcuggcaucuuaaaagagaaugcugccuccucaaugacugagcgccugagggagaugcagucuuuuuuugguuuggaggugaccggaaaguuggacgacaauacauuggaugugaugaagaaaccucgcugcggaguuccagauguuggcgaguauaacguauucccaagaacccucaaguggagcaagaugaacuugaccuaucggauugugaacuacacacccgauaugacccacuccgaaguugaaaaagcauucaagaaggcuuucaagguguggagugaugugacaccucugaacuuuacucgauuacacgacggaauugccgauauuaugauauccuuuggcauuaaggaacacggagauuuuuaucccuucgauggcccuagcggacucuuggcacacgcuuuuccuccuggcccuaauuauggaggcgacgcccauuuugacgacgacgagacuuggacuagcucuuccaaggguuacaaucuuuuccugguggcggcucacgaauuuggacacucucuaggcuuagaucacucaaaggauccaggggccuuaauguuccccaucuauacauauacuggcaaaucgcacuucaugcugccugacgacgaugugcaggguauccaaaguuuauaugggccgggggaugaggaucccaacccaaagcauccaaagacucccgauaaaugugauccaucucugagccuugacgcaaucacuucacugaggggcgagacgaugauuuucaaagaucgauucuucuggcggcugcauccacagcaaguugaugcugaacucuucuugacgaaaagcuuuuggccugagcuaccuaaucguauugaugcagcauaugagcauccaucccacgaccucauuuucauauuucgaggacggaaguucugggcccugaacggauacgacauucuggagggauaucccaaaaaaaucucagagcugggucugccuaaagaggugaauaaguuacaauag

SEQ ID NO: 128297 - RNA, 1416 nt, Artificial Sequence
  derived and/or modified sequence
augcacccugguguacuugccgccuuccuguuccucuccuggacucauugccgggcacuaccuuugccuucuggaggugacgaagaugaccuauccgaagaagaucugcaguucgcugagcgguacuuaagauccuauuaccaccccaccaaucucgccgguauccugaaggagaacgccgccucgucuaugacggaacgucuacgcgaaaugcaaucguucuucgggcucgaaguaaccgguaagcuggacgacaauacucucgaugucaugaaaaagccuaggugugggguaccagacguaggcgaauauaacguguuuccaagaacccuuaagugguccaagaugaauuuaaccuaccggauagucaauuauacuccugauaugacgcacucggaagucgagaaagccuucaaaaaagcauucaaaguauggagugacgucaccccucuuaacuucacccgcuuacaugauggaauagcugauauuaugauuucuuuuggaauaaaggaacauggggauuuuuauccauucgacggacccucugggcuacuagcucaugcguuucccccagggcccaacuacggaggugaugcgcacuucgaugaugacgagaccuggacaaguucaucaaagggauauaaucuguuuuuaguugcggcccaugaguucggccacucacucggacuugaccauucuaaggaucccggcgcuuugauguuucccaucuauacauacacagguaagucccauuucauguugccugaugaugacguacagggcauucaaagucuguauggucccggagacgaagaucccaaccccaaacaccccaagaccccggacaaaugugacccaagcuuguccuuagacgccauuacaagccugcgcggcgagacuaugaucuucaaggaccgcuucuucuggcggcugcacccccaacagguggacgcugaauuguuccuuacaaaguccuuuuggccagaacuaccaaaccggauugacgcagcuuaugaacacccuagccaugaucuuaucuuuauauucagaggaaggaaauucugggcgcuuaauggcuaugauauccuugagggcuacccaaaaaaaauaagcgagcuggggcuccccaaagaggucaagaaaauuucagcugcgguacauuuugaggauacuggcaagacacuccuguuuaguggaaaucaagucuggagauaugacgauacaaaucauauaauggauaaggauuauccccgccugaucgaggaagacuuuccagggauuggggauaagguugaugcaguuuaugagaaaaauggauacauuuacuuuuuuaacgggccaauacaauucgaguacagcauauggucuaauagaaucgugagagugaugccugcuaauucuauccugugguguuag

SEQ ID NO: 128298 - RNA, 1470 nt, Artificial Sequence
  derived and/or modified sequence
augcaucccggcgugcuugcugccuuccuuuuccuaagcuggacucauugccgcgcucuuccguuaccaucugggggcgaugaagacgaccuaagugaggaagaucugcaauucgccgaaagauaucucaggaguuacuaccacccaaccaaccuagcagggauacugaaggagaaugccgccucaaguaugaccgagagacugagagagaugcagucuuucuuuggacuagaagugacugguaaguuagaugacaauacguuggacgugaugaagaaaccacgcuguggcguacccgaugugggugaguauaacguguuucccagaacacucaaauggucuaaaaugaaucucaccuauaggauagugaauuauaccccagacaugacacauuccgagguugaaaaggcauuuaagaaagcauuuaaaguuuggagugacgucaccccacucaacuucaccagacugcacgacggcaucgcagauauaaugauuucuuuuggaauaaaggaacauggcgauuuuuacccauucgacggcccuaguggcuugcucgcucaugccuuuccuccuggcccgaauuacggcggcgacgcucauuuugacgacgacgaaaccuggacuaguagcucaaagggguauaaccuguuucuuguggcugcacacgaauuugggcacagucucgguuuggaccauuccaaggauccuggcgcauuaauguuuccuauuuacacguauaccgggaaaagccauuuuauguuaccagaugacgaugugcaagguauucagagucucuauggacccggcgacgaagauccuaauccuaaacaucccaaaacaccagauaaaugugaucccucgcuuucucuugacgccaucaccagccucagaggcgaaacaaugaucuucaaggacagauuuuuuuggcgucuccauccacaacaggucgacgccgaacucuuccugacaaaaagcuucuggcccgaacugcccaacagaauugacgccgcuuaugagcauccuucacaugaucucauuuucauuuuccgaggcagaaaguucugggcacucaacgguuaugacauccucgaggguuacccgaagaagauuuccgagcuuggacucccaaaagagguaaaaaagauaucugccgcaguacauuuugaagauacuggcaagacucuccuguucucugguaaucaaguuuggcgcuaugacgacaccaaccauaucauggauaaagacuacccacggcucaucgaagaggauuucccuggaaucggagauaaaguggacgccgucuaugaaaagaacgaaagccacuccgugacacaggccggagugcauugccgaaaucugagcucacugcagcccccuccaccaggauuuaaacgcuucagcugucugucgcucuggagcagcugggacuaccgcuuguaccuguuuuuucagcggacccauacaguuuag

SEQ ID NO: 128299 - RNA, 1152 nt, Artificial Sequence
  derived and/or modified sequence
augcacccaggcguguuggccgccuuccuguuucugucuuggacacauugucgugcccuaccucuccccuccggcggcgaugaggaugaccugagugaggaggaucuacaguucgcagaaagguacuuaagaucauacuaucauccuacgaaccucgcgggaaucuugaaagagaaugcugccuccuccaugacggagcgacugcgcgagaugcagaguuuuuucggccucgaagucaccggaaaacuggacgauaacacauuggacguaaugaaaaaaccuagaugcggcguuccagacgucggcgaguacaauguuuuuccuagaacccuuaaauggaguaagaugaaccuuacuuacagaauugucaacuacacacccgauaugacacacucagaaguggaaaaagcuuucaaaaaggccuuuaaagucuggucagacguaaccccuuuaaacuucacccggcugcacgaugguauugcggauaucaugauaagcuucgguaucaaggaacacggagauuuuuauccuuucgauggcccuagcggacugcucgcccacgccuucccuccuggucccaauuacgggggcgaugcacauuucgacgaugacgagacuuggacauccucuucaaaaggcuauaaccuguuccugguagcugcacacgaauuuggacacucacucggacuagaccauucaaaagacccuggcgcucuaauguuucccauauauaccuauacaggcaaaagucauuuuaugcugccagacgacgauguccaggggauucagucacuauaugggccaggggaugaagauccaaauccaaaacacccuaagacuccggacaagugugacccuucacucucccucgacgccaucacgagucuuagaggagaaaccaugauauucaaagacagguuuuuuuggcggcugcacccucagcaaguggaugcugagcucuuccuaacuaaaaguuuuuggccagagcugccuaauagaauugacgccgcguacgaacacccuagccaugaucugaucuuuauuuucaggggaagaaaauucugggcacuuaacggcuacgauauacuggagggauacccuaagaagaucagcgaacucggacuaccgaaagagguuaauaaacugcaguag

SEQ ID NO: 128300 - protein, 669 aa, Artificial Sequence
  derived and/or modified sequence
MGSDPSAPGRPGWTGSLLGDREEAARPRLLPLLLVLLGCLGLGVAAEDAEVHAENWLRLYGYLPQPSRHMSTMRSAQILASALAEMQRFYGIPVTGVLDEETKEWMKRPRCGVPDQFGVRVKANLRRRRKRYALTGRKWNNHHLTFSIQNYTEKLGWYHSMEAVRRAFRVWEQATPLVFQEVPYEDIRLRRQKEADIMVLFASGFHGDSSPFDGTGGFLAHAYFPGPGLGGDTHFDADEPWTFSSTDLHGNNLFLVAVHELGHALGLEHSSNPNAIMAPFYQWKDVDNFKLPEDDLRGIQQLYGTPDGQPQPTQPLPTVTPRRPGRPDHRPPRPPQPPPPGGKPERPPKPGPPVQPRATERPDQYGPNICDGDFDTVAMLRGEMFVFKGRWFWRVRHNRVLDNYPMPIGHFWRGLPGDISAAYERQDGRFVFFKGDRYWLFREANLEPGYPQPLTSYGLGIPYDRIDTAIWWEPTGHTFFFQEDRYWRFNEETQRGDPGYPKPISVWQGIPASPKGAFLSNDAAYTYFYKGTKYWKFDNERLRMEPGYPKSILRDFMGCQEHVEPGPRWPDVARPPFNPHGGAEPGADSAEGDVGDGDGDFGAGVNKDGGSRVVVQMEEVARTVNVVMVLVPLLLLLCVLGLTYALVQMQRKGAPRVLLYCKRSLQEWV

SEQ ID NO: 128301 - DNA, 4250 bp, Artificial Sequence
  derived and/or modified sequence
cgcggggtgggctggagaggtttcctgccgtctgggaagcgtaaacggaccgcccacctgtcgggcctcggccgcccgcacctgcttgtgagaagcctgcggctggggcaccgcccccggtccccgcccgggtccgcgcattgggagcacactggccctttaagagcgcggcggccgcggcgcgcggggaggagggctgggagcgcccggagccgcgctgaactcgccggggacgtcgggcgcccgctccttggctggctcgcttgctctctcgctcgctctctcgggtcggctccctgcgcctcctcccgggactgcttggggacccgggcccggtcgggcgcggcggcgagcagaatccccgtgcaggaggcgcgcgctccgggcagcgcccggccccgggcatggacagagggagctgggcgcgcagggagcgccgcgggaccgggcggccggagcgctgagccagacaaaggctccggagttgcgcttgctctcgggagccgggccccaggcgctgggcgccgaggctgcggaacctcgccgggggcagctccggtcggccccctttcccgccggctggttccgagctcccggacctgccctgcccgcttctcctcgggcttgggaatttgccgaggcgacctaggcggctccggcggggaccgggagcccgaggtccgcggcgcgcctgccgggccaggagccagggagcgtcgcaagtttccaaggcgcgtgcgaggatccggcgtgcagtgttccgagctgggctgggcgccgagagcatgggcagcgacccgagcgcgcccggacggccgggctggacgggcagcctcctcggcgaccgggaggaggcggcgcggccgcgactgctgccgctgctcctggtgcttctgggctgcctgggccttggcgtagcggccgaagacgcggaggtccatgccgagaactggctgcggctttatggctacctgcctcagcccagccgccatatgtccaccatgcgttccgcccagatcttggcctcggcccttgcagagatgcagcgcttctacgggatcccagtcaccggtgtgctcgacgaagagaccaaggagtggatgaagcggccccgctgtggggtgccagaccagttcggggtacgagtgaaagccaacctgcggcggcgtcggaagcgctacgccctcaccgggaggaagtggaacaaccaccatctgacctttagcatccagaactacacggagaagttgggctggtaccactcgatggaggcggtgcgcagggccttccgcgtgtgggagcaggccacgcccctggtcttccaggaggtgccctatgaggacatccggctgcggcgacagaaggaggccgacatcatggtactctttgcctctggcttccacggcgacagctcgccgtttgatggcaccggtggctttctggcccacgcctatttccctggccccggcctaggcggggacacccattttgacgcagatgagccctggaccttctccagcactgacctgcatggaaacaacctcttcctggtggcagtgcatgagctgggccacgcgctggggctggagcactccagcaaccccaatgccatcatggcgccgttctaccagtggaaggacgttgacaacttcaagctgcccgaggacgatctccgtggcatccagcagctctacggtaccccagacggtcagccacagcctacccagcctctccccactgtgacgccacggcggccaggccggcctgaccaccggccgccccggcctccccagccaccacccccaggtgggaagccagagcggcccccaaagccgggccccccagtccagccccgagccacagagcggcccgaccagtatggccccaacatctgcgacggggactttgacacagtggccatgcttcgcggggagatgttcgtgttcaagggccgctggttctggcgagtccggcacaaccgcgtcctggacaactatcccatgcccatcgggcacttctggcgtggtctgcccggtgacatcagtgctgcctacgagcgccaagacggtcgttttgtctttttcaaaggtgaccgctactggctctttcgagaagcgaacctggagcccggctacccacagccgctgaccagctatggcctgggcatcccctatgaccgcattgacacggccatctggtgggagcccacaggccacaccttcttcttccaagaggacaggtactggcgcttcaacgaggagacacagcgtggagaccctgggtaccccaagcccatcagtgtctggcaggggatccctgcctcccctaaaggggccttcctgagcaatgacgcagcctacacctacttctacaagggcaccaaatactggaaattcgacaatgagcgcctgcggatggagcccggctaccccaagtccatcctgcgggacttcatgggctgccaggagcacgtggagccaggcccccgatggcccgacgtggcccggccgcccttcaacccccacgggggtgcagagcccggggcggacagcgcagagggcgacgtgggggatggggatggggactttggggccggggtcaacaaggacgggggcagccgcgtggtggtgcagatggaggaggtggcacggacggtgaacgtggtgatggtgctggtgccactgctgctgctgctctgcgtcctgggcctcacctacgcgctggtgcagatgcagcgcaagggtgcgccacgtgtcctgctttactgcaagcgctcgctgcaggagtgggtctgaccacccagcgctcctgctaacggtgctcagggggcgcctgtggttctgagatggctcccaggggctccctccgcccccaggtaggggcccctctcagccctcacacaccctgtctgccccgccctcattatttatgtccaggtgtttgttttgttttgtttttggcaccttacttgaccatttgtttctgtttccccgactggggcagggtgtttagaattttctaaatgtagttctgctccagacagggaattaggcccccatcatcctctggcttggccacagccaggggagcagaggggcagaggcccacattggaagagcagcacctcctcagcctgaaccccagggctgtaactgccaggctctctttgcccagttggagactgtctggcccccctggtcccctccttcccaagtgagtctctctgggccttaggaagagccttccacccaggggcagccccaggccaaaggggacctggaagggaggtgggccgtggcccttgagtccccattgaggcttggttccttcccaatccagtggacttcgcagtccacttctgacagcctcagtgaccctggctccttgtgccagagaacccagcccacccccggcagcagcccccagctcccacctccccttgggcccacacctccttccctctctggagaaagggccctgggcctgcctcaccacggaccaaagggagtctgccagggcccctctccccagggaagcagcagcctcgcccctggcagagatgcctccctgagctagaaccctctgttccttccctgtgcctcctccctccctctccgactcacaccactagcctcaggggtctgagctccagctcctttgggcttcagctgccagtgtcctgagccccagggagagggggctggtgggtgcctaggcctgggcagtggatggccgtgaatgggtgcccacagtgtcaggcactgggcatgaggggttcctcccctccagctccctgtgcccccagggtcctgggaggagagacactggtggggataggccagccgcgcatcagactgtgaaccccacgaaggagcccattgtggcctaagaggctgccctcctgtgctcagccctgaggacagatgcctccttcctcttttccttcccaaagcaagcaagaggccgtggctgctgtgggaaatggtactgtacagctggctctacttccccatggccctgagcgagtggagtctgccacccaggatccccaaggcacttgagggggaaggattctgctggcctctgcgagtggtttcttgtgcactggcaccaagtgcgggtccggcagcttctgccccctgcagaaccggagagccagctaaggggtggggctgcgggggttccgtgtccacccccatacatttatttctgtaaataatgtgcactgaataaattgtacagccggcaaa

SEQ ID NO: 128302 - DNA, 2010 bp, Artificial Sequence
  derived and/or modified sequence
atgggaagcgaccctagcgctcctggacgcccagggtggacaggaagcctgcttggagaccgcgaggaggccgccagaccgcgccttttgcctctcttgcttgtgttgcttggctgcctcgggctgggcgtcgctgctgaggacgctgaagtgcatgccgagaattggctgcggttgtatgggtatcttccccagcccagccgccatatgtcaaccatgcgctccgctcagatcttggcttctgccctggccgaaatgcagcgattttatgggattcccgtgaccggcgtgcttgatgaggagaccaaggagtggatgaagagacccaggtgcggcgtgcccgatcaatttggtgtgcgagtgaaggctaacctgcggcggcggcgcaagaggtacgcactcaccggccgaaaatggaacaaccaccatctaacctttagcattcagaactatactgaaaagcttggctggtatcattctatggaggccgtgcgcagagcattcagagtctgggagcaagccactccactggtgttccaggaagtgccttacgaagatatccggttgagacgacaaaaggaggcggacataatggtgctatttgcctctggctttcacggggatagttctccctttgacggaaccggcggtttcttagcccacgcttacttccctggcccgggcctaggaggggatacacacttcgatgccgatgagccctggactttctcgtccaccgacctgcatggcaataatctgttcctggtggcagtacacgaactgggtcatgctcttggtctggagcacagcagcaacccaaacgccatcatggctcccttttaccagtggaaagacgttgataactttaaattgcccgaagacgacctgcggggcatacagcagctctacggcaccccggacggacagccccaacctactcaaccacttccgactgttaccccacgacgcccaggtcgacccgaccacagacctccccgccctcctcagccaccccctcccggtgggaaacctgagcgcccaccgaagcctggacccccggtgcagcctagggcaacagagagacccgatcagtacggaccaaatatctgtgacggtgatttcgacaccgtggctatgctgcgcggcgagatgttcgttttcaaaggccggtggttttggagggttaggcataacagggtgctagataactaccccatgcctatcggacatttctggcgggggctgcccggggacatcagtgcagcctacgaaaggcaggacgggcgtttcgtatttttcaaaggagatcgttactggctctttcgcgaggccaatcttgagcctgggtatccccagcctctgacatcctacggcctgggcattccatacgaccggatcgatacagcgatctggtgggagccgaccggccacacctttttttttcaggaggatagatattggcggttcaacgaggagacccagcgcggcgatcccggctacccgaaacccatcagcgtctggcagggcatcccagcgtctcctaagggcgcatttttgtcgaatgatgctgcgtatacctatttctacaaaggtacgaaatattggaaatttgacaacgagagactgaggatggaacccggatatccaaaatctatcctcagagacttcatgggatgccaggaacacgtggagcccgggcctaggtggcctgacgtcgcccggccaccgttcaatcctcatggcggagcagagcctggtgctgacagcgccgagggagatgtcggcgatggcgacggcgacttcggggccggcgtgaataaggatggaggttctagggtcgtcgtgcagatggaagaggtggccagaactgttaatgttgtgatggttctggtgcccctcctcctgctcctgtgtgtgctcgggttgacctacgcactggtgcagatgcagcgaaagggggctccccgcgtattactgtactgcaaacgcagcctccaagagtgggtctag

SEQ ID NO: 128303 - DNA, 2010 bp, Artificial Sequence
  derived and/or modified sequence
atgggcagtgaccccagcgcccctggccggcccggctggacaggcagcctgctgggggaccgggaggaggccgcccggccccggctgctgcccctgctgctggtgctgctgggctgcctgggcctgggcgtggccgcagaagatgctgaggtgcatgctgagaactggctgcggctgtatggctacctgccccagcccagccgccacatgagcaccatgaggtctgcccagatcctggccagcgccctggccgagatgcagcgcttctacggcatccctgtgactggagtgctggatgaggagaccaaggagtggatgaagaggccccgctgtggggtgcctgaccagtttggagtgcgggtgaaggccaacctgcggcggcggaggaagagatatgccctgactggaaggaagtggaacaaccaccacctgaccttcagcatccagaactacacagagaagctgggctggtaccacagcatggaggccgtgagaagagccttccgggtgtgggagcaggccacccccctggtgttccaggaggtgccctatgaggacatccggctgcggcggcagaaggaggccgacatcatggtgctgtttgccagcggcttccacggggacagcagcccctttgatggcactggaggcttcctggcccacgcctacttccctggccctggcctgggcggggacacccactttgatgctgatgagccctggaccttcagcagcacagacctgcacggcaacaacctcttcctggtggccgtgcatgagctgggccacgccctgggcctggagcacagcagcaaccccaatgccatcatggcccccttctaccagtggaaggatgtggacaacttcaagctgcctgaagatgacctgcggggcatccagcagctgtatggcaccccagatggccagccccagcccacccagcccctgcccaccgtgaccccccggcggcccggccgcccagaccacaggcctccccggcccccccagcccccacctcctgggggcaagccagagaggcctcccaagccaggcccccctgtgcagccccgggccacagagaggccagaccagtatggccccaacatctgtgatggagactttgacacagtggccatgctgcggggggagatgtttgtgttcaagggccgctggttctggagggtgcgccacaacagagtgctggacaactaccccatgcccatcggccacttctggaggggcctgcccggggacatctctgctgcctatgagcggcaggacggccgctttgtgttcttcaagggggaccgctactggctgttccgggaggccaacctggagcccggctacccccagcccctgaccagctatggcctgggcatcccctatgacagaattgacacagccatctggtgggagcccaccggccacaccttcttcttccaggaggaccgctactggaggttcaatgaggagacccagagaggagaccccggctaccccaagcccatctctgtgtggcagggcatcccagccagccccaagggggccttcctgagcaatgatgctgcctacacctacttctacaagggcaccaagtactggaagtttgacaatgaaaggctgaggatggagcccggctaccccaagagcatcctgcgggacttcatgggctgccaggagcacgtggagcccggcccccgctggccagatgtggcccggccccccttcaacccccacggcggcgctgagcctggagctgacagcgcagaaggagatgtgggagatggagatggagactttggagctggggtgaacaaggatggcggcagccgggtggtggtgcagatggaggaggtggccaggacagtgaatgtggtgatggtgctggtgcccctgctgctgctgctgtgtgtgctgggcctgacctacgccctggtgcagatgcagaggaagggggccccccgggtgctgctgtactgcaagaggagcctgcaggagtgggtgtag

SEQ ID NO: 128304 - DNA, 2010 bp, Artificial Sequence
  derived and/or modified sequence
atgggcagcgaccccagcgcccccggccggcccggctggaccggctctctgctcggcgatagggaggaggcggcaagaccaagacttctgccattattactggtcctactcggatgcctgggcctcggtgtcgccgctgaggatgctgaagtccacgctgaaaactggttgcgtctttacggatacttgccccagccaagcagacacatgagcacaatgaggtctgctcaaattctggccagcgcactggcagaaatgcaacggttctacggaatccccgttactggcgtgctggatgaggaaaccaaagagtggatgaaacggccccgatgcggcgtcccagatcagttcggcgtgcgcgtgaaggcaaatctgcgccggagaagaaaacgctacgctctgacggggaggaagtggaataaccaccacctgacctttagcatccagaattacacagagaagttggggtggtaccattcaatggaggcggttaggcgggctttcagggtctgggaacaggccacacccctggtgtttcaggaagtgccctacgaggatatccgcctgcgtagacagaaggaggcggacattatggtgctgtttgcctctggctttcacggcgactcatcccctttcgatggcaccggaggattccttgcccatgcatatttccctggtccgggactcggcggtgacacccacttcgacgcagacgaaccttggacgttctccagtaccgacttgcacggcaataatttgttcctggtggctgtccatgagcttggccatgcactcggcttagaacactcttctaatcctaatgccatcatggcccccttctaccagtggaaagatgttgataatttcaagcttcctgaagatgatctgcgcggcattcagcagctgtatgggacccctgatggccagccccagccgacccaaccactccccaccgtcacacctaggcgaccagggcgacctgatcatcgcccgcctagaccaccacagccacccccccccggcggtaagcctgagaggcccccaaagcctggcccccctgtgcagcctagggccaccgagaggccagatcagtacgggccaaacatctgcgacggagactttgacacggttgcaatgctccggggcgagatgtttgtcttcaagggaagatggttctggcgggtgcgccacaaccgcgtgttggacaattatcccatgcctataggtcacttttggagaggtctgccaggtgatatctccgctgcctatgaacgccaagacggaaggttcgtcttcttcaaaggggaccgatattggttgtttcgggaggcgaacttggagcccggctaccctcagcccctgacctcttacggattgggaatcccgtatgacaggattgatacggcgatatggtgggaacccacaggacatactttcttctttcaggaggaccggtattggagatttaacgaagagactcagagaggcgaccccggctacccgaaacctatcagtgtttggcagggcattcctgcgagtcccaagggcgcctttttgtctaacgacgctgcctatacttacttctacaagggcacgaaatactggaaattcgataacgagcggctacggatggagccaggctatcccaaatcgattctccgggattttatgggctgccaggaacacgtggagcccgggcccaggtggcccgatgttgcacgccctcctttcaacccgcacggaggagcagaaccaggcgcagacagtgcagagggtgatgtgggcgatggggatggagattttggcgctggcgtgaacaaagatggggggagccgtgtggtggtacagatggaggaggttgcacgcacagtgaacgtggttatggtcctggtgcctctgttgcttctgctgtgcgtcttggggttgacttacgccctggtacagatgcagagaaagggcgctcctagggtactactgtactgtaagcgcagcttgcaggaatgggtctag

SEQ ID NO: 128305 - DNA, 2010 bp, Artificial Sequence
  derived and/or modified sequence
atggggtcagatccttccgcgcctggaaggccaggctggacaggatccctgctgggtgaccgggaagaagcagcgcgacctaggctgttgcccctgctgctcgtgctgctgggatgtctggggctgggcgtcgccgctgaggacgccgaggtgcatgcggaaaattggttgagactgtacggatatctgccccagccgagcaggcacatgagcacaatgcgctctgcccagatattagcttccgctctggccgagatgcagcgattttatggcattcccgtcaccggggtgttggacgaggaaacaaaagaatggatgaaaaggccaaggtgcggcgtgcctgaccagtttggagtgagggtcaaagctaacctgagacggcgacgaaaaaggtatgctctgaccgggcgaaagtggaataatcatcacctgacctttagcatacagaactacaccgagaagctagggtggtaccattcaatggaagccgtgagaagggcctttcgggtctgggaacaggccactccactggtgttccaggaagttccttatgaagacatccgcctccggaggcaaaaggaggcagatattatggtgctcttcgcttcaggatttcacggagacagttctcctttcgacggcacgggaggatttctagcccatgcttatttccctggacccggactgggaggggatactcattttgatgcagatgagccctggaccttttcctccactgaccttcatggaaacaatctgtttttagtcgcggtgcatgagcttggccacgctctggggctcgagcacagttccaaccccaacgccatcatggcacctttttatcagtggaaggatgtagataactttaagttacccgaggacgatttgcgtggaattcaacagctctacggaacccctgatgggcagcctcaacccacacaacccctgcccacagtaacaccaaggcgcccaggtcgaccggaccaccgtcccccacggccacctcaacccccacctccgggtggaaaacccgaacgtccacctaaaccaggcccaccagttcagccaagagccaccgagagacctgaccaatacggtccaaatatatgcgatggagattttgacaccgttgccatgttgagaggggaaatgttcgtcttcaagggcagatggttttggcgcgtacggcataaccgagtgcttgacaactatcccatgccaatcggtcacttttggcgcggattgcctggggacatttccgcagcttacgagaggcaggatgggcgtttcgttttcttcaaaggcgaccgttactggctgttcagagaagcaaacctggagcctggttatccacagccactgacctcatacggactgggcatcccatatgacagaatagacaccgccatatggtgggaacctactgggcatacgtttttttttcaggaagatagatattggaggttcaatgaggagactcagagaggggaccccggttacccaaagccaatttcagtatggcaggggatccctgcttctccgaagggcgcattcctctcaaacgacgccgcttatacttacttctacaagggcaccaagtactggaaattcgataacgagcgtctcaggatggagcccggataccccaaatccatattaagagactttatgggatgccaggagcacgtggagcctggcccacgttggcctgacgtggcgagacctccatttaatccccacggcggagcagaacccggagcagatagcgcagaaggtgacgttggggatggggacggtgactttggtgcaggcgtgaacaaagatggcggtagtagggtggtggtgcaaatggaagaggtggccaggaccgtcaacgtcgtcatggtgttggtacccctgctccttctcctgtgcgtgctagggttgacatatgctcttgtgcagatgcagcgaaaaggtgcacctcgcgttcttctttactgcaagcgctctctgcaggagtgggtgtag

SEQ ID NO: 128306 - DNA, 2010 bp, Artificial Sequence
  derived and/or modified sequence
atgggcagcgaccccagcgcccccggcagacccggctggaccggcagcctgctgggcgacagagaggaggccgccagacccagactgctgcccctgctgctggtgctgctgggctgcctgggcctgggcgtggccgccgaggacgccgaggtgcacgccgagaactggctgagactgtacggctacctgccccagcccagcagacacatgagcaccatgagaagcgcccagatcctggccagcgccctggccgagatgcagagattctacggcatccccgtgaccggcgtgctggacgaggagaccaaggagtggatgaagagacccagatgcggcgtgcccgaccagttcggcgtgagagtgaaggccaacctgagaagaagaagaaagagatacgccctgaccggcagaaagtggaacaaccaccacctgaccttcagcatccagaactacaccgagaagctgggctggtaccacagcatggaggccgtgagaagagccttcagagtgtgggagcaggccacccccctggtgttccaggaggtgccctacgaggacatcagactgagaagacagaaggaggccgacatcatggtgctgttcgccagcggcttccacggcgacagcagccccttcgacggcaccggcggcttcctggcccacgcctacttccccggccccggcctgggcggcgacacccacttcgacgccgacgagccctggaccttcagcagcaccgacctgcacggcaacaacctgttcctggtggccgtgcacgagctgggccacgccctgggcctggagcacagcagcaaccccaacgccatcatggcccccttctaccagtggaaggacgtggacaacttcaagctgcccgaggacgacctgagaggcatccagcagctgtacggcacccccgacggccagccccagcccacccagcccctgcccaccgtgacccccagaagacccggcagacccgaccacagaccccccagacccccccagccccccccccccggcggcaagcccgagagaccccccaagcccggcccccccgtgcagcccagagccaccgagagacccgaccagtacggccccaacatctgcgacggcgacttcgacaccgtggccatgctgagaggcgagatgttcgtgttcaagggcagatggttctggagagtgagacacaacagagtgctggacaactaccccatgcccatcggccacttctggagaggcctgcccggcgacatcagcgccgcctacgagagacaggacggcagattcgtgttcttcaagggcgacagatactggctgttcagagaggccaacctggagcccggctacccccagcccctgaccagctacggcctgggcatcccctacgacagaatcgacaccgccatctggtgggagcccaccggccacaccttcttcttccaggaggacagatactggagattcaacgaggagacccagagaggcgaccccggctaccccaagcccatcagcgtgtggcagggcatccccgccagccccaagggcgccttcctgagcaacgacgccgcctacacctacttctacaagggcaccaagtactggaagttcgacaacgagagactgagaatggagcccggctaccccaagagcatcctgagagacttcatgggctgccaggagcacgtggagcccggccccagatggcccgacgtggccagaccccccttcaacccccacggcggcgccgagcccggcgccgacagcgccgagggcgacgtgggcgacggcgacggcgacttcggcgccggcgtgaacaaggacggcggcagcagagtggtggtgcagatggaggaggtggccagaaccgtgaacgtggtgatggtgctggtgcccctgctgctgctgctgtgcgtgctgggcctgacctacgccctggtgcagatgcagagaaagggcgcccccagagtgctgctgtactgcaagagaagcctgcaggagtgggtgtag

SEQ ID NO: 128307 - protein, 508 aa, Artificial Sequence
  derived and/or modified sequence
MNCQQLWLGFLLPMTVSGRVLGLAEVAPVDYLSQYGYLQKPLEGSNNFKPEDITEALRAFQEASELPVSGQLDDATRARMRQPRCGLEDPFNQKTLKYLLLGRWRKKHLTFRILNLPSTLPPHTARAALRQAFQDWSNVAPLTFQEVQAGAADIRLSFHGRQSSYCSNTFDGPGRVLAHADIPELGSVHFDEDEFWTEGTYRGVNLRIIAAHEVGHALGLGHSRYSQALMAPVYEGYRPHFKLHPDDVAGIQALYGKKSPVIRDEEEEETELPTVPPVPTEPSPMPDPCSSELDAMMLGPRGKTYAFKGDYVWTVSDSGPGPLFRVSALWEGLPGNLDAAVYSPRTQWIHFFKGDKVWRYINFKMSPGFPKKLNRVEPNLDAALYWPLNQKVFLFKGSGYWQWDELARTDFSSYPKPIKGLFTGVPNQPSAAMSWQDGRVYFFKGKVYWRLNQQLRVEKGYPRNISHNWMHCRPRTIDTTPSGGNTTPSGTGITLDTTLSATETTFEY

SEQ ID NO: 128308 - protein, 222 aa, Artificial Sequence
  derived and/or modified sequence
MGVTWDFSMSNGGPRGKTYAFKGDYVWTVSDSGPGPLFRVSALWEGLPGNLDAAVYSPRTQWIHFFKGDKVWRYINFKMSPGFPKKLNRVEPNLDAALYWPLNQKVFLFKGSGYWQWDELARTDFSSYPKPIKGLFTGVPNQPSAAMSWQDGRVYFFKGKVYWRLNQQLRVEKGYPRNISHNWMHCRPRTIDTTPSGGNTTPSGTGITLDTTLSATETTFEY

SEQ ID NO: 128309 - DNA, 1527 bp, Artificial Sequence
  derived and/or modified sequence
atgaactgccagcagctgtggctgggcttcctgctgcccatgaccgtgagcggcagagtgctgggcctggccgaggtggcccccgtggactacctgagccagtacggctacctgcagaagcccctggagggcagcaacaacttcaagcccgaggacatcaccgaggccctgagagccttccaggaggccagcgagctgcccgtgagcggccagctggacgacgccaccagagccagaatgagacagcccagatgcggcctggaggaccccttcaaccagaagaccctgaagtacctgctgctgggcagatggagaaagaagcacctgaccttcagaatcctgaacctgcccagcaccctgcccccccacaccgccagagccgccctgagacaggccttccaggactggagcaacgtggcccccctgaccttccaggaggtgcaggccggcgccgccgacatcagactgagcttccacggcagacagagcagctactgcagcaacaccttcgacggccccggcagagtgctggcccacgccgacatccccgagctgggcagcgtgcacttcgacgaggacgagttctggaccgagggcacctacagaggcgtgaacctgagaatcatcgccgcccacgaggtgggccacgccctgggcctgggccacagcagatacagccaggccctgatggcccccgtgtacgagggctacagaccccacttcaagctgcaccccgacgacgtggccggcatccaggccctgtacggcaagaagagccccgtgatcagagacgaggaggaggaggagaccgagctgcccaccgtgccccccgtgcccaccgagcccagccccatgcccgacccctgcagcagcgagctggacgccatgatgctgggccccagaggcaagacctacgccttcaagggcgactacgtgtggaccgtgagcgacagcggccccggccccctgttcagagtgagcgccctgtgggagggcctgcccggcaacctggacgccgccgtgtacagccccagaacccagtggatccacttcttcaagggcgacaaggtgtggagatacatcaacttcaagatgagccccggcttccccaagaagctgaacagagtggagcccaacctggacgccgccctgtactggcccctgaaccagaaggtgttcctgttcaagggcagcggctactggcagtgggacgagctggccagaaccgacttcagcagctaccccaagcccatcaagggcctgttcaccggcgtgcccaaccagcccagcgccgccatgagctggcaggacggcagagtgtacttcttcaagggcaaggtgtactggagactgaaccagcagctgagagtggagaagggctaccccagaaacatcagccacaactggatgcactgcagacccagaaccatcgacaccacccccagcggcggcaacaccacccccagcggcaccggcatcaccctggacaccaccctgagcgccaccgagaccaccttcgagtactag

SEQ ID NO: 128310 - DNA, 1527 bp, Artificial Sequence
  derived and/or modified sequence
atgaattgccaacagttgtggctggggttcctgctgcccatgacagtcagtggacgagtgcttggtttagcagaggtggcgccagtcgactatctgtcacagtacggatacctgcagaagccactcgagggcagcaacaactttaagccagaagacatcacagaggctctgcgagcatttcaggaggcaagcgaactgcccgtttcaggtcagctggatgatgccactcgggctcggatgagacagcccaggtgtgggctggaagacccattcaaccagaaaactctgaagtacctgcttctcgggaggtggagaaagaagcatcttaccttccggattctgaacttgccatccactctgcctccacacacagcgcgagccgcattgagacaggcctttcaagattggtcaaatgtcgcaccactcactttccaagaggtgcaggccggggcagcggatatcagactgagctttcacggacgccagagctcctactgttcaaatacatttgatgggcccggacgcgtgttggcccatgccgacataccagagctgggctctgtgcattttgacgaagatgagttctggacagaggggacctatcgcggcgtcaacctgagaatcattgcagcacacgaagtaggccatgcgctgggattaggccacagccgctactcccaggcattgatggcaccggtctacgaaggttatcgacctcacttcaaactgcatcctgatgacgtcgcggggatccaagcgctgtacggtaagaagtcgccagtcatccgggacgaggaggaggaagaaactgagctaccaacagttccgccggtcccaactgagccaagtccaatgccagatccatgttcgtccgagctggatgccatgatgctcggtccccggggaaaaacgtatgcatttaaaggggactatgtgtggaccgtaagtgattcaggcccagggcctctgtttcgcgtctccgcgctgtgggaaggactcccaggaaatctggatgccgccgtgtactcccctcgaacccagtggattcacttttttaagggagataaagtgtggcgttacataaactttaaaatgtctccaggctttccgaaaaaattgaacagggtggagccaaaccttgatgccgctttatactggccgctcaatcagaaggtgttcttgttcaaaggctctggctactggcagtgggatgagctggctagaactgacttcagctcttatccaaagccaattaaggggctgtttactggagtgcccaatcagccaagcgcagctatgagttggcaagatggccgcgtatacttctttaaagggaaggtctattggcgcctgaaccagcagttgagggtcgagaaaggatatcctaggaatatctctcacaactggatgcactgccgccccagaaccattgacactactccctcaggcggcaacacaactccgtccgggacgggtattaccctggatacaacattatctgccactgaaacaactttcgagtattag

SEQ ID NO: 128311 - DNA, 1527 bp, Artificial Sequence
  derived and/or modified sequence
atgaactgccagcagctgtggctgggcttcctgctgcccatgacagtgtctggccgggtgctgggcctggccgaggtggcccctgtggactacctgagccagtatggctacctgcagaagcccctggagggcagcaacaacttcaagccagaggacatcacagaggccctgcgggccttccaggaggccagcgagctgcctgtgtctggccagctggatgatgccacccgggccaggatgaggcagccccgctgtggcctggaggaccccttcaaccagaagaccctgaagtacctgctgctgggccgctggaggaagaagcacctgaccttccgcatcctgaacctgcccagcaccctgcccccccacacagcccgggccgccctgcggcaggccttccaggactggagcaatgtggcccccctgaccttccaggaggtgcaggccggggctgctgacatccggctgtccttccacggccggcagagcagctactgcagcaacacctttgatggccctggccgggtgctggcccacgccgacatccctgagctgggctctgtgcactttgatgaagatgagttctggacagagggcacctacagaggagtgaacctgcgcatcatcgccgcccacgaggtgggccacgccctgggcctgggccacagccgctacagccaggccctgatggcccctgtgtatgagggctaccggccccacttcaagctgcacccagatgatgtggccggcatccaggccctgtatggcaagaagagccctgtgatcagagatgaggaggaggaggagacagagctgcccaccgtgccccctgtgcccacagagcccagccccatgccagacccctgcagcagcgagctggatgccatgatgctgggcccccggggcaagacctacgccttcaagggggactatgtgtggacagtgtctgacagcggccctggccccctcttccgggtgtctgccctgtgggagggcctgcccggcaacctggatgctgctgtgtacagccccaggacccagtggatccacttcttcaagggggacaaggtgtggagatacatcaacttcaagatgagccctggcttccccaagaagctgaacagagtggagcccaacctggatgctgccctgtactggcccctgaaccagaaggtgttcctgttcaagggcagcggctactggcagtgggatgagctggccaggacagacttcagcagctaccccaagcccatcaagggcctcttcaccggggtgcccaaccagcccagcgctgccatgtcctggcaggacggccgggtgtacttcttcaagggcaaggtgtactggaggctgaaccagcagctgcgggtggagaagggctaccccaggaacatcagccacaactggatgcactgccggcccaggaccatcgacaccacccccagcggcggcaacaccaccccatctggaacaggcatcaccctggacaccaccctgagcgccacagagaccacctttgagtactag

SEQ ID NO: 128312 - DNA, 1527 bp, Artificial Sequence
  derived and/or modified sequence
atgaactgccagcagctgtggctgggcttcctgctgcccatgaccgtgtctggcagggtacttggactcgccgaggtggcacctgtcgattatctttcgcagtacgggtacctccaaaagccgctcgagggctccaataacttcaaacccgaggatatcaccgaggcccttagagcttttcaggaggcttccgagttacccgtaagtggccaactggacgatgccacacgcgctcggatgaggcagcctaggtgcggcctggaagacccttttaatcagaagacgttgaagtaccttctcctcggtcgctggagaaagaaacatttgacctttagaattctaaatctgccatcgactctgcctccccacaccgctcgcgctgccctcagacaagcttttcaggactggtcaaacgtcgcacctttaacattccaggaagtgcaagccggcgccgccgacattagactcagcttccacggtagacaatcaagctattgctctaatacgttcgacggtcccgggcgcgtcctggcccatgcagatatcccagagctaggatccgtgcacttcgacgaagatgaattctggactgaaggaacctacagaggagtgaatctgcgaatcattgcggcacacgaggtgggccatgccctcggcctgggccactccagatactctcaggcgctgatggctcccgtttatgagggctatcgaccgcacttcaagctgcacccggatgatgtggccggcatccaagcactctacggtaaaaaaagccccgtgatcagagatgaggaggaagaggaaaccgagttaccaactgtgccacccgtgccaaccgagccttcccccatgcccgatccctgtagctccgaactggatgccatgatgctaggccctcgcggcaagacatatgcttttaaaggcgattacgtgtggactgtcagtgacagcggtcctggacctctcttcagggtcagcgctctctgggaagggctcccaggcaacctggacgccgctgtctactcgccccgcacacagtggatccattttttcaagggcgacaaggtctggagatatataaactttaagatgtcaccaggctttccaaagaagctgaaccgcgttgagcccaatctagacgccgcactatattggccccttaatcaaaaggtattcttgtttaagggatcaggttattggcagtgggatgaattagctcgaacggatttttctagttacccaaaaccaatcaaggggctttttaccggggtgcctaatcagccgagcgccgcaatgagttggcaagacggacgcgtctacttcttcaagggtaaggtgtactggagattaaaccagcagttgcgagtagaaaaagggtacccaaggaatatcagtcataattggatgcattgtcgaccaagaaccatcgacaccaccccaagcggaggcaacaccactccctccggcacaggaattacactagacaccacactctcggctactgagaccacattcgaatattag

SEQ ID NO: 128313 - DNA, 1527 bp, Artificial Sequence
  derived and/or modified sequence
atgaactgccagcaactctggttgggatttctgttgcctatgacagtgtcagggagggttcttgggctcgctgaagtcgcaccagttgactacctctcacagtatggataccttcagaaacccctagagggcagcaacaatttcaagcctgaggacataaccgaggcccttagggcgttccaggaagcaagtgaattgccagtatctggccagcttgatgatgctacgagagcaaggatgagacagcccaggtgcggacttgaggacccttttaatcagaagaccctgaagtacttgctgctgggacggtggcgtaaaaaacatctaacctttaggatcctgaatttacctagtaccctgccacctcataccgctagggctgccctacgccaggcattccaggactggtctaacgttgccccactgacttttcaggaggtacaagccggtgccgctgacatcagactttccttccacgggagacagtcttcctattgctccaatacttttgatgggcctggtagagtcctcgcacacgcggacatcccagagctcggtagcgtgcattttgacgaggatgaattttggacggagggcacttataggggggtgaatctgcgcattattgccgctcacgaagtcgggcatgccctggggctcggccacagccggtacagccaggcactgatggcaccggtctatgaagggtataggccccatttcaaacttcatcccgacgacgtggcaggaatccaggccctgtatggcaagaagtccccagtaattagagacgaagaggaggaggagacagaacttcccaccgtgccacctgtgcccacagagccctcgcctatgcctgatccttgctcatccgagctggatgccatgatgctcggcccacggggaaagacctatgccttcaagggagactacgtatggacagtgtcggacagcgggccaggtccactctttagggtttccgccttatgggagggacttcccggtaacttggacgccgctgtgtacagccccaggacacagtggatccactttttcaagggcgataaggtatggcggtatatcaatttcaagatgtctcccggattccccaagaagctcaatagggttgaacctaatcttgacgctgcattatactggcctctaaaccagaaagtcttcctcttcaaaggcagcggttactggcagtgggacgaacttgcacggaccgacttctcatcctatccgaagccaattaagggcctgtttaccggggtgccaaatcagccctcagccgctatgtcatggcaggacggcagggtttacttctttaagggcaaggtttactggcgcctgaaccagcagctgagagttgagaagggataccccaggaacattagccacaactggatgcattgtaggccaaggaccatcgacaccaccccctctgggggaaatactacaccgagtggtacaggaatcacactcgataccaccctctccgcaacggaaaccaccttcgaatattag

SEQ ID NO: 128314 - DNA, 1527 bp, Artificial Sequence
  derived and/or modified sequence
atgaattgccagcaattgtggctaggctttttgcttcccatgacagtatcaggaagagtcctgggcttggccgaggtcgcccctgtggactatctgtcacaatacggatatttgcagaaaccactagagggcagcaataatttcaagccagaggatattacagaggccctgagggccttccaggaagcttcagaactgccggtgtctggccagctggacgacgccacacgggccaggatgaggcagcccagatgcgggttagaggatcccttcaatcagaaaactttaaagtaccttttgcttggccggtggcggaaaaaacatcttacattcagaattctgaacctgccctcgacactgccacctcatactgctcgggccgccctccgtcaagcctttcaggattggagtaatgtggctccactcacattccaggaggttcaggctggtgcggccgacatacgattaagttttcatggccgccagtcctcctattgttctaacacctttgatggaccaggccgagtgcttgctcacgccgacataccagaattagggtctgtgcattttgatgaggacgaattctggacagagggaacctatcgcggagttaaccttaggatcatcgctgcacacgaagtcggacacgctctggggctagggcatagtcgctactctcaggccttgatggctccggtctatgagggctaccgtccccatttcaagctgcatccagatgacgtggcagggattcaagctttgtacgggaaaaagtcccctgtaattagggatgaggaggaagaagaaactgagctgccaacagtaccccctgtgcctacggaaccttctccaatgcctgatccttgctcctccgaacttgacgctatgatgctcggaccaagagggaaaacatatgctttcaaaggggattatgtgtggacagtgagtgactcagggccaggacctctgtttcgcgtgtcagctctgtgggagggactgcccggtaacctcgacgcagctgtttacagtccaaggactcagtggatccacttcttcaagggagacaaggtttggcgctacatcaactttaaaatgagccccggattccctaagaaactcaaccgtgtagagcctaacttggacgccgctctctactggccattgaaccaaaaggtcttccttttcaaggggagtgggtactggcagtgggatgagctggcccgaactgacttctcatcttatccgaaaccaatcaaaggtctgtttaccggcgtgcccaaccagccatccgctgccatgtcctggcaggatggcagagtctatttttttaagggcaaggtttattggaggctgaatcagcaattgcgagttgaaaagggatatcctagaaacatctcacacaattggatgcactgtagaccccgaaccattgatacaacgcccagcggcggcaacacaactcctagcggaaccggcataacactcgacacaaccttgagcgccaccgaaacgaccttcgagtattag

SEQ ID NO: 128315 - DNA, 1527 bp, Artificial Sequence
  derived and/or modified sequence
atgaactgtcagcaactgtggcttggcttcctacttcctatgaccgtttccggccgtgtgctcggattggctgaagttgccccggtggactacctgagtcagtacggctatttacagaagcccctggaaggctcaaataattttaaacctgaggacattacagaggccttgagagcatttcaagaagcttccgaactgcctgtgagtggccagctcgatgatgcgacacgggcccgcatgaggcagccgcgctgtggcctggaagacccctttaatcagaaaacactgaagtacctgctgctgggccgatggagaaagaaacaccttacattccggattctgaatttaccaagcacacttccgccacatactgcccgtgcagcactgcgacaggcgtttcaggactggtctaacgtggcaccactcacattccaggaggtacaggccggcgccgccgatatccgactttcatttcacgggagacaaagcagctactgttccaacacattcgatggaccaggccgcgtcctagcccacgctgacatacccgaacttgggagcgtgcactttgacgaggacgagttttggacagaagggacttatagaggggtgaaccttcgtatcatcgctgcacatgaagtcggtcatgcactcggattaggccattctcgctactctcaggcattgatggccccagtctacgaaggatatcgtcctcatttcaagctgcatcccgacgacgttgcaggaatccaagccctctacggaaagaagtcacctgtgatcagagacgaggaagaggaggaaacagagcttcctacagtacctcctgtaccgacagagccctctccaatgccagacccttgtagctcggaactagacgccatgatgcttgggcctagggggaagacatacgctttcaagggagattacgtatggactgtcagtgatagtggacctggaccattgttcagagtgtcagcgctatgggagggactgccaggaaatctagacgccgctgtatatagtccacgcacacagtggattcatttcttcaaaggtgataaagtgtggaggtatattaactttaaaatgagccctggcttcccaaagaaactgaatagagtagaaccgaatttggatgccgcgctgtattggcctctcaaccagaaggtgttcctatttaaagggtccggctactggcagtgggatgaactcgctaggacagattttagctcttaccctaaacctataaagggcctttttacaggagtcccaaatcaaccctccgctgcaatgagttggcaggacggcagagtgtatttcttcaagggtaaagtgtactggaggctcaatcaacaacttcgggtagaaaaaggttatcctagaaacatctcgcacaactggatgcactgtaggcctcgtacaatagatactaccccatctggtggaaacactacgccaagcggcaccgggatcacactggatactactctgagtgcaactgaaacaacttttgaatactag

SEQ ID NO: 128316 - DNA, 2229 bp, Artificial Sequence
  derived and/or modified sequence
gagcccctctgcctagcactgctcccccaaggctcccagaaatctcaggtcagaggcacggacagcctctggagctctcgtctggtgggaccatgaactgccagcagctgtggctgggcttcctactccccatgacagtctcaggccgggtcctggggcttgcagaggtggcgcctgtggactacctgtcacaatatgggtacctacagaagcctctagaaggatctaataacttcaagccagaagatatcaccgaggctctgagagcttttcaggaagcatctgaacttccagtctcaggtcagctggatgatgccacaagggcccgcatgaggcagcctcgttgtggcctagaggatcccttcaaccagaagacccttaaatacctgttgctgggccgctggagaaagaagcacctgactttccgcatcttgaacctgccctccacccttccaccccacacagcccgggcagccctgcgtcaagccttccaggactggagcaatgtggctcccttgaccttccaagaggtgcaggctggtgcggctgacatccgcctctccttccatggccgccaaagctcgtactgttccaatacttttgatgggcctgggagagtcctggcccatgccgacatcccagagctgggcagtgtgcacttcgacgaagacgagttctggactgaggggacctaccgtggggtgaacctgcgcatcattgcagcccatgaagtgggccatgctctggggcttgggcactcccgatattcccaggccctcatggccccagtctacgagggctaccggccccactttaagctgcacccagatgatgtggcagggatccaggctctctatggcaagaagagtccagtgataagggatgaggaagaagaagagacagagctgcccactgtgcccccagtgcccacagaacccagtcccatgccagacccttgcagtagtgaactggatgccatgatgctggggccccgtgggaagacctatgctttcaagggggactatgtgtggactgtatcagattcaggaccgggccccttgttccgagtgtctgccctttgggaggggctccccggaaacctggatgctgctgtctactcgcctcgaacacaatggattcacttctttaagggagacaaggtgtggcgctacattaatttcaagatgtctcctggcttccccaagaagctgaatagggtagaacctaacctggatgcagctctctattggcctctcaaccaaaaggtgttcctctttaagggctccgggtactggcagtgggacgagctagcccgaactgacttcagcagctaccccaaaccaatcaagggtttgtttacgggagtgccaaaccagccctcggctgctatgagttggcaagatggccgagtctacttcttcaagggcaaagtctactggcgcctcaaccagcagcttcgagtagagaaaggctatcccagaaatatttcccacaactggatgcactgtcgtccccggactatagacactaccccatcaggtgggaataccactccctcaggtacgggcataaccttggataccactctctcagccacagaaaccacgtttgaatactgactgctcacccacagacacaatcttggacattaacccctgaggctccaccacccaccctttcatttcccccccagaagcctaaggcctaatagctgaatgaaatacctgtctgctcagtagaaccttgcaggtgctgtagcaggcgcaagaccgtagatctcaggcctctaacacttccaactccagccaccactttcctgtgcattttcactcctgagaagtgctcccctaactcagatcccctaacttagatttggcccccaactccatttcctgtctgtcttagacagcccttccaactgtgtcatctcttctctggaggtcaatggtggagggagatgcctgggtcctgttcttcctacataaaatgcaagaaaacagcatggccagtaaactgagcaagggccttggaatccttgagaatcacatttatgtgcttatgattacgggcaagctaattaaccttgttgaatctcagattccccatttgcaacattaggttaagaccagtactgcaggattgttgcactaaatgaaatactgtatgtgaagtgcctggcacagtgtctggtacatttgtgtttaataaaagctaactccatgttcataa

SEQ ID NO: 128317 - RNA, 1527 nt, Artificial Sequence
  derived and/or modified sequence
augaauugccagcaauuguggcuaggcuuuuugcuucccaugacaguaucaggaagaguccugggcuuggccgaggucgccccuguggacuaucugucacaauacggauauuugcagaaaccacuagagggcagcaauaauuucaagccagaggauauuacagaggcccugagggccuuccaggaagcuucagaacugccggugucuggccagcuggacgacgccacacgggccaggaugaggcagcccagaugcggguuagaggaucccuucaaucagaaaacuuuaaaguaccuuuugcuuggccgguggcggaaaaaacaucuuacauucagaauucugaaccugcccucgacacugccaccucauacugcucgggccgcccuccgucaagccuuucaggauuggaguaauguggcuccacucacauuccaggagguucaggcuggugcggccgacauacgauuaaguuuucauggccgccaguccuccuauuguucuaacaccuuugauggaccaggccgagugcuugcucacgccgacauaccagaauuagggucugugcauuuugaugaggacgaauucuggacagagggaaccuaucgcggaguuaaccuuaggaucaucgcugcacacgaagucggacacgcucuggggcuagggcauagucgcuacucucaggccuugauggcuccggucuaugagggcuaccguccccauuucaagcugcauccagaugacguggcagggauucaagcuuuguacgggaaaaaguccccuguaauuagggaugaggaggaagaagaaacugagcugccaacaguacccccugugccuacggaaccuucuccaaugccugauccuugcuccuccgaacuugacgcuaugaugcucggaccaagagggaaaacauaugcuuucaaaggggauuauguguggacagugagugacucagggccaggaccucuguuucgcgugucagcucugugggagggacugcccgguaaccucgacgcagcuguuuacaguccaaggacucaguggauccacuucuucaagggagacaagguuuggcgcuacaucaacuuuaaaaugagccccggauucccuaagaaacucaaccguguagagccuaacuuggacgccgcucucuacuggccauugaaccaaaaggucuuccuuuucaaggggaguggguacuggcagugggaugagcuggcccgaacugacuucucaucuuauccgaaaccaaucaaaggucuguuuaccggcgugcccaaccagccauccgcugccauguccuggcaggauggcagagucuauuuuuuuaagggcaagguuuauuggaggcugaaucagcaauugcgaguugaaaagggauauccuagaaacaucucacacaauuggaugcacuguagaccccgaaccauugauacaacgcccagcggcggcaacacaacuccuagcggaaccggcauaacacucgacacaaccuugagcgccaccgaaacgaccuucgaguauuag

SEQ ID NO: 128318 - RNA, 1527 nt, Artificial Sequence
  derived and/or modified sequence
augaacugucagcaacuguggcuuggcuuccuacuuccuaugaccguuuccggccgugugcucggauuggcugaaguugccccgguggacuaccugagucaguacggcuauuuacagaagccccuggaaggcucaaauaauuuuaaaccugaggacauuacagaggccuugagagcauuucaagaagcuuccgaacugccugugaguggccagcucgaugaugcgacacgggcccgcaugaggcagccgcgcuguggccuggaagaccccuuuaaucagaaaacacugaaguaccugcugcugggccgauggagaaagaaacaccuuacauuccggauucugaauuuaccaagcacacuuccgccacauacugcccgugcagcacugcgacaggcguuucaggacuggucuaacguggcaccacucacauuccaggagguacaggccggcgccgccgauauccgacuuucauuucacgggagacaaagcagcuacuguuccaacacauucgauggaccaggccgcguccuagcccacgcugacauacccgaacuugggagcgugcacuuugacgaggacgaguuuuggacagaagggacuuauagaggggugaaccuucguaucaucgcugcacaugaagucggucaugcacucggauuaggccauucucgcuacucucaggcauugauggccccagucuacgaaggauaucguccucauuucaagcugcaucccgacgacguugcaggaauccaagcccucuacggaaagaagucaccugugaucagagacgaggaagaggaggaaacagagcuuccuacaguaccuccuguaccgacagagcccucuccaaugccagacccuuguagcucggaacuagacgccaugaugcuugggccuagggggaagacauacgcuuucaagggagauuacguauggacugucagugauaguggaccuggaccauuguucagagugucagcgcuaugggagggacugccaggaaaucuagacgccgcuguauauaguccacgcacacaguggauucauuucuucaaaggugauaaaguguggagguauauuaacuuuaaaaugagcccuggcuucccaaagaaacugaauagaguagaaccgaauuuggaugccgcgcuguauuggccucucaaccagaagguguuccuauuuaaaggguccggcuacuggcagugggaugaacucgcuaggacagauuuuagcucuuacccuaaaccuauaaagggccuuuuuacaggagucccaaaucaacccuccgcugcaaugaguuggcaggacggcagaguguauuucuucaaggguaaaguguacuggaggcucaaucaacaacuucggguagaaaaagguuauccuagaaacaucucgcacaacuggaugcacuguaggccucguacaauagauacuaccccaucugguggaaacacuacgccaagcggcaccgggaucacacuggauacuacucugagugcaacugaaacaacuuuugaauacuag

SEQ ID NO: 128319 - protein, 1320 aa, Artificial Sequence
  derived and/or modified sequence
MFGLDQFEPQVNSRNAGQGERNFNETGLSMNTHFKAPAFHTGGPPGPVDPAMSALGEPPILGMNMEPYGFHARGHSELHAGGLQAQPVHGFFGGQQPHHGHPGSHHPHQHHPHFGGNFGGPDPGASCLHGGRLLGYGGAAGGLGSQPPFAEGYEHMAESQGPESFGPQRPGNLPDFHSSGASSHAVPAPCLPLDQSPNRAASFHGLPSSSGSDSHSLEPRRVTNQGAVDSLEYNYPGEAPSGHFDMFSPSDSEGQLPHYAAGRQVPGGAFPGASAMPRAAGMVGLSKMHAQPPQQQPQQQQQPQQQQQQHGVFFERFSGARKMPVGLEPSVGSRHPLMQPPQQAPPPPQQQPPQQPPQQQPPPPPGLLVRQNSCPPALPRPQQGEAGTPSGGLQDGGPMLPSQHAQFEYPIHRLENRSMHPYSEPVFSMQHPPPQQAPNQRLQHFDAPPYMNVAKRPRFDFPGSAGVDRCASWNGSMHNGALDNHLSPSAYPGLPGEFTPPVPDSFPSGPPLQHPAPDHQSLQQQQQQQQQQQQQQQQQQQQQQQQQQQQRQNAALMIKQMASRNQQQRLRQPNLAQLGHPGDVGQGGLVHGGPVGGLAQPNFEREGGSTGAGRLGTFEQQAPHLAQESAWFSGPHPPPGDLLPRRMGGSGLPADCGPHDPSLAPPPPPGGSGVLFRGPLQEPMRMPGEGHVPALPSPGLQFGGSLGGLGQLQSPGAGVGLPSAASERRPPPPDFATSALGGQPGFPFGAAGRQSTPHSGPGVNSPPSAGGGGGSSGGGGGGGAYPPQPDFQPSQRTSASKLGALSLGSFNKPSSKDNLFGQSCLAALSTACQNMIASLGAPNLNVTFNKKNPPEGKRKLSQNETDGAAVAGNPGSDYFPGGTAPGAPGPGGPSGTSSSGSKASGPPNPPAQGDGTSLSPNYTLESTSGNDGKPVSGGGGRGRGRRKRDSGHVSPGTFFDKYSAAPDSGGAPGVSPGQQQASGAAVGGSSAGETRGAPTPHEKALTSPSWGKGAELLLGDQPDLIGSLDGGAKSDSSSPNVGEFASDEVSTSYANEDEVSSSSDNPQALVKASRSPLVTGSPKLPPRGVGAGEHGPKAPPPALGLGIMSNSTSTPDSYGGGGGPGHPGTPGLEQVRTPTSSSGAPPPDEIHPLEILQAQIQLQRQQFSISEDQPLGLKGGKKGECAVGASGAQNGDSELGSCCSEAVKSAMSTIDLDSLMAEHSAAWYMPADKALVDSADDDKTLAPWEKAKPQNPNSKEAHDLPANKASASQPGSHLQCLSVHCTDDVGDAKARASVPTWRSLHSDISNRFGTFVAALT

SEQ ID NO: 128320 - DNA, 3963 bp, Artificial Sequence
  derived and/or modified sequence
atgttcggcctggaccagttcgagccccaggtgaacagcagaaacgccggccagggcgagagaaacttcaacgagaccggcctgagcatgaacacccacttcaaggcccccgccttccacaccggcggcccccccggccccgtggaccccgccatgagcgccctgggcgagccccccatcctgggcatgaacatggagccctacggcttccacgccagaggccacagcgagctgcacgccggcggcctgcaggcccagcccgtgcacggcttcttcggcggccagcagccccaccacggccaccccggcagccaccacccccaccagcaccacccccacttcggcggcaacttcggcggccccgaccccggcgccagctgcctgcacggcggcagactgctgggctacggcggcgccgccggcggcctgggcagccagccccccttcgccgagggctacgagcacatggccgagagccagggccccgagagcttcggcccccagagacccggcaacctgcccgacttccacagcagcggcgccagcagccacgccgtgcccgccccctgcctgcccctggaccagagccccaacagagccgccagcttccacggcctgcccagcagcagcggcagcgacagccacagcctggagcccagaagagtgaccaaccagggcgccgtggacagcctggagtacaactaccccggcgaggcccccagcggccacttcgacatgttcagccccagcgacagcgagggccagctgccccactacgccgccggcagacaggtgcccggcggcgccttccccggcgccagcgccatgcccagagccgccggcatggtgggcctgagcaagatgcacgcccagcccccccagcagcagccccagcagcagcagcagccccagcagcagcagcagcagcacggcgtgttcttcgagagattcagcggcgccagaaagatgcccgtgggcctggagcccagcgtgggcagcagacaccccctgatgcagcccccccagcaggcccccccccccccccagcagcagcccccccagcagcccccccagcagcagcccccccccccccccggcctgctggtgagacagaacagctgcccccccgccctgcccagaccccagcagggcgaggccggcacccccagcggcggcctgcaggacggcggccccatgctgcccagccagcacgcccagttcgagtaccccatccacagactggagaacagaagcatgcacccctacagcgagcccgtgttcagcatgcagcacccccccccccagcaggcccccaaccagagactgcagcacttcgacgcccccccctacatgaacgtggccaagagacccagattcgacttccccggcagcgccggcgtggacagatgcgccagctggaacggcagcatgcacaacggcgccctggacaaccacctgagccccagcgcctaccccggcctgcccggcgagttcaccccccccgtgcccgacagcttccccagcggcccccccctgcagcaccccgcccccgaccaccagagcctgcagcagcagcagcagcagcagcagcagcagcagcagcagcagcagcagcagcagcagcagcagcagcagcagcagcagcagcagagacagaacgccgccctgatgatcaagcagatggccagcagaaaccagcagcagagactgagacagcccaacctggcccagctgggccaccccggcgacgtgggccagggcggcctggtgcacggcggccccgtgggcggcctggcccagcccaacttcgagagagagggcggcagcaccggcgccggcagactgggcaccttcgagcagcaggccccccacctggcccaggagagcgcctggttcagcggcccccaccccccccccggcgacctgctgcccagaagaatgggcggcagcggcctgcccgccgactgcggcccccacgaccccagcctggcccccccccccccccccggcggcagcggcgtgctgttcagaggccccctgcaggagcccatgagaatgcccggcgagggccacgtgcccgccctgcccagccccggcctgcagttcggcggcagcctgggcggcctgggccagctgcagagccccggcgccggcgtgggcctgcccagcgccgccagcgagagaagaccccccccccccgacttcgccaccagcgccctgggcggccagcccggcttccccttcggcgccgccggcagacagagcaccccccacagcggccccggcgtgaacagcccccccagcgccggcggcggcggcggcagcagcggcggcggcggcggcggcggcgcctaccccccccagcccgacttccagcccagccagagaaccagcgccagcaagctgggcgccctgagcctgggcagcttcaacaagcccagcagcaaggacaacctgttcggccagagctgcctggccgccctgagcaccgcctgccagaacatgatcgccagcctgggcgcccccaacctgaacgtgaccttcaacaagaagaacccccccgagggcaagagaaagctgagccagaacgagaccgacggcgccgccgtggccggcaaccccggcagcgactacttccccggcggcaccgcccccggcgcccccggccccggcggccccagcggcaccagcagcagcggcagcaaggccagcggcccccccaacccccccgcccagggcgacggcaccagcctgagccccaactacaccctggagagcaccagcggcaacgacggcaagcccgtgagcggcggcggcggcagaggcagaggcagaagaaagagagacagcggccacgtgagccccggcaccttcttcgacaagtacagcgccgcccccgacagcggcggcgcccccggcgtgagccccggccagcagcaggccagcggcgccgccgtgggcggcagcagcgccggcgagaccagaggcgcccccaccccccacgagaaggccctgaccagccccagctggggcaagggcgccgagctgctgctgggcgaccagcccgacctgatcggcagcctggacggcggcgccaagagcgacagcagcagccccaacgtgggcgagttcgccagcgacgaggtgagcaccagctacgccaacgaggacgaggtgagcagcagcagcgacaacccccaggccctggtgaaggccagcagaagccccctggtgaccggcagccccaagctgccccccagaggcgtgggcgccggcgagcacggccccaaggcccccccccccgccctgggcctgggcatcatgagcaacagcaccagcacccccgacagctacggcggcggcggcggccccggccaccccggcacccccggcctggagcaggtgagaacccccaccagcagcagcggcgcccccccccccgacgagatccaccccctggagatcctgcaggcccagatccagctgcagagacagcagttcagcatcagcgaggaccagcccctgggcctgaagggcggcaagaagggcgagtgcgccgtgggcgccagcggcgcccagaacggcgacagcgagctgggcagctgctgcagcgaggccgtgaagagcgccatgagcaccatcgacctggacagcctgatggccgagcacagcgccgcctggtacatgcccgccgacaaggccctggtggacagcgccgacgacgacaagaccctggccccctgggagaaggccaagccccagaaccccaacagcaaggaggcccacgacctgcccgccaacaaggccagcgccagccagcccggcagccacctgcagtgcctgagcgtgcactgcaccgacgacgtgggcgacgccaaggccagagccagcgtgcccacctggagaagcctgcacagcgacatcagcaacagattcggcaccttcgtggccgccctgacctag

SEQ ID NO: 128321 - DNA, 3963 bp, Artificial Sequence
  derived and/or modified sequence
atgttcggccttgatcaatttgagcctcaggtcaattctaggaatgccggacaaggtgagagaaactttaacgagacaggcctgtctatgaatactcatttcaaggctccggccttccacaccgggggtcctcccggacccgttgatcccgccatgtcagcattaggagaaccaccaatactaggaatgaatatggaaccctacggattccacgctcgcgggcattctgaattacatgccggtgggttgcaggctcagcctgtccacggctttttcggggggcaacagccccaccacggccaccccggtagccatcacccgcaccaacatcatccgcattttggcggcaattttggagggcccgaccccggtgcatcatgccttcatgggggccgtctcctcggctacgggggagccgctggcggactcggaagccagcccccttttgcagaggggtacgaacacatggccgagagccagggacccgagagttttgggccccaacgccccgggaatctgccagattttcattcgagcggtgcaagtagtcacgccgtacctgccccttgtttgcctctggaccaaagccccaatcgagctgcctccttccacggtctgccaagctccagtgggtcggattcccactcactcgagccaagaagagtgactaaccagggcgctgtggattcattggagtacaattatccaggcgaagcaccaagcggccatttcgacatgttttcaccaagcgacagtgaaggccagcttcctcactacgccgccggccgacaggttcctggcggagcttttcccggtgcctctgctatgccacgggcggctggaatggttggattgtctaagatgcatgctcagccccctcagcagcagccccagcagcagcagcagccacagcagcagcagcagcagcacggtgtgttcttcgaaaggtttagcggagccagaaagatgccagtggggctcgaaccgagcgttggatcccggcacccgctaatgcagccacctcagcaggcaccaccacccccccagcagcagccgcctcaacagccccctcagcagcagcctcccccgcctcccgggttattggtgcggcaaaactcttgtcctcctgccctgcctcgtccacagcagggtgaagctgggaccccaagcggagggctccaggacggtggtccaatgcttcctagtcaacatgcccaattcgaatatcctatccatcgcttggaaaacaggagcatgcacccgtattctgaaccggtgtttagcatgcagcacccacctccccagcaggctcccaatcagcggctccagcacttcgatgcccctccgtacatgaatgtggccaagcgacccagattcgatttccctggctcagctggtgtggaccggtgtgcatcctggaatggcagtatgcataatggggccctagacaatcacctgtctccttctgcatacccaggcctgcccggggaattcaccccccccgtcccggactccttcccaagcgggcctcctctgcagcacccggccccggatcaccaatcacttcagcagcagcagcaacaacagcagcagcagcagcaacagcagcagcaacagcaacaacagcagcagcagcaacaacagcaacaaaggcaaaatgccgcccttatgatcaagcagatggccagccgcaatcagcagcagagattacgacaacctaatctggcccagctggggcaccccggtgacgtcgggcagggtggcctggtacacggcggtcctgttggaggcctcgcgcaaccaaatttcgaaagagaggggggaagcactggtgcggggcgcctaggaacatttgaacagcaggctcctcacctagcccaggagagtgcatggtttagtgggccacacccccctccgggggacttgctcccaaggcgaatgggaggttccggtctccccgcagattgtgggccacatgatccctcactggctcctcccccgccaccggggggttccggagtactcttccgaggcccactgcaagaacctatgaggatgcccggggagggtcacgtgcccgcgcttccaagtcctgggttgcagttcggggggtctctaggcggactggggcaactgcagagtcccggcgctggagtaggcctgccaagcgcggcatcagaaaggcgccccccaccaccggactttgccacttcggccctcggcggtcaacctggatttcccttcggagccgccggcagacaatccacacctcattctgggccaggagtgaatagccccccatctgctgggggcggcggtgggagtagtggaggaggtggggggggcggagcctaccccccccagccggatttccagccctcccagcgcaccagcgcctcgaaattgggggccctctccctgggaagttttaacaaaccctctagcaaggataacctattcggacaatcctgtctcgccgcactttcaaccgcatgtcagaatatgattgccagtctgggggcacctaatctcaacgtcactttcaataagaaaaacccaccggaaggtaagagaaaactgtctcaaaatgagaccgatggcgccgcggtagctgggaatcccgggagcgactacttcccgggagggacagctcctggggcccccggaccagggggcccatcagggaccagcagctccgggtcgaaagccagcggtccccctaatcctccggcccagggggacgggacttccctctcgccaaactatactttggagtccactagcgggaatgatggcaaacctgtctctggtggcggcgggcgaggacggggccgaagaaagcgggacagcggtcatgtgtcacctgggaccttctttgacaaatactccgcggccccagatagtggcggcgctcccggtgtcagccccggtcagcagcaggcaagcggagcagcagtcggtggctcttctgcaggggaaacaaggggtgcgcccacgccacacgaaaaggcacttactagcccatcttggggcaagggcgcggagctgctgctgggcgatcagcccgatctcattggcagcctcgacgggggcgccaagagcgattcaagctcacctaatgtcggtgaattcgcgagtgacgaggtgagcactagttacgctaatgaggatgaggtaagctcatccagcgataatccacaggccttggtcaaggcctcccgaagcccattagtcaccggcagtcccaagctacctccccgtggagtgggagccggagaacatggacccaaggccccccccccagcattgggactgggcatcatgagcaacagcacatcaacgcccgattcatacggaggcggtggaggtcctgggcaccctggaacacccggtcttgagcaggtcaggaccccgacaagttctagcggtgctccccccccagacgagatccatccactggaaattctgcaggcacaaattcaactgcagcggcaacagttctccattagcgaggaccaacctctcggcttgaaaggcgggaaaaaaggcgaatgtgccgtaggtgcttctggtgcacagaatggggattctgaacttggatcatgctgtagcgaggctgtgaagagcgctatgagtacaattgatctggattcactcatggctgaacatagcgcagcttggtacatgcctgctgacaaggccctggtggatagtgcagacgacgacaagacgttggctccatgggagaaagctaaaccacaaaaccccaactctaaggaggctcacgacctgcctgccaataaagcttcggcgtcccaacccggcagccatctccagtgtctgagtgtgcactgcacggacgatgtcggcgacgcgaaagcacgcgcttctgtgcctacatggcggagtcttcactccgatatctctaatcgcttcggcactttcgtggccgctttgacttag

SEQ ID NO: 128322 - DNA, 3963 bp, Artificial Sequence
  derived and/or modified sequence
atgtttggcctggaccagtttgagccccaggtgaacagcagaaatgccggccagggcgagaggaacttcaatgagaccggcctgtccatgaacacccacttcaaggccccagccttccacactggaggccccccaggccctgtggaccctgccatgtctgccctgggggagccccccatcctgggcatgaacatggagccctacggcttccacgcccggggccacagcgagctgcacgccggcggcctgcaggcccagcctgtgcacggcttcttcggcggccagcagccccaccacggccaccctggcagccaccacccccaccagcaccacccccactttggaggcaactttggaggccctgaccccggggccagctgcctgcatggaggccgcctgctgggctacggcggggccgccggcggcctgggcagccagcccccatttgctgagggctatgagcacatggccgagagccagggccctgagagctttggcccccagaggcctggcaacctgcctgacttccacagcagcggggccagcagccatgctgtgcctgccccctgcctgcccctggaccagagccccaacagagctgccagcttccacggcctgcccagcagcagcggcagtgacagccacagcctggagccccggcgggtgaccaaccagggcgctgtggacagcctggagtacaactacccaggagaggcccccagcggccactttgacatgttcagccccagcgacagcgagggccagctgccccactacgccgccggccggcaggtgcctgggggcgccttccctggggccagcgccatgcccagggctgctggcatggtgggcctgagcaagatgcacgcccagcccccccagcagcagccccagcagcagcagcagccccagcagcagcagcagcagcacggcgtcttctttgagcgcttcagcggggccaggaagatgcctgtgggcctggagcccagcgtgggcagccgccaccccctgatgcagcccccccagcaggcccctcctccaccccagcagcagcccccccagcagcccccccagcagcagcccccacctcctcctggcctgctggtgcggcagaacagctgccccccagccctgccccggccccagcagggcgaggccggcacccccagcggcggcctgcaggacggcggccccatgctgcccagccagcacgcccagtttgagtaccccatccaccggctggagaacagatccatgcacccctacagcgagcctgtgttctccatgcagcaccccccaccccagcaggcccccaaccagaggctgcagcactttgatgccccaccctacatgaatgtggccaagaggcccaggtttgacttccctggcagcgctggggtggacagatgtgcctcctggaatggctccatgcacaatggagccctggacaaccacctgagccccagcgcctacccaggcctgcctggagagttcaccccacctgtgcctgacagcttccccagcggcccccccctgcagcacccagccccagaccaccagagcctgcagcagcagcagcagcagcagcagcagcagcagcagcagcagcagcagcagcagcagcagcagcagcagcagcagcagcagcagaggcagaatgctgccctgatgatcaagcagatggccagcaggaaccagcagcagaggctgcggcagcccaacctggcccagctgggccaccctggagatgtgggccagggcggcctggtgcatggaggccctgtgggcggcctggcccagcccaactttgagcgggagggcggcagcactggagctggccgcctgggcacctttgagcagcaggccccccacctggcccaggagagcgcctggttcagcggcccccaccccccacctggggacctgctgcccaggaggatgggcggcagcggcctgcctgctgactgtggcccccatgaccccagcctggcccctcctcctcctcctgggggcagcggcgtgctcttccggggccccctgcaggagcccatgaggatgcctggagagggccacgtgcctgccctgcccagccctggcctgcagtttggaggcagcctgggcggcctgggccagctgcagagccctggagctggggtgggcctgcccagcgctgccagcgagcggcggcccccacctccagactttgccaccagcgccctgggcggccagcccggcttcccctttggagctgctggccggcagagcaccccccacagcggccctggggtgaacagcccccccagcgctgggggcggcggcggcagcagcggcggcggcggcggcggcggggcctacccaccccagcctgacttccagcccagccagaggaccagcgccagcaagctgggcgccctgagcctgggcagcttcaacaagcccagcagcaaggacaacctgtttggccagagctgcctggccgccctgagcacagcctgccagaacatgattgccagcctgggcgcccccaacctgaatgtgaccttcaacaagaagaaccccccagagggcaagaggaagctgagccagaatgaaacagatggagctgctgtggccggcaaccctggcagtgactacttccctgggggcacagcccctggggcccctggccctgggggccccagcggcaccagcagcagcggcagcaaggccagcggcccccccaaccccccagcccagggagatggcaccagcctgagccccaactacaccctggagagcaccagcggaaatgatggcaagcctgtgtctgggggcggcggccggggccggggccgcaggaagagggacagcggccacgtgtccccaggcaccttctttgacaagtacagcgctgccccagacagcggcggggcccctggggtgtccccaggccagcagcaggccagcggggctgctgtgggcggcagcagcgctggggagaccaggggggcccccacccctcatgagaaggccctgaccagccccagctggggcaaaggagctgagctgctgctgggggaccagcctgacctgattggcagcctggatggaggagccaagagtgacagcagcagccccaacgtgggggagtttgccagtgatgaggtgtccaccagctatgccaatgaagatgaggtgagcagcagcagtgacaacccccaggccctggtgaaggccagccgcagccccctggtgacaggcagccccaagctgcccccccggggcgtgggcgctggggagcacggccccaaggcccctcctccagccctgggcctgggcatcatgagcaacagcaccagcaccccagacagctatggaggcggcggcggccctggccaccctggcaccccaggcctggagcaggtgaggacccccaccagcagcagcggggcccctcctccagatgagatccaccccctggagatcctgcaggcccagatccagctgcagaggcagcagttcagcatcagcgaggaccagcccctgggcctgaagggcggcaagaagggggagtgtgctgtgggcgccagcggggcccagaatggagacagcgagctgggcagctgctgcagcgaggccgtgaagagcgccatgagcaccatcgacctggacagcctgatggccgagcacagcgctgcctggtacatgcctgctgacaaggccctggtggacagcgcagatgatgacaagaccctggccccctgggagaaggccaagccccagaaccccaacagcaaggaggcccatgacctgcctgccaacaaggccagcgccagccagcccggcagccacctgcagtgcctgtctgtgcactgcacagatgatgtgggagatgccaaggcccgggcctctgtgcccacctggaggagcctgcacagcgacatcagcaaccgcttcggcacctttgtggccgccctgacctag

SEQ ID NO: 128323 - DNA, 7556 bp, Artificial Sequence
  derived and/or modified sequence
gcgcggaggcagggaaccggagccttggagcgacccaacccctcgtctcgctgccctcccgcgcctgcaacggtgcgcggagactccggcgaactcagacacccaacggcggagaacagaagcggcaggcggcggacgtggccgcgaagctgcgcgccgaacgcagcgcacccgctgccgagcagaggagccgcgcctttccccgaccctcggctccagcccccggcgcctgccgcctcgcagcccctctgcgtcctcggctcgggggccggcaccggcgatgccgagcggagcctccagtcctccgacccgctgaagaagcagcagccgctcgcccggagcctacggggattgtgcgagcggatcgtgctcggtggaggctcgggctgcggggcgcggggactccggggggcggggggagggaccgctctgtcggtgcccggcgccagccgcggctttgaagggtctccctcccctgcccttagcagctctgccacggactccgggaggctgcgggcggcgtcctgagggctccccagcagacccaatcggacttgagaaggtgatcgctctgctctcccaacccccttccctccccattccccccacttaactttttgtctccgttcatccgcggcttcgtcccctccccgcagacccacccgcggctgtgacaaccgcccggggcatgggccccccaacacggctcctagaggccccgcggcctcgcaagatgtgagaggccctccccgggcagaatcggagcttcaggagaggagctaataccccgccccccgtccctcacatcaggcggggtggaggtgcgcgctgagcccccgcggtgctgagcgtcccggagcgcccaatcctgggctggaacgagtagctggccggaggcgcgccgcggagagccggctgtcatgccctattgatccccctctgccccccgccaagtatgtttgggctggaccaattcgagccccaggtcaacagcaggaacgctggccagggcgagaggaactttaacgagaccggactgagcatgaacacccactttaaggccccggctttccacactggggggccccctggccctgtggatcctgctatgagcgcgctgggcgaacccccgatcttgggcatgaacatggagccctacggcttccacgcgcgcggccactcggagttgcacgcaggggggctgcaagcgcagcctgtgcacggcttctttggcggccagcagcctcaccacggccacccgggaagtcatcatccccaccagcatcacccccactttgggggcaacttcggtggcccggaccccggggcctcgtgcctgcacgggggtcgcctgctcggctacggcggcgcagccggaggcctgggcagccagccgcccttcgccgagggctatgagcacatggcggagagccaggggcctgagagcttcggcccgcagcgaccggggaacctcccggacttccacagttcaggtgcctccagccacgccgtgccggccccatgcctgccgctggaccagagccctaaccgagccgcctccttccacggcctgccgtcctccagcggctccgattcccacagtctggagccacggagggtgacgaaccaaggagccgtcgactcgctggaatacaattacccgggcgaggcgccctcgggacattttgacatgttttcgccctctgactccgaagggcagctgcctcattatgcagcgggtcgccaggttcctgggggcgctttcccgggcgcctcggccatgcccagagctgcgggcatggtgggcttgtccaaaatgcacgcccagccaccgcagcagcagccccagcagcagcagcagccccagcagcagcagcagcagcatggtgtgttctttgagaggttcagtggggccagaaagatgcctgtgggtctggagccctcagtgggctccaggcacccgttaatgcagcctccccagcaggccccgccaccccctcagcagcagcccccgcagcagccgccacagcagcagccgccgccgccacccgggcttctagtccgacaaaattcgtgcccgcctgcgctccctcggccccagcagggcgaggcgggcacgcccagcggcggcctgcaggacggaggccccatgctgcccagccagcacgcgcaattcgagtatcccatccaccggctggagaaccggagcatgcacccttattccgagcctgttttcagcatgcagcatcctcctccgcagcaggcgcccaaccagcggctgcagcatttcgacgcgcccccctacatgaacgtggccaagaggccgcgcttcgactttccgggcagcgcgggagtggaccgctgcgcttcgtggaacggcagcatgcacaacggcgctctggataatcacctctccccttccgcctacccaggcctacccggcgagttcacaccgcctgtgcccgacagcttcccttcggggccgcccctgcagcatccggccccggaccaccagtccctgcaacagcagcagcagcagcagcagcagcagcaacagcagcagcagcagcagcaacagcaacagcaacagcagcagcagcagcagcgccaaaacgcggccctcatgattaagcagatggcgtcgcggaatcagcagcagcggctgcgccagcccaacctggctcagctaggccaccccggggacgtgggccagggcggcctggtgcatggcggcccggtgggcggcttggcccagccgaactttgagcgcgaaggcggcagcacgggcgccgggcgtctgggcaccttcgagcagcaggcgccgcacttggcgcaagagagcgcgtggttctcaggtccgcatccgccgcccggagacctgctgccccgtaggatgggcggctcgggtctgcccgctgactgtggcccgcacgaccccagcctggcgccccctcctccgcctggtggctcgggggtgctgttccggggccctctgcaggagccgatgaggatgcccggagagggccacgtgcccgcgctgccttcaccgggcctgcagttcgggggcagtctgggaggcctgggtcagctgcagtcgcccggggcgggcgtggggctccccagcgctgcttcggagcgccggcccccgccgccggactttgctacgtctgcgctcgggggccagccgggctttccgtttggtgcagccggccggcagtccacgccgcacagcggtccaggcgtgaactcgccccccagcgcgggagggggcggtggcagctctggtggcggcggtggcgggggtgcctacccgccgcagcctgatttccagcccagccagcgcacctcggccagtaaattgggcgcgctctcgctgggctccttcaacaagcccagctccaaggacaacctgttcggccagagctgcctggctgcgctctccaccgcttgccagaacatgatcgccagcctcggggcccccaacctcaacgtgaccttcaacaagaagaacccgccagagggcaagaggaaactgagccagaacgagaccgacggcgcggcagtggccggcaacccgggctcggattacttcccaggagggactgctcctggggccccaggacccggaggcccgtccgggaccagtagcagcggctccaaagcctcggggccgcccaaccctccagcccagggggacggcaccagcctctcccccaactacaccctggaatccacgtcggggaatgacggcaagccggtctccgggggcggcggccggggacggggtcgcagaaaaagggacagtggtcacgtgagccctggcaccttctttgacaagtactcggcggctccggacagcgggggcgcacctggggtgagcccagggcagcagcaagcgtcaggcgcagccgtcgggggaagctccgcaggcgagacgcgcggggcaccgacgccccacgaaaaggcgctcacgtcgccatcctgggggaagggggctgagttgctcctgggggatcagccggacctcattgggtccctggacggcggggccaagtcggacagtagttcgccaaacgtgggtgagttcgcctcggacgaggtgagcacgagctacgccaatgaggacgaggtgtcgtccagctctgacaacccccaggcactagttaaagcgagcaggagtcccctggtgaccggctcgcccaaactccctccccgtggggtaggcgccggggaacacggaccgaaggcgcccccgcccgccctcggcctgggcatcatgtctaactctacctcgacccctgacagctacggcggcggtgggggcccgggccatccgggcactccgggcctggagcaggtccgcaccccgacgagcagcagcggcgccccgccacccgacgagatccaccccctggagatccttcaggcgcagatccagctacagaggcagcagttcagcatctccgaggaccagcctctggggctgaagggtggcaagaagggtgagtgcgccgtcggggcctcaggggcgcagaatggcgacagcgagctgggcagctgctgctccgaggcggtcaagagcgccatgagcaccattgacctggactcgctgatggcagagcacagcgctgcctggtacatgcccgctgacaaggccctggtggacagcgcggacgacgacaagacgttggcgccctgggagaaggccaaaccccagaaccccaacagcaaagaagcccacgacctccctgcaaacaaggcctcagcatcccagcctggcagccacttgcagtgcctgtctgtccactgcacagacgacgtgggtgacgccaaggctcgagcctccgtgcccacctggcggtccctgcattctgacatctccaacagatttgggacattcgtggctgccctaacttgaatgacaagaaagatcccctcctctaccaggcccttcctctccccctgtctgtttccttccccctcaaccttaccccacccctctgttaatttgaaagggccactattgctgagtggatgagttttttttttttctctaggttggtacctgcttagtggcatatggaccggaaagggttaatttaaagggggggaacctcaaaagtttttttaaaaaagaaacttgtctgccacagtatgttaccagtgttaacccttctgcagttagcaaacttttgcttaagcctttttcctctagatactccccatgtttcggtaatcttggcatacattttttagatgacctctttccttgttttgttttcatgctgctgtatgtccaagtattgttatttcataataagacaagagttgctttcttttttattctttttccttttcttaccccctccccttttattttctttttgctttgttcactgcttattaaaatggaaatcctggagaatagtagttctggaatattgccgggtgaaagtccaattgtcatcacaatgttatatattgacaccccagtgtcatcagtcaggcaggagccaaacaatgaatgcccctcttaggtattccgcctgggattttgttttgtctgttccctaagaaaatatattttcattcctgcaaacacagtgctcagccttcagttcccttccacttgagttctctcttctcctgctggaagccgcccctctctgcgatggacgtgaggacgtgtccagctctgctctgtgggaaggagttggaatgttcgacagcagtgttttctctccttttctgggcctcctcgcaaatgcccaggccctgcattttcacgctgtgctaagcagcctttggtctgcatgggggatggtgtgctcccagcctgcagtctttggagcaaggctgctgcccgtgccttgggtgctggagttggaggaggctgttctcagccctttcccttttctgaaagctgttcctggccgggcatcccagggaagaaggaggggactgcgtgtatctcctccacctctcccattccatccccagtccagcctgggcaaccccacccctgggagggatgaggcaccctcttgctcagcctgctcagccttctctgagcctttgcagggatctgcagactcctgagggctagaggacagagaaagagaatagaatgaaatgactttgattcctgcgccttttagttttgaactctggaattcctctgccccctccccaacatttttttggaatctcaccctgttgcaaaactagagccatgtcccaagcatctcacaaaggaataactgctctgagcagagatgagtggtggttggcaggggcaggcaactttgggtgctgctgatgcctgcaaaagccatttatggcttgtggtggggggcacatagattccccggtgggttagacaggaagtaactgatatcacttcacccaaatatataaccgtgatggttatctatttaatttcagtttttgttaacgagcgtgtcttactaaaacgctccactttgagctcccccaccccctccaggtcctcagagtttgcagatctgggctttctaaagcaagtgacctgaaggctctgggctcaccatacaacacccacgttgtttatttcaaagaacttttcagcgaagggagaggagctttcagaaaaacctcactctttcccctcccttctcccctctttccttctgccggtccttttggctggggtctgagtctgcggttctcgcctgggcagtcttgacgaggagcaaaccccgccttcagagggcagacaaagcaggtggcatgaattgatcagcgagaaaggtgtgagccgaggcagttcctgcgttctgctacaaaaggaatggaaagggaagggaatttccccccaccatgggctgtgggagagttgaccgtattctgggcaagactccatgacccctctgattctgcagtgtacagctgtttgagagcctcatcattttacttttgaaacaggaatgatttctccttaattgcttaaggccggggagcaaagtgtcttaacttctgtctttgactttcccagcgttgagtcatcaacactttgccaattagctcatggtcctggcaacctcagaaacccctgaagttttaaaaactttctcgctccccacgaccccagaatgaaacagctttaaaaatagccttaagcaaaaggatgttatttcattaaatttggtttaatggaaagaataaaagtaaatgaaaaacacaccctacacactagactccgaacactggtaatcagtactgcatagcaaactctttgggaaagaaaacgaaaatgttattgcacatgtaaaatatgaaaacttaactctgctgtgtgttaggcaatcctgtaatcttttttgactcttaaaagaaattcatttctgaaatgcttggttggaagactgtgacaatagctcatgaaattgagtgttatttttttctttcttttttaaaaaaatatgtaaagtgcagtcttctgtattcctgcatattgtatatacctgtatatgttttcctgagcagttaaataacaataaatatgacgttaatggtga

SEQ ID NO: 128324 - DNA, 3963 bp, Artificial Sequence
  derived and/or modified sequence
atgttcggcctggaccagttcgagccccaggtgaacagccggaacgcgggacagggcgagcgcaacttcaacgagactggcttatcaatgaatacccacttcaaagccccagcctttcacacaggcgggcctcctggccccgttgatccagcaatgagcgcgcttggcgagcctccaattctgggtatgaatatggaaccctatgggttccacgctaggggccatagtgaactgcatgcaggcgggttgcaagctcagcctgttcacggcttctttggcggccaacagcctcaccacgggcaccccgggtcccatcacccgcatcagcatcacccccacttcgggggcaacttcggcggccccgaccccggggctagctgcctgcatggcggtaggctgctgggttacggtggcgccgccggaggactgggaagccagccaccctttgctgagggctacgagcacatggcggagtctcagggacccgaatcttttggtccacagcgaccgggtaatcttcccgactttcactctagcggggcgtcctctcacgctgttcctgctccatgtctcccacttgaccagtcccccaatcgtgctgccagcttccacggccttccttcttcatccggtagcgactctcacagtctcgagcccaggagagtcaccaatcaaggggccgtcgatagcctggagtacaactaccccggggaagcaccttccggacacttcgatatgtttagtcctagcgactccgaaggacagctaccgcactacgcagctggccgtcaggtccccgggggcgcattcccgggagcttcagccatgcccagagccgccggaatggtcgggttgtcaaagatgcacgcacaacccccccaacagcagcctcagcagcagcagcaaccgcagcagcagcagcagcagcatggagttttctttgagaggttttctggcgcgcggaagatgcccgtcggcttggagccaagcgtcggttcgagacatccgctcatgcaaccgcctcaacaggcgcctcctccacctcagcaacagccgccgcaacaacctccacagcaacaacctccgcccccccctggcctactggtgcgacagaattcatgtccaccggcccttccccgtcctcagcagggtgaagccggaactccatctgggggcctgcaggatggcggtccgatgctcccttctcaacacgctcagtttgagtatcccatccataggctggagaatagatccatgcatccatatagtgagcccgttttctccatgcagcacccgcccccccagcaagctccaaaccaaagacttcagcacttcgatgcaccgccatacatgaacgttgctaagaggccccgtttcgactttccaggcagcgccggcgtggaccggtgcgcctcctggaatggaagcatgcacaatggcgcgttggacaatcacctatcgcccagcgcttaccctggcctgcctggcgaattcaccccccctgtaccggatagttttccatctggcccccccttacagcatccggcccctgaccaccagtctctgcaacagcaacaacagcaacagcaacagcagcaacagcagcagcagcagcaacagcaacagcaacagcaacaacagcagcagcaacgccagaacgcagcgctgatgataaagcagatggctagtaggaatcagcagcagcgactgagacagcccaatctggcgcagcttgggcatcccggcgacgtgggtcaagggggcctggtccacggaggccccgtggggggcctggctcagcctaactttgagagagagggcgggtccacgggtgccggaaggcttggaaccttcgagcagcaagctccccacctggctcaggagtcagcgtggttcagcggtcctcaccctccgcccggagatctcctgcctaggaggatgggaggctctggactgcctgccgattgtggcccacatgatccttctctggctcctcctccacctccaggaggtagcggtgttctctttcgggggccccttcaggaacctatgcgcatgccgggcgagggtcatgtccctgcccttcctagccccggactgcagttcggtggaagcttaggaggccttggccaattgcaatctcctggagcaggcgttggtctgccgagcgccgcgagcgaaagacgccctccaccaccagacttcgcaaccagcgccctgggcggccaacctgggttccctttcggtgccgcaggtaggcagtcaacgccccatagcggtcccggtgttaattctcctccgtcggctggcggcggggggggttcttccgggggaggaggcgggggcggtgcctacccaccccagccagactttcagccgagtcagagaacttcggccagcaaacttggggcactgagtctcggcagcttcaacaagccttcaagcaaagataatctcttcgggcagagctgccttgccgcgctgagcacagcatgtcagaacatgattgcttcccttggcgcccccaatcttaatgtcaccttcaacaagaagaatccccccgagggcaagaggaagctttctcagaatgaaaccgacggagccgcagtagccggcaaccctgggtctgactatttcccaggcggcaccgctccaggcgccccagggcccggtggccccagcgggacgtcatccagcggcagtaaggcctcaggtccaccaaatccgccagcccagggggacggcacctctctctctcctaactataccctcgagagtactagcggaaacgatggtaagcccgtgtctggcggaggggggaggggcagaggacggcgaaagcgggacagtggccatgtttcaccagggacattctttgacaagtacagcgccgctcctgactccggtggagcccctggagtgtcacccggccagcagcaggcctctggtgccgcagtcggtgggtcctcagccggggagactcgcggcgcacctacccctcatgaaaaggctctcaccagtcctagctgggggaaaggggccgaactacttttgggcgaccaaccagatttgattggcagtctggacgggggggcaaagtccgattccagctcccccaacgtgggagagttcgcatcagatgaggttagtaccagttatgcgaacgaagacgaggtgagctcctctagcgacaatccccaggcccttgtcaaggcctctcggtctcccctggttaccggcagtcccaagctgccacccaggggtgtaggggcgggagaacacggtcccaaggcaccaccgcccgcgcttgggctcggcattatgtctaattctactagcactcccgattcctatgggggcggtggtggacccggccaccctggcactcccggactggaacaggtcagaacgccaacatcatcttctggcgcaccgcccccagatgagatccatccacttgaaattctgcaggcgcaaatccagctgcagaggcaacaattctccatatctgaggatcaaccactgggattgaaagggggcaagaaaggagagtgcgctgtgggcgcctctggtgctcagaatggagattctgagctcggttcctgctgcagcgaggctgtaaaatccgcaatgtccactattgatctcgacagcttgatggctgagcactccgctgcatggtatatgcctgctgacaaggccttggttgatagtgccgatgatgataagactctcgctccgtgggaaaaggccaaaccacagaatcctaatagcaaggaagcacacgatttgcccgccaacaaagcatcagcgagtcagcctgggagtcatctgcagtgtctgtccgtccactgtacagacgatgtcggggacgcaaaggctcgtgcaagcgtgccaacatggagaagtctgcacagcgatatctcgaacaggttcggcacttttgtggcggcattaacctag

SEQ ID NO: 128325 - DNA, 3963 bp, Artificial Sequence
  derived and/or modified sequence
atgttcgggctggaccagttcgaacctcaagtgaactctagaaacgctggtcaaggtgagaggaacttcaacgagacaggcttgagtatgaatacccattttaaagcacccgctttccatacaggcggacccccaggccctgttgatccagccatgagcgccctcggggaaccccctattcttggtatgaacatggagccatacggctttcacgcaaggggccactctgagctgcatgcagggggtctccaggcgcagcccgtgcatggctttttcggagggcagcagccacatcacggacatccagggtcccaccaccctcatcagcaccacccacattttggcggaaacttcggaggacctgacccaggcgcttcatgcctccacggaggaaggcttctggggtacgggggagcggcaggcggtctgggctcgcagcctccctttgctgaaggctatgaacacatggcagaaagccagggacccgaatcatttgggcctcagaggccaggaaatctgcctgacttccattctagtggcgcttcatctcacgcagtgcccgcaccatgcctcccactcgaccagagtcctaaccgcgcagccagttttcatgggctgcccagctcttcagggagcgactcccactcgctggaacctcggcgagtgaccaaccagggtgcagtcgacagcttagagtacaactatcccggtgaagcgccatctggacactttgatatgttcagcccctccgactcggaaggtcagcttccgcattatgctgctggacggcaagtgccgggaggagcctttcccggagcaagcgccatgccacgagccgctggaatggttggcttgtctaaaatgcatgcacagccacctcagcagcagcctcaacaacagcagcaaccccagcagcagcagcaacagcatggggttttcttcgaaagattctctggagcgagaaaaatgcccgtggggttggagccatccgtagggtctcgacatcctctgatgcagcctccccagcaagcccctccccctccccagcaacagcctccgcagcaaccaccccaacaacagccacctccccctccaggtcttctcgtaaggcagaacagttgtccccctgccctgcccaggccccagcagggggaagctggcaccccctcgggtggtcttcaggatggcggaccaatgctgccttcacagcacgcacagtttgagtacccaatacacagactggagaacaggagtatgcatccctactctgaacctgttttttctatgcagcaccccccaccacagcaggccccaaaccagaggttgcagcactttgacgcccctccctatatgaacgtcgcgaaaaggccacggttcgactttcccggatcagccggagtagaccgttgtgcctcatggaatggcagcatgcacaacggggcactggacaatcacctttcaccctcagcgtatccaggactcccaggcgagttcaccccccctgttccagacagttttccttccggtcccccactgcagcaccctgccccagatcaccagagcctccaacagcagcagcagcaacaacagcagcagcaacagcagcagcagcagcaacagcaacagcaacagcagcagcagcagcagcagcgccagaatgcggcacttatgattaaacagatggcaagtcggaatcagcagcagcgtctacgccagccaaatctggcacagttgggccatccaggtgacgtcggacagggcggactggtgcacgggggacctgtgggtggtttggcccagccaaatttcgaacgggagggaggctccactggggctggcagattgggtaccttcgaacagcaggcaccacacctggcccaggagtctgcctggttctctggcccacacccaccccctggggatttactgcccagacgaatgggaggtagcggtctgcctgcggactgtgggcctcacgatcccagtttggcaccgcctccaccaccaggcggttccggcgtactcttccggggacctctgcaggaaccgatgcgaatgcctggggaaggccacgtccctgctcttcccagccccggtctgcagtttggagggagcttgggcggactggggcagctgcagtctcccggagccggagttggactaccttctgccgcatctgagagaaggccacctcccccagatttcgctacgtccgccctgggagggcagcccggattccctttcggagccgctggtaggcagagcaccccgcactctggtcccggagtgaactcccctccttcggcaggcggaggtgggggtagttcaggtgggggtggtggaggaggcgcttatccgcctcagccagacttccagccttcacagcgaacttccgcttccaagttgggggctttatccctgggcagcttcaataagccgtcttccaaggacaaccttttcggccagtcctgtctcgcagccctttctaccgcttgccaaaacatgattgcctctctgggagctccaaatctgaatgtcacattcaacaaaaagaatcctccagaggggaagagaaagctgagccaaaacgaaactgatggcgcagctgttgccggtaatccagggtcagactacttcccaggcggaacagctcctggggctccaggacctgggggaccgtccggtacctcgagcagtggctccaaggctagcggcccaccaaatccgccagctcaaggcgatggaacctctctgtcccctaattatacgctggagtcgacaagtggaaatgacgggaaacccgtcagtggaggtggagggagaggacgaggtagacggaaaagggacagtggtcacgtgtcgcctggtactttctttgataagtactcagccgctcccgattcagggggagcccctggcgtttcaccgggacagcagcaggccagcggtgctgccgtggggggatcgagtgccggtgagaccagaggcgcacctactccacacgaaaaggccctcacttccccgtcctggggaaaaggggctgagttactcttgggcgaccagcctgatttgataggctccctggatggaggtgctaaatcagatagttcaagcccaaatgtgggcgagttcgcctcagacgaagtgagtacctcatatgctaacgaggacgaggtgagcagttcttcagacaatccccaggcgctcgtaaaggccagcagatcgccccttgtgacaggatccccaaagctgcctcctagaggtgtaggggcaggagagcatggccctaaagccccacctcccgctctcggtttgggaatcatgagcaatagcacgagcacaccagattcctatggagggggtggcggacctggtcaccctgggactccaggtctggagcaagtcagaaccccgaccagttcctctggggcaccgccacccgacgaaatacacccactggaaattctccaggcacaaattcagcttcagcgacaacagttttccatttcggaagatcagcctctgggacttaaaggtggaaaaaagggcgaatgcgcagtcggcgcatcaggcgctcagaacggcgattccgagctgggttcgtgctgctctgaggcagtgaaaagcgcaatgtctacaatcgacttggatagcctaatggcagaacacagtgcagcctggtacatgccagccgataaggctcttgtggactccgctgacgatgacaaaaccctcgcgccatgggaaaaagctaaaccgcaaaaccctaattctaaagaggcccacgatttgcccgctaataaggctagcgctagccagccagggtcccacctgcagtgcctgagcgtgcactgtactgacgatgttggcgacgcaaaggctcgcgctagcgtgcccacatggcgctcgctgcattccgatataagtaatagatttgggacgtttgtagcagccctgacatag

SEQ ID NO: 128326 - DNA, 602 bp, Artificial Sequence
  derived and/or modified sequence
gttttatgttatgtggcgtgtaccctaaaaaaaaaaatagaggtgcagtgctccagcacgggatgaggcagcgtggacaggagcatctcccaacctcagtgaagtctgagccgcgtgcctgcaacaatcccactgtggcagagaaccgcagagttccttccggtttggcagcagtcattcgcaacctcacagccctctggaaccccagcctgggggtctcagaacgccgaggcggggactgggagccgagtcggattccgagactatgggccagggttggctggattcagttacctggctgaggcctggtgagcaaaatatcccaaacctcgcgtgatctggaaggggaagccggataaatacggatctccagatgtgccagtctcgagtctatcgatatgaggtccccctagagtttctattcatcattttaaccgcatttcatcgatcttgagacacggcttttgatattttatcacctcaagataaatagtgttagatgtctaatagcagcgtttttctaagagatacatgaaacaacagtgtcagaaacgatgctgtcttccatgcgatgaaattgttgtaataggtgctcaataaat

SEQ ID NO: 128327 - protein, 309 aa, Artificial Sequence
  derived and/or modified sequence
MDDQGCPRCKTTKYRNPSLKLMVNVCGHTLCESCVDLLFVRGAGNCPECGTPLRKSNFRVQLFEDPTVDKEVEIRKKVLKIYNKREEDFPSLREYNDFLEEVEEIVFNLTNNVDLDNTKKKMEIYQKENKDVIQKNKLKLTREQEELEEALEVERQENEQRRLFIQKEEQLQQILKRKNKQAFLDELESSDLPVALLLAQHKDRSTQLEMQLEKPKPVKPVTFSTGIKMGQHISLAPIHKLEEALYEYQPLQIETYGPHVPELEMLGRLGYLNHVRAASPQDLAGGYTSSLACHRALQDAFSGLFWQPS

SEQ ID NO: 128328 - protein, 169 aa, Artificial Sequence
  derived and/or modified sequence
TREQEELEEALEVERQENEQRRLFIQKEEQLQQILKRKNKQAFLDELESSDLPVALLLAQHKDRSTQLEMQLEKPKPVKPVTFSTGIKMGQHISLAPIHKLEEALYEYQPLQIETYGPHVPELEMLGRLGYLNHVRAASPQDLAGGYTSSLACHRALQDAFSGLFWQPS

SEQ ID NO: 128329 - DNA, 1388 bp, Artificial Sequence
  derived and/or modified sequence
gtctctgccaagcgcctgttggtaggaacctgcttggtcgcgtctgagggggcttgtaggtggctctggctgaaacaggcgcctgcgagagtctgtaggagggaaaccgccatggacgatcagggttgccctcggtgtaagaccaccaaatatcggaacccctccttgaagctgatggtgaatgtgtgcggacacactctctgtgaaagttgtgtagatttactgtttgtgagaggagctggaaactgccctgagtgtggtactccactcagaaagagcaacttcagggtacaactctttgaagatcccactgttgacaaggaggttgagatcaggaaaaaagtgctaaagatatacaataaaagggaagaagattttcctagtctaagagaatacaatgatttcttggaagaagtggaagaaattgttttcaacttgaccaacaatgtggatttggacaacaccaaaaagaaaatggagatataccaaaaggaaaacaaagatgttattcagaaaaataaattaaagctgactcgagaacaggaagaactggaagaagctttagaagtggaacgacaggaaaatgaacaaagaagattatttatacaaaaagaagaacaactgcagcagattctaaaaaggaagaataagcaggcttttttagatgagctggagagttctgatctccctgttgctctgcttttggctcagcataaagatagatctacccaattagaaatgcaacttgagaaacccaaacctgtaaaaccagtgacgttttccacaggcatcaaaatgggtcaacatatttcactggcacctattcacaagcttgaagaagctctgtatgaataccagccactgcagatagagacatatggaccacatgttcctgagcttgagatgctaggaagacttgggtatttaaaccatgtcagagctgcctcaccacaggaccttgctggaggctatacttcttctcttgcttgtcacagagcactacaggatgcattcagtgggcttttctggcagcccagttaaccatttataagatttggaccttggagctgaaccagggagctagcaaaagtaaagcagacttataaaattatagctatgtgcagctgcacaacacagtccttccactagcagctgtgttaaagtatttataaggagaaaatttcagaactaagttgagtaatataggggatatatatttgtgaaaaataatttttacttatatttttcagaggatttgacacgataagcctcatctgatggaagagaggaataaataattcacctatatgtgtttgaggttgtgacagacttataaaatctttttaaaaaataaagctataatttatattaaaaaaaaaaaaaataaa

SEQ ID NO: 128330 - DNA, 930 bp, Artificial Sequence
  derived and/or modified sequence
atggacgaccagggctgccccagatgcaagaccaccaagtacagaaaccccagcctgaagctgatggtgaacgtgtgcggccacaccctgtgcgagagctgcgtggacctgctgttcgtgagaggcgccggcaactgccccgagtgcggcacccccctgagaaagagcaacttcagagtgcagctgttcgaggaccccaccgtggacaaggaggtggagatcagaaagaaggtgctgaagatctacaacaagagagaggaggacttccccagcctgagagagtacaacgacttcctggaggaggtggaggagatcgtgttcaacctgaccaacaacgtggacctggacaacaccaagaagaagatggagatctaccagaaggagaacaaggacgtgatccagaagaacaagctgaagctgaccagagagcaggaggagctggaggaggccctggaggtggagagacaggagaacgagcagagaagactgttcatccagaaggaggagcagctgcagcagatcctgaagagaaagaacaagcaggccttcctggacgagctggagagcagcgacctgcccgtggccctgctgctggcccagcacaaggacagaagcacccagctggagatgcagctggagaagcccaagcccgtgaagcccgtgaccttcagcaccggcatcaagatgggccagcacatcagcctggcccccatccacaagctggaggaggccctgtacgagtaccagcccctgcagatcgagacctacggcccccacgtgcccgagctggagatgctgggcagactgggctacctgaaccacgtgagagccgccagcccccaggacctggccggcggctacaccagcagcctggcctgccacagagccctgcaggacgccttcagcggcctgttctggcagcccagctag

SEQ ID NO: 128331 - DNA, 930 bp, Artificial Sequence
  derived and/or modified sequence
atggatgatcaagggtgtccgcgttgcaaaaccacaaagtaccgaaacccatcgctcaagcttatggttaacgtgtgcgggcatacactctgcgagtcctgcgtagatctgctcttcgtgagaggggccggcaattgtcctgaatgtgggactcctcttcgcaagagcaactttcgcgtacaactcttcgaagatccaaccgttgacaaagaagtcgagattcgaaagaaggtgttaaaaatctataacaagcgcgaggaagatttcccctctttacgggaatacaacgactttctggaggaggtggaggagattgtttttaacctgactaataacgtggacctagataacaccaagaaaaaaatggagatctaccagaaagaaaataaagacgtaattcagaagaacaaactcaagctgaccagggagcaggaggagctggaggaggcactggaagtggagcggcaggaaaatgagcagaggaggttgttcattcaaaaggaggagcaactgcagcagattctcaaacgaaaaaataaacaagcgttcctcgatgagctagagtcctccgacttgcctgtggcccttctcttggcccagcataaggaccggagtactcaactggagatgcagcttgagaaaccaaagccagttaaaccagtcaccttcagcactgggatcaagatggggcaacacataagtctagcacctatccacaaactcgaggaggccctgtacgagtatcagccacttcagatcgagacatacggcccacacgtgcccgaacttgagatgttggggcggcttggatatttgaatcacgtccgtgctgcatccccgcaggatcttgccggcggctacacttcttcactagcctgtcatcgggccctacaggatgctttttccgggctgttctggcagcccagctag

SEQ ID NO: 128332 - DNA, 930 bp, Artificial Sequence
  derived and/or modified sequence
atggatgaccagggctgcccccgctgcaagaccaccaagtacagaaaccccagcctgaagctgatggtgaatgtgtgtggccacaccctgtgtgagagctgtgtggacctgctgtttgtgagaggagctggcaactgcccagaatgtggcacccccctgaggaagagcaacttccgggtgcagctgtttgaggaccccaccgtggacaaggaggtggagatcaggaagaaggtgctgaagatctacaacaagcgggaggaggacttccccagcctgcgggagtacaatgacttcctggaggaggtggaggagatcgtgttcaacctgaccaacaacgtggacctggacaacaccaagaagaagatggagatctaccagaaggagaacaaggatgtgatccagaagaacaagctgaagctgacccgggagcaggaggagctggaggaggccctggaggtggagcggcaggagaatgagcagaggaggctcttcatccagaaggaggagcagctgcagcagatcctgaagaggaagaacaagcaggccttcctggatgagctggagagcagtgacctgcctgtggccctgctgctggcccagcacaaggacaggagcacccagctggagatgcagctggagaagcccaagcctgtgaagcctgtgaccttcagcacaggcatcaagatgggccagcacatcagcctggcccccatccacaagctggaggaggccctgtatgagtaccagcccctgcagatcgagacctacggcccccacgtgcctgagctggagatgctgggccgcctgggctacctgaaccacgtgcgggccgccagcccccaggacctggccggcggctacaccagcagcctggcctgccaccgggccctgcaggatgccttcagcggcctcttctggcagcccagctag

SEQ ID NO: 128333 - DNA, 2635 bp, Artificial Sequence
  derived and/or modified sequence
agcgcctgttggtaggaacctgcttggtcgcgtctgagggggcttgtaggtggctctggctgaaacaggcgcctgcgagagtctgtaggagggaaaccgccatggacgatcagggttgccctcggtgtaagaccaccaaatatcggaacccctccttgaagctgatggtgaatgtgtgcggacacactctctgtgaaagttgtgtagatttactgtttgtgagaggagctggaaactgccctgagtgtggtactccactcagaaagagcaacttcagggtacaactctttgaagatcccactgttgacaaggaggttgagatcaggaaaaaagtgctaaagatatacaataaaagggaagaagattttcctagtctaagagaatacaatgatttcttggaagaagtggaagaaattgttttcaacttgaccaacaatgtggatttggacaacaccaaaaagaaaatggagatataccaaaaggaaaacaaagatgttattcagaaaaataaattaaagctgactcgagaacaggaagaactggaagaagctttagaagtggaacgacaggaaaatgaacaaagaagattatttatacaaaaagaagaacaactgcagcagattctaaaaaggaagaataagcaggcttttttagatgagctggagagttctgatctccctgttgctctgcttttggctcagcataaagatagatctacccaattagaaatgcaacttgagaaacccaaacctgtaaaaccagtgacgttttccacaggcatcaaaatgggtcaacatatttcactggcacctattcacaagcttgaagaagctctgtatgaataccagccactgcagatagagacatatggaccacatgttcctgagcttgagatgctaggaagacttgggtatttaaaccatgtcagagctgcctcaccacaggaccttgctggaggctatacttcttctcttgcttgtcacagagcactacaggatgcattcagtgggcttttctggcagcccagttaaccatttataagatttggaccttggagctgaaccagggagctagcaaaagtaaagcagacttataaaattatagctatgtgcagctgcacaacacagtccttccactagcagctgtgttaaagtatttataaggagaaaatttcagaactaagttgagtaatataggggatatatatttgtgaaaaataatttttacttatatttttcagaggatttgacacgataagcctcatctgatggaagagaggaataaataattcacctatatgtgtttgaggttgtgacagacttataaaatctttttaaaaaataaagctataatttatattaagttctgtggtttttctcttattacagtgttttacttgaacacattttaaataccattttgattacaacatttactgttaatatccaagtctattatttcttctcataaaatgttcccctttttcctaatgtcttgttaatactagtccagacaagtggatatatttcctttgaccaagttatggcaagaaaaacctgacccatgataatgtcattccctcaatactaaggactcaatgcctgttttaagcagtggaaaatgaggcaaaccttgatcaaggtgttatagttcccagctgtgagccacactcaggataaaacaaaacccagcattaacctgctttagtgacacattcaaagaagttaataaaatttaatacttaaatgatacctttcacctccaatgtaagctcattttatgatgaatcctttggagactggagaaggtacattttaagtacagttccctatgtataaattgtatactgatacagtttttttgttgaaacttcaaaggcttttattaccagggttttgcttaaagagtttagatatgaataggatgatattgcagcatctcaaccttgtatgagtctgttacatagagcattggatatgggatatagtttcttaaggaaattaagggatttcctatcaaatctctattacaacagatgttagttttatgggtagaaacttaggtgaaacaagacttgtggttacattaggatggactatccatctgtaacaactccatcttattttactaagcagttattaattaattttagcaatacatcttcatctttattgtacttctatctttgttaaatgagaaaaccaaggcatcaaataattgagtagacaaagatcatattcacaagttagtaaaaagccagaattagaatgcaggttttttttttcaaagtccagttccatctacattctaccagactgcatatcctattcctgtatctattaggtattcccgaactgaggattagtgtttttaagtacagtctataaatctgttcaaagaatagttagaacattgaatgtagagttaaggctttgcagcagccaattgcaaaaataaggaatccagtcttttgaaaagaaacactactgcttgttctcataccttttataaatgtattttaaaaagaatgaactaattaataaaacatatcaaaggcttttaaggcttgttttgagcctgccttattgtggaaattgcatgcacctggtttggcaaataaattccaaaaccttta

SEQ ID NO: 128334 - DNA, 930 bp, Artificial Sequence
  derived and/or modified sequence
atggacgaccagggctgcccccggtgcaagaccaccaagtaccggaatccctcacttaaacttatggtgaatgtctgcggccacaccctgtgtgaatcttgtgttgatttactcttcgttcgaggcgccgggaactgcccagagtgtggcacacctctgaggaagagtaacttccgggttcaattgtttgaggatcccaccgtggataaagaagttgagattcggaagaaagttttgaagatatacaacaagagggaggaggactttcctagcctaagagaatataatgacttcctggaagaggtggaggagattgtctttaacctcacaaataacgtggacctggataacaccaagaaaaagatggagatctatcagaaggaaaacaaagacgtgatccagaaaaataagctgaagttgacaagggagcaggaggaactcgaggaagccctggaggtcgaacgccaggagaacgaacagcgcagactgtttatccagaaggaagagcagctgcagcagatccttaaaaggaaaaataaacaggctttcttggatgaactggagagttcagatttaccagtggcattgctactggctcaacataaggatcgcagtacccagctggaaatgcaattggaaaagcctaagcccgtgaaacctgtcaccttttcaaccggcatcaaaatggggcagcatatcagtctggccccaattcataagctggaggaggcactttatgagtaccagcctctacagatagagacctacggcccgcacgtgcctgagctagagatgctgggtaggctgggctatttaaaccacgtgcgagcggcatctccccaggacctcgcaggcggatacacgtctagtttggcatgccatagagctttgcaggacgcctttagtggcttattttggcaaccgtcatag

SEQ ID NO: 128335 - DNA, 930 bp, Artificial Sequence
  derived and/or modified sequence
atggatgaccaagggtgtccaagatgcaagaccactaaatatcgaaacccctccctcaagctgatggtcaatgtgtgtggacataccctatgtgagtcgtgtgtcgacctgttatttgttcgaggtgccggaaactgccctgagtgtggcaccccattgcgtaaaagcaactttcgggttcagctgttcgaggatcctaccgtggacaaagaggtggagattagaaagaaagtgttgaaaatctacaataaaagggaggaggatttcccaagccttagggaatacaatgattttctagaggaggtcgaggagatcgtgtttaacctgactaataacgtcgaccttgataatacaaaaaaaaaaatggaaatctatcagaaggagaacaaggacgtcattcagaaaaataaactgaaattgactagagagcaggaagagctggaagaggcgctggaggttgaaagacaggaaaacgaacaaaggagacttttcatccagaaagaggaacagttacagcaaatcttgaaaaggaagaacaagcaggccttccttgacgaactggagagctcagacctccctgtggctcttcttttggctcagcacaaagacaggtccacccaactggaaatgcagctcgagaagccaaagccggtgaagccagtgactttctccaccgggataaagatgggccagcacattagcttggcccctatacataagctcgaagaggctttatatgagtatcagcctctgcagattgaaacctacggaccgcatgtgccagagttggagatgctagggaggttaggctacttgaatcatgtcagggctgcgagtccccaggacctagcagggggatacacttcatcgctcgcgtgtcaccgagcccttcaggatgccttttcgggacttttttggcagcccagttag

SEQ ID NO: 128336 - protein, 407 aa, Artificial Sequence
  derived and/or modified sequence
MVNEYKKILLLKGFELMDDYHFTSIKSLLAYDLGLTTKMQEEYNRIKITDLMEKKFQGVACLDKLIELAKDMPSLKNLVNNLRKEKSKVAKKIKTQEKAPVKKINQEEVGLAAPAPTARNKLTSEARGRIPVAQKRKTPNKEKTEAKRNKVSQEQSKPPGPSGASTSAAVDHPPLPQTSSSTPSNTSFTPNQETQAQRQVDARRNVPQNDPVTVVVLKATAPFKYESPENGKSTMFHATVASKTQYFHVKVFDINLKEKFVRKKVITISDYSECKGVMEIKEASSVSDFNQNFEVPNRIIEIANKTPKISQLYKQASGTMVYGLFMLQKKSVHKKNTIYEIQDNTGSMDVVGSGKWHNIKCEKGDKLRLFCLQLRTVDRKLKLVCGSHSFIKVIKAKKNKEGPMNVN

SEQ ID NO: 128337 - protein, 104 aa, Artificial Sequence
  derived and/or modified sequence
  misc_feature (1)..(1): Xaa can be any naturally occurring amino acid
XPNRIIEIANKTPKISQLYKQASGTMVYGLFMLQKKSVHKKNTIYEIQDNTGSMDVVGSGKWHNIKCEKGDKLRLFCLQLRTVDRKLKLVIKAKKNKEGPMNVN

SEQ ID NO: 128338 - DNA, 1670 bp, Artificial Sequence
  derived and/or modified sequence
attgagagtggctctaacaagtgccatttttccttgttagctttcatttctcagccctttacaagattaaaatagtctgcagtttaatctctccaaagctttacggacagtgattctgtcctaaacaagacagtgactccaggatttctgaagactattgtggaagaagcatccattaaggccaagctataacatcagaaatggtgaatgaatacaagaaaattcttttgctgaaaggatttgagctcatggatgattatcattttacatcaattaagtccttactggcctatgatttaggactaactacaaaaatgcaagaggaatacaacagaattaagattacagatttgatggaaaaaaagttccaaggcgttgcctgtctagacaaactaatagaacttgccaaagatatgccatcacttaaaaaccttgttaacaatcttcgaaaagagaagtcaaaagttgctaagaaaattaaaacacaagaaaaagctccagtgaaaaaaataaaccaggaagaagtgggtcttgcggcacctgcacccaccgcaagaaacaaactgacatcggaagcaagagggaggattcctgtagctcagaaaagaaaaactccaaacaaagaaaagactgaagccaaaaggaataaggtgtcccaagagcagagtaagcccccaggtccctcaggagccagcacatctgcagctgtggatcatcccccactaccccagacctcatcatcaactccatccaacacttcgtttactccgaatcaggaaacccaggcccaacggcaggtggatgcaagaagaaatgttccccaaaacgacccagtgacagtggtggtactgaaagcaacagcgccatttaaatacgagtccccagaaaatgggaaaagcacaatgtttcatgctacagtggccagtaagactcaatatttccatgtgaaagtcttcgacatcaacttgaaagagaaatttgtaaggaagaaggtcattaccatatctgattactctgaatgtaaaggagtaatggaaataaaggaagcatcatctgtgtctgactttaatcaaaattttgaggtcccaaacagaattatcgaaatagcaaataaaactcccaagatcagtcaactttacaagcaagcatctggaacaatggtgtatgggttgtttatgttacaaaagaaaagcgtacacaagaagaacacaatttatgaaatacaggataatacaggatccatggatgtagtggggagtggaaaatggcacaatatcaagtgtgagaaaggagataaacttcgactcttctgccttcaactgagaacagttgaccgcaagctgaaactggtgtgtggaagtcacagcttcatcaaggtcatcaaggccaagaaaaacaaggaaggaccaatgaatgttaattgaaatatgaaagctgaaatgcaacaaacaacttccgcttaaaacaattaagttgttaataactgtgattttgtaaatttcagtaattcatttaaatgatgtttcagtagatatattctagcatattaagagcttttataactgagttatagattagtttgctttctggaataaaattttcttcttatactcttccttttttttagatattacattttgcttttatgacattcacgaggcaaaaaaccg

SEQ ID NO: 128339 - DNA, 1224 bp, Artificial Sequence
  derived and/or modified sequence
atggtaaatgagtataagaagatactgcttctgaaggggtttgagcttatggatgattatcactttacatctatcaagtccctgctggcttacgacctcggcctgaccacaaagatgcaagaggagtacaatagaatcaagattaccgatcttatggagaaaaagtttcagggggttgcttgtctcgataaattgattgagctggccaaggacatgcctagcctgaaaaacttggtgaataatctgcgaaaagagaaatcgaaagtggcaaaaaaaataaagactcaagagaaggcccctgtgaaaaagattaatcaggaggaggtggggctcgcggcccccgctcccacggcccggaacaagctcacatcggaggcgcgtggccgtattcctgtggcgcagaaacggaagacacctaacaaggagaaaaccgaggcaaaaaggaataaggtgtctcaggagcagtcaaagcccccggggccctccggcgctagcacaagtgccgccgttgatcaccctcccctgccacaaacttcatccagcacacctagcaacacctcctttacacctaatcaggaaactcaggcacagaggcaagtggatgctagaaggaatgttcctcaaaacgatcccgtgaccgtagttgtcctaaaagccacggcacccttcaagtatgagagccccgagaatgggaagtccaccatgttccacgctaccgtggcttctaagacacaatacttccacgtcaaggtttttgatatcaatttgaaagaaaaattcgtacgcaagaaggtaatcaccatttccgactattctgagtgcaagggcgtcatggaaattaaagaggcttcttccgtgtccgactttaaccagaacttcgaggttcctaaccggatcatcgagattgctaataagaccccgaaaattagtcaactgtacaagcaggcttctgggaccatggtatacgggctctttatgctccagaaaaaatctgtgcacaaaaagaacacaatttacgagattcaagacaataccgggtcaatggacgtggtcggatccggaaaatggcacaatatcaagtgtgagaagggagacaagctgcggcttttctgcctccagctacgcaccgttgatcgaaagctcaaactggtgtgcggcagccactccttcatcaaggtaattaaagccaaaaaaaataaggagggaccgatgaacgtgaattag

SEQ ID NO: 128340 - DNA, 315 bp, Artificial Sequence
  derived and/or modified sequence
tgaccaaataggatcattgaaatcgccaacaaaacacccaagatttcccaactgtacaaacaagcttctgggaccatggtgtacggactgttcatgctacagaagaagagtgtgcacaaaaagaacaccatttacgagatacaggataacaccggatcaatggatgtagtggggtcgggcaaatggcacaatattaagtgtgagaagggagacaagctgcggctattctgcctgcagcttagaacagtggaccgcaagttgaagctggtcatcaaagcaaaaaagaacaaggaaggacccatgaacgttaactag

SEQ ID NO: 128341 - DNA, 1224 bp, Artificial Sequence
  derived and/or modified sequence
atggtgaatgagtacaagaagatcctgctgctgaagggctttgagctgatggatgactaccacttcaccagcatcaagagcctgctggcctatgacctgggcctgaccaccaagatgcaggaggagtacaaccgcatcaagatcacagacctgatggagaagaagttccagggcgtggcctgcctggacaagctgattgagctggccaaggacatgcccagcctgaagaacctggtgaacaacctgaggaaggagaagagcaaggtggccaagaagatcaagacccaggagaaggcccctgtgaagaagatcaaccaggaggaggtgggcctggccgccccagcccccacagccaggaacaagctgaccagcgaggcccggggccgcatccctgtggcccagaagaggaagacccccaacaaggagaagacagaggccaagaggaacaaggtgtcccaggagcagagcaagcccccaggccccagcggggccagcaccagcgctgctgtggaccacccccccctgccccagaccagcagcagcacccccagcaacaccagcttcacccccaaccaggagacccaggcccagaggcaggtggatgccaggagaaatgtgccccagaatgaccctgtgacagtggtggtgctgaaggccacagcccccttcaagtatgagagcccagaaaatggcaagagcaccatgtttcatgccaccgtggccagcaagacccagtacttccacgtgaaggtgtttgacatcaacctgaaggagaagtttgtgaggaagaaggtgatcaccatcagtgactacagtgaatgtaaaggagtgatggagatcaaggaggccagctctgtgtctgacttcaaccagaactttgaggtgcccaaccgcatcatcgagatcgccaacaagacccccaagatcagccagctgtacaagcaggccagcggcaccatggtgtatggcctcttcatgctgcagaagaagtctgtgcacaagaagaacaccatctatgagatccaggacaacacaggctccatggatgtggtgggcagcggcaagtggcacaacatcaagtgtgagaagggggacaagctgcggctcttctgcctgcagctgaggacagtggacaggaagctgaagctggtgtgtggcagccacagcttcatcaaggtgatcaaggccaagaagaacaaggagggccccatgaatgtgaactag

SEQ ID NO: 128342 - DNA, 315 bp, Artificial Sequence
  derived and/or modified sequence
tgacccaaccgcatcatcgagatcgccaacaagacccccaagatcagccagctgtacaagcaggccagcggcaccatggtgtatggcctcttcatgctgcagaagaagtctgtgcacaagaagaacaccatctatgagatccaggacaacacaggctccatggatgtggtgggcagcggcaagtggcacaacatcaagtgtgagaagggggacaagctgcggctcttctgcctgcagctgaggacagtggacaggaagctgaagctggtgatcaaggccaagaagaacaaggagggccccatgaatgtgaactag

SEQ ID NO: 128343 - DNA, 1752 bp, Artificial Sequence
  derived and/or modified sequence
attacataacttctttctagttaggaattaggacagtgtaagaaggccatctacaatcaagattgagagtggctctaacaagtgccatttttccttgttagctttcatttctcagccctttacaagattaaaatagtctgcagtttaatctctccaaagctttacggacagtgattctgtcctaaacaagacagtgactccaggatttctgaagactattgtggaagaagcatccattaaggccaagctataacatcagaaatggtgaatgaatacaagaaaattcttttgctgaaaggatttgagctcatggatgattatcattttacatcaattaagtccttactggcctatgatttaggactaactacaaaaatgcaagaggaatacaacagaattaagattacagatttgatggaaaaaaagttccaaggcgttgcctgtctagacaaactaatagaacttgccaaagatatgccatcacttaaaaaccttgttaacaatcttcgaaaagagaagtcaaaagttgctaagaaaattaaaacacaagaaaaagctccagtgaaaaaaataaaccaggaagaagtgggtcttgcggcacctgcacccaccgcaagaaacaaactgacatcggaagcaagagggaggattcctgtagctcagaaaagaaaaactccaaacaaagaaaagactgaagccaaaaggaataaggtgtcccaagagcagagtaagcccccaggtccctcaggagccagcacatctgcagctgtggatcatcccccactaccccagacctcatcatcaactccatccaacacttcgtttactccgaatcaggaaacccaggcccaacggcaggtggatgcaagaagaaatgttccccaaaacgacccagtgacagtggtggtactgaaagcaacagcgccatttaaatacgagtccccagaaaatgggaaaagcacaatgtttcatgctacagtggccagtaagactcaatatttccatgtgaaagtcttcgacatcaacttgaaagagaaatttgtaaggaagaaggtcattaccatatctgattactctgaatgtaaaggagtaatggaaataaaggaagcatcatctgtgtctgactttaatcaaaattttgaggtcccaaacagaattatcgaaatagcaaataaaactcccaagatcagtcaactttacaagcaagcatctggaacaatggtgtatgggttgtttatgttacaaaagaaaagcgtacacaagaagaacacaatttatgaaatacaggataatacaggatccatggatgtagtggggagtggaaaatggcacaatatcaagtgtgagaaaggagataaacttcgactcttctgccttcaactgagaacagttgaccgcaagctgaaactggtgtgtggaagtcacagcttcatcaaggtcatcaaggccaagaaaaacaaggaaggaccaatgaatgttaattgaaatatgaaagctgaaatgcaacaaacaacttccgcttaaaacaattaagttgttaataactgtgattttgtaaatttcagtaattcatttaaatgatgtttcagtagatatattctagcatattaagagcttttataactgagttatagattagtttgctttctggaataaaattttcttcttatactcttccttttttttagatattacattttgcttttatgacattcacgaggcaaaaaataaaatatctttttttgaaggaca

SEQ ID NO: 128344 - DNA, 582 bp, Artificial Sequence
  derived and/or modified sequence
cccaaacagaattatcgaaatagcaaataaaactcccaagatcagtcaactttacaagcaagcatctggaacaatggtgtatgggttgtttatgttacaaaagaaaagcgtacacaagaagaacacaatttatgaaatacaggataatacaggatccatggatgtagtggggagtggaaaatggcacaatatcaagtgtgagaaaggagataaacttcgactcttctgccttcaactgagaacagttgaccgcaagctgaaactggtcatcaaggccaagaaaaacaaggaaggaccaatgaatgttaattgaaatatgaaagctgaaatgcaacaaacaacttccgcttaaaacaattaagttgttaataactgtgattttgtaaatttcagtaattcatttaaatgatgtttcagtagatatattctagcatattaagagcttttataactgagttatagattagtttgctttctggaataaaattttcttcttatactcttccttttttttagatattacattttgcttttatgacattcacgaggcaaaaaataaaatatctttttttgaaggacatt

SEQ ID NO: 128345 - DNA, 1224 bp, Artificial Sequence
  derived and/or modified sequence
atggtgaacgagtacaagaagatcctgctgctgaagggcttcgagctgatggacgattatcatttcacgtcaatcaagagcctgctggcatatgatctagggttgacgacgaagatgcaggaggaatataacagaatcaaaatcaccgacctgatggagaaaaagttccaaggcgtggcgtgcctggataaactcattgaactggccaaggacatgccatcattaaagaacctcgttaataacctgagaaaggagaagagcaaggtggctaagaaaattaaaacccaggaaaaagcacccgttaaaaaaattaatcaagaggaggtgggcctggctgctcccgcccctacggcacgtaacaagctgacgtccgaggctcgtggaagaattccagtcgcccagaagcgtaagactcccaataaggagaaaaccgaggcaaaaaggaacaaagtgagccaggaacaatctaaaccacctgggccctcaggtgcctctacttctgctgccgttgaccatccgccactgccccaaacttcaagtagcaccccaagcaacacgagtttcacgcccaaccaggaaacccaggctcaacgtcaagttgatgcccgtcgcaacgtgccccagaatgaccctgttaccgtggtggttctaaaagcaacagctccctttaagtatgagagcccagaaaacggcaagagtaccatgttccacgccactgtggcatcaaagacacaatactttcatgtcaaagtgtttgacatcaacctgaaagaaaaattcgtacggaaaaaggtcataacaataagcgactattccgaatgcaagggcgtgatggagattaaagaggcaagttctgtaagtgattttaaccagaacttcgaggtgcccaacagaatcattgagattgctaacaagaccccaaagataagccagctctataaacaggcctctgggacgatggtgtacggcttattcatgctgcagaaaaagtccgttcataagaaaaacaccatctacgagatccaggacaatactggctcaatggacgtagtgggatctgggaaatggcacaacatcaagtgcgagaaaggggacaagttgagacttttttgccttcagcttcgcacagtcgatcggaagctcaagctcgtctgcggctcccattcattcataaaggtgataaaagccaaaaaaaacaaggaaggtccaatgaatgtcaactag

SEQ ID NO: 128346 - DNA, 315 bp, Artificial Sequence
  derived and/or modified sequence
tgacccaaccggatcatcgagatcgccaacaagacccccaagatctctcaactctataagcaggcctccggcacaatggtttatgggctcttcatgctacagaagaaatcagtgcacaagaagaacaccatctatgaaatccaagacaacacggggtctatggacgtggtgggctcaggcaagtggcataacattaaatgtgagaaaggcgacaagctcagactcttttgcttacagttgaggactgtcgacaggaaactcaagctggtgattaaggccaagaagaataaagaagggcccatgaacgtcaattag

SEQ ID NO: 128347 - DNA, 1224 bp, Artificial Sequence
  derived and/or modified sequence
atggtgaatgagtataagaaaattctgctgctcaaggggttcgagctgatggatgactatcatttcaccagcataaagtcactcctggcctacgatctgggcttgaccacaaagatgcaggaagagtacaataggattaaaatcacagacctgatggaaaaaaaattccagggagtggcctgtttagacaagctgatcgagcttgctaaggacatgccaagcctgaaaaatctggtcaacaatctgaggaaggagaaaagcaaggtggctaagaagataaaaacgcaagagaaggccccagtgaagaaaataaatcaggaagaagtgggtcttgcggctccggcacctactgcgaggaataagctaacgtccgaggctagaggccgtatcccagtggcacaaaagcgaaagacccctaataaagaaaagacagaggcaaagcgcaataaggtgagtcaagagcaaagcaagccccctggaccatcgggcgcatcgacaagtgccgctgtggatcatcccccactgccacagacaagctcgagtactcccagtaacacatcctttaccccaaaccaggagactcaggcccaacggcaggtggacgcccgacggaacgtgccccagaacgacccagtgactgtggtagttttgaaggctaccgcgccatttaagtacgagagccccgagaacggtaagtctacaatgttccacgccactgtggccagtaagacccagtatttccatgtgaaagttttcgacattaacctgaaagagaaatttgtgagaaagaaggtaattacgatttctgactatagcgaatgcaaaggggtcatggagattaaggaagcatcctcggtctccgactttaatcagaatttcgaggtcccgaacaggataatcgagattgccaacaagacccccaaaatatctcagctgtataagcaggccagcgggaccatggtatatggtctgttcatgttgcagaagaagtcagtccacaagaagaacacgatttatgagatccaagacaacacaggcagcatggatgtagtgggatcggggaagtggcataacattaaatgcgagaaaggggacaagctaagactgttctgcctgcagctccgcacagtggaccggaaacttaaactggtgtgtggaagccattcattcattaaggtgattaaggcaaaaaaaaataaggaaggacctatgaatgtgaattag

SEQ ID NO: 128348 - DNA, 315 bp, Artificial Sequence
  derived and/or modified sequence
tagccaaaccggattattgaaattgcaaacaaaactccaaagatcagtcagttgtacaaacaggcctccgggacaatggtgtacggcctctttatgttgcagaaaaaaagtgtccataagaaaaatacaatatacgaaatccaagacaacaccggtagtatggatgtggtgggcagcggtaagtggcacaacatcaagtgtgaaaagggggacaaactaaggcttttctgtcttcagctccgcacagtggaccggaagttaaagttagtgatcaaggcaaaaaagaataaagagggaccgatgaatgtgaattag

SEQ ID NO: 128349 - DNA, 1224 bp, Artificial Sequence
  derived and/or modified sequence
atggtgaacgagtacaagaagatcctgctgctgaagggcttcgagctgatggacgactaccacttcaccagcatcaagagcctgctggcctacgacctgggcctgaccaccaagatgcaggaggagtacaacagaatcaagatcaccgacctgatggagaagaagttccagggcgtggcctgcctggacaagctgatcgagctggccaaggacatgcccagcctgaagaacctggtgaacaacctgagaaaggagaagagcaaggtggccaagaagatcaagacccaggagaaggcccccgtgaagaagatcaaccaggaggaggtgggcctggccgcccccgcccccaccgccagaaacaagctgaccagcgaggccagaggcagaatccccgtggcccagaagagaaagacccccaacaaggagaagaccgaggccaagagaaacaaggtgagccaggagcagagcaagccccccggccccagcggcgccagcaccagcgccgccgtggaccacccccccctgccccagaccagcagcagcacccccagcaacaccagcttcacccccaaccaggagacccaggcccagagacaggtggacgccagaagaaacgtgccccagaacgaccccgtgaccgtggtggtgctgaaggccaccgcccccttcaagtacgagagccccgagaacggcaagagcaccatgttccacgccaccgtggccagcaagacccagtacttccacgtgaaggtgttcgacatcaacctgaaggagaagttcgtgagaaagaaggtgatcaccatcagcgactacagcgagtgcaagggcgtgatggagatcaaggaggccagcagcgtgagcgacttcaaccagaacttcgaggtgcccaacagaatcatcgagatcgccaacaagacccccaagatcagccagctgtacaagcaggccagcggcaccatggtgtacggcctgttcatgctgcagaagaagagcgtgcacaagaagaacaccatctacgagatccaggacaacaccggcagcatggacgtggtgggcagcggcaagtggcacaacatcaagtgcgagaagggcgacaagctgagactgttctgcctgcagctgagaaccgtggacagaaagctgaagctggtgtgcggcagccacagcttcatcaaggtgatcaaggccaagaagaacaaggagggccccatgaacgtgaactag

SEQ ID NO: 128350 - DNA, 315 bp, Artificial Sequence
  derived and/or modified sequence
tgacccaacagaatcatcgagatcgccaacaagacccccaagatcagccagctgtacaagcaggccagcggcaccatggtgtacggcctgttcatgctgcagaagaagagcgtgcacaagaagaacaccatctacgagatccaggacaacaccggcagcatggacgtggtgggcagcggcaagtggcacaacatcaagtgcgagaagggcgacaagctgagactgttctgcctgcagctgagaaccgtggacagaaagctgaagctggtgatcaaggccaagaagaacaaggagggccccatgaacgtgaactag

SEQ ID NO: 128351 - protein, 252 aa, Artificial Sequence
  derived and/or modified sequence
MASLSRPSLPSCLCSFLLLLLLQVSSSYAGQFRVIGPRHPIRALVGDEVELPCRISPGKNATGMEVGWYRPPFSRVVHLYRNGKDQDGDQAPEYRGRTELLKDAIGEGKVTLRIRNVRFSDEGGFTCFFRDHSYQEEAAMELKVEDPFYWVSPGVLVLLAVLPVLLLQITVGLIFLCLQYRLRGKLRAEIENLHRTFDPHFLRVPCWKITLFVIVPVLGPLVALIICYNWLHRRLAGQFLEELLFHLEALSG

SEQ ID NO: 128352 - protein, 252 aa, Artificial Sequence
  derived and/or modified sequence
MASLSRPSLPSCLCSFLLLLLLQVSSSYAGQFRVIGPRHPIRALVGDEVELPCRISPGKNATGMEVGWYRPPFSRVVHLYRNGKDQDGDQAPEYRGRTELLKDAIGEGKVTLRIRNVRFSDEGGFTCFFRDHSYQEEAAMELKVEDPFYWVSPGVLVLLAVLPVLLLQITVGLVFLCLQYRLRGKLRAEIENLHRTFDPHFLRVPCWKITLFVIVPVLGPLVALIICYNWLHRRLAGQFLEELLFHLEALSG

SEQ ID NO: 128353 - protein, 252 aa, Artificial Sequence
  derived and/or modified sequence
MASLSRPSLPSCLCSFLLLLLLQVSSSYAGQFRVIGPRHPIRALVGDEVELPCRISPGKNATGMEVGWYRPPFSRVVHLYRNGKDQDGDQAPEYRGRTELLKDAIGEGKVTLRIRNVRFSDEGGFTCFFRDHSYQEEAAMELKVEDPFYWVSPGVLVLLAVLPVLLLQITLGLVFLCLQYRLRGKLRAEIENLHRTFDPHFLRVPCWKITLFVIVPVLGPLVALIICYNWLHRRLAGQFLEELLFHLEALSG

SEQ ID NO: 128354 - protein, 298 aa, Artificial Sequence
  derived and/or modified sequence
MVTPALQMKKPKQFCRRMGQKKQRPARAGQPHSSSDAAQAPAEQPHSSSDAAQAPCPRERCLGPPTTPGPYRSIYFSSPKGHLTRLGLEFFDQPAVPLARAFLGQVLVRRLPNGTELRGRIVETEAYLGPEDEAAHSRGGRQTPRNRGMFMKPGTLYVYIIYGMYFCMNISSQGDGACVLLRALEPLEGLETMRQLRSTLRKGTASRVLKDRELCSGPSKLCQALAINKSFDQRDLAQDEAVWLERGPLEPSEPAVVAAARVGVGHAGEWARKPLRFYVRGSPWVSVVDRVAEQDTQA

SEQ ID NO: 128355 - protein, 281 aa, Artificial Sequence
  derived and/or modified sequence
MGQKKQRPARAGQPHSSSDAAQAPAEQPHSSSDAAQAPCPRERCLGPPTTPGPYRSIYFSSPKGHLTRLGLEFFDQPAVPLARAFLGQVLVRRLPNGTELRGRIVETEAYLGPEDEAAHSRGGRQTPRNRGMFMKPGTLYVYIIYGMYFCMNISSQGDGACVLLRALEPLEGLETMRQLRSTLRKGTASRVLKDRELCSGPSKLCQALAINKSFDQRDLAQDEAVWLERGPLEPSEPAVVAAARVGVGHAGEWARKPLRFYVRGSPWVSVVDRVAEQDTQA

SEQ ID NO: 128356 - protein, 251 aa, Artificial Sequence
  derived and/or modified sequence
MGQKKQRPARAGQPHSSSDAAQAPAEQPHSSSDAAQAPCPRERCLGPPTTPGPYRSIYFSSPKGHLTRLGLEFFDQPAVPLARAFLGQVLVRRLPNGTELRGRIVETEAYLGPEDEAAHSRGGRQTPRNRGMFMKPGTLYVYIIYGMYFCMNISSQGDGACVLLRALEPLEGLETMRQLRSTLRKGTASRVLKDRELCSGPSKLCQALAINKSFDQRDLAQDEAVWLERGPLEPSEPAVVAAARVGVGHAG

SEQ ID NO: 128357 - DNA, 897 bp, Artificial Sequence
  derived and/or modified sequence
atggtgacccccgccctgcagatgaagaagcccaagcagttctgcagaagaatgggccagaagaagcagagacccgccagagccggccagccccacagcagcagcgacgccgcccaggcccccgccgagcagccccacagcagcagcgacgccgcccaggccccctgccccagagagagatgcctgggcccccccaccacccccggcccctacagaagcatctacttcagcagccccaagggccacctgaccagactgggcctggagttcttcgaccagcccgccgtgcccctggccagagccttcctgggccaggtgctggtgagaagactgcccaacggcaccgagctgagaggcagaatcgtggagaccgaggcctacctgggccccgaggacgaggccgcccacagcagaggcggcagacagacccccagaaacagaggcatgttcatgaagcccggcaccctgtacgtgtacatcatctacggcatgtacttctgcatgaacatcagcagccagggcgacggcgcctgcgtgctgctgagagccctggagcccctggagggcctggagaccatgagacagctgagaagcaccctgagaaagggcaccgccagcagagtgctgaaggacagagagctgtgcagcggccccagcaagctgtgccaggccctggccatcaacaagagcttcgaccagagagacctggcccaggacgaggccgtgtggctggagagaggccccctggagcccagcgagcccgccgtggtggccgccgccagagtgggcgtgggccacgccggcgagtgggccagaaagcccctgagattctacgtgagaggcagcccctgggtgagcgtggtggacagagtggccgagcaggacacccaggcctag

SEQ ID NO: 128358 - DNA, 897 bp, Artificial Sequence
  derived and/or modified sequence
atggtgacacctgccttgcaaatgaagaaacctaaacagttttgtcgccgcatggggcaaaaaaaacagcgccccgcccgcgccgggcagccccactcttctagcgacgctgcccaggcaccagccgaacaacctcacagttcttctgacgccgctcaggctccttgtcctcgggaacggtgtcttgggccgcccaccacaccggggccttatagatctatctacttttcatccccaaaaggccatctcactagattaggcttagaattcttcgatcagcctgcagtccctcttgcgagggcctttctaggccaggtcttggtcaggagattaccaaacgggactgagctccggggcagaatcgttgaaaccgaagcatatctagggcctgaggacgaagctgcacattcccgcggcgggagacagacaccccggaatcggggcatgtttatgaagcccggcactctgtacgtttatatcatctatggaatgtacttctgtatgaacatctcttcgcagggggatggagcttgtgttctgctacgagccctggaacctcttgagggactggagactatgcggcagctccgatccacactgaggaagggcacagctagcagagttttgaaggatagggaactgtgttcaggcccgtctaaactctgccaagcactggccataaacaaatcctttgaccagcgcgacctggcccaggacgaagcggtatggctggaaagaggacctttggaaccctccgaacccgctgttgtcgccgctgcccgggtcggtgtgggccacgcgggcgaatgggctagaaagcctctacgattctatgttagaggctctccctgggtctctgtggtggacagagtagccgaacaggatacccaagcatag

SEQ ID NO: 128359 - DNA, 897 bp, Artificial Sequence
  derived and/or modified sequence
atggtgaccccagccctgcagatgaagaagcccaagcagttctgcaggaggatgggccagaagaagcagaggcctgcccgggccggccagccccacagcagcagtgatgctgcccaggccccagctgagcagccccacagcagcagtgatgctgcccaggccccctgcccccgggagcgctgcctgggcccccccaccaccccaggcccctaccgcagcatctacttcagcagccccaagggccacctgacccggctgggcctggagttctttgaccagcctgctgtgcccctggcccgggccttcctgggccaggtgctggtgcggcggctgcccaatggaacagagctgcggggcagaattgtggagacagaggcctacctgggcccagaagatgaggccgcccacagcagaggaggccggcagaccccaagaaacagaggcatgttcatgaagccaggcaccctgtatgtgtacatcatctacggcatgtacttctgcatgaacatcagcagccagggagatggagcctgtgtgctgctgcgggccctggagcccctggagggcctggagaccatgaggcagctgcggagcaccctgaggaagggcacagccagccgggtgctgaaggaccgggagctgtgcagcggccccagcaagctgtgccaggccctggccatcaacaagagctttgaccagagggacctggcccaggatgaagctgtgtggctggagcggggccccctggagcccagcgagcctgctgtggtggccgccgcccgggtgggcgtgggccatgctggggagtgggccaggaagcccctgcgcttctacgtgcggggcagcccctgggtgtctgtggtggacagagtggccgagcaggacacccaggcctag

SEQ ID NO: 128360 - DNA, 897 bp, Artificial Sequence
  derived and/or modified sequence
atggtgacccccgccctgcagatgaagaagcccaagcagttctgccggcggatgggtcagaagaaacaacgccctgcacgcgcaggccagcctcacagctcctcagacgcagcccaggcacccgccgaacagcctcattccagctccgatgccgcacaggccccctgcccgcgggagagatgtttaggtccaccaaccactcctggcccctatcgaagcatctatttttcttctcctaaggggcatttgacgaggttgggcctggaattctttgaccaacccgctgtgcccctggcccgtgcattcctgggacaggtcctggtgaggcgcctgcccaacgggacagagcttaggggtagaatcgtggaaacagaagcttatctaggccctgaggacgaggccgctcattccagaggaggccgccagactcctcggaacagaggcatgtttatgaaaccgggcactctctatgtatacataatctacgggatgtatttctgcatgaatatcagtagtcagggggacggagcctgcgtcctcctgcgtgccctggaaccgcttgagggactggaaaccatgaggcagctacgctccacattgcggaaagggacagcttcccgcgtgttaaaagatcgcgagctttgctcaggcccatctaagctgtgccaggccttggctatcaacaaatccttcgatcagcgtgatctagctcaggacgaggccgtatggttggaaaggggaccacttgaacccagcgaaccagcagtcgtggccgccgcccgagttggagtggggcacgctggagagtgggctcggaaaccgctccggttttatgtccgtggttcgccctgggttagcgtggtcgacagggttgcagaacaagatacgcaggcttag

SEQ ID NO: 128361 - DNA, 897 bp, Artificial Sequence
  derived and/or modified sequence
atggtgacaccggcactgcagatgaaaaaacctaaacagttttgtcggaggatggggcagaaaaaacagagacccgctcgggctgggcagcctcactccagctctgacgccgctcaggccccagccgaacaaccgcattcgtccagtgatgcggctcaggcgccttgccccagagaaagatgcctaggcccacctacaacccccggtccctatcgttcaatctacttcagttctccaaaaggtcatctgacccgactgggtctggagttttttgatcagcctgctgtgccgttggcaagggcatttctggggcaagtgctcgtgaggagactgcctaacggtaccgaacttcggggtaggattgtggagactgaggcatacctcggcccagaggatgaggccgcacatagcaggggagggaggcagactccaagaaatcggggaatgttcatgaaaccagggacactctatgtatatataatttatgggatgtacttctgtatgaatatctcatcacagggggatggggcatgtgtgctgctgcgagcactcgagcctctcgagggccttgaaaccatgcggcaactgaggagtaccctaaggaaggggaccgcctcgcgggtgttgaaggatcgagagctctgttctgggccatctaaactgtgccaggccctggccatcaataaatcctttgatcagagggatttagcccaggacgaggccgtatggttggaaaggggacctcttgaaccgagcgagcccgcagttgtggcggcagccagggtgggcgttggacacgcaggggagtgggccagaaaaccccttcgtttttacgtgcggggaagcccttgggtgagcgtcgtggaccgagtcgctgagcaggatacacaggcatag

SEQ ID NO: 128362 - DNA, 1193 bp, Artificial Sequence
  derived and/or modified sequence
ctgggctccgcgccggggtccgagtcccacgaagccccggcccgagccgccggatgcccgcgcgcagcggggcccaggtcatgcagcctgggcccccatgccgtgcagctcgcacatatgtggggcagagcagccaccctgcccccagcagcagccgtccatcgtcagacgtgatcatttcctgaggcctcgagtgtgtcagggtgtttgtgcctcataacaacccacaggatggtcacccccgctttgcagatgaagaaaccaaagcagttttgccgacggatggggcaaaagaagcagcgaccagctagagcagggcagccacacagctcgtccgacgcagcccaggcacctgcagagcagccacacagctcgtccgatgcagcccaggcaccttgccccagggagcgctgcttgggaccgcccaccactccgggcccataccgcagcatctatttctcaagcccaaagggccaccttacccgactggggttggagttcttcgaccagccggcagtccccctggcccgggcatttctgggacaggtcctagtccggcgacttcctaatggcacagaactccgaggccgcatcgtggagaccgaggcatacctggggccagaggatgaagccgcccactcaaggggtggccggcagaccccccgcaaccgaggcatgttcatgaagccggggaccctgtacgtgtacatcatttacggcatgtacttctgcatgaacatctccagccagggggacggggcttgcgtcttgctgcgagcactggagcccctggaaggtctggagaccatgcgtcagcttcgcagcaccctccggaaaggcaccgccagccgtgtcctcaaggaccgcgagctctgcagtggcccctccaagctgtgccaggccctggccatcaacaagagctttgaccagagggacctggcacaggatgaagctgtatggctggagcgtggtcccctggagcccagtgagccggctgtagtggcagcagcccgggtgggcgtcggccatgcaggggagtgggcccggaaacccctccgcttctatgtccggggcagcccctgggtcagtgtggtcgacagagtggctgagcaggacacacaggcctgagcaaagggcctgcccagacaagattttttaattgtttaaaaaccgaataaatgttttatttctag

SEQ ID NO: 128363 - DNA, 1028 bp, Artificial Sequence
  derived and/or modified sequence
gtcacactcatctgagggctccagacacatggcctgtgcgtctgtcctgcccagcgtctcccacctgacgcggccaggtgcccagttgctcttcaaggccttttcagttttgccgacggatggggcaaaagaagcagcgaccagctagagcagggcagccacacagctcgtccgacgcagcccaggcacctgcagagcagccacacagctcgtccgatgcagcccaggcaccttgccccagggagcgctgcttgggaccgcccaccactccgggcccataccgcagcatctatttctcaagcccaaagggccaccttacccgactggggttggagttcttcgaccagccggcagtccccctggcccgggcatttctgggacaggtcctagtccggcgacttcctaatggcacagaactccgaggccgcatcgtggagaccgaggcatacctggggccagaggatgaagccgcccactcaaggggtggccggcagaccccccgcaaccgaggcatgttcatgaagccggggaccctgtacgtgtacatcatttacggcatgtacttctgcatgaacatctccagccagggggacggggcttgcgtcttgctgcgagcactggagcccctggaaggtctggagaccatgcgtcagcttcgcagcaccctccggaaaggcaccgccagccgtgtcctcaaggaccgcgagctctgcagtggcccctccaagctgtgccaggccctggccatcaacaagagctttgaccagagggacctggcacaggatgaagctgtatggctggagcgtggtcccctggagcccagtgagccggctgtagtggcagcagcccgggtgggcgtcggccatgcaggggagtgggcccggaaacccctccgcttctatgtccggggcagcccctgggtcagtgtggtcgacagagtggctgagcaggacacacaggcctgagcaaagggcctgcccagacaagattttttaattgtttaaaaaccgaataaatgttttatttct

SEQ ID NO: 128364 - DNA, 884 bp, Artificial Sequence
  derived and/or modified sequence
gtaggaccaggtgtcacactcatctgagggctccagacacatggcctgtgcgtctgtcctgcccagcgtctcccacctgacgcggccaggtgcccagttgctcttcaaggccttttcagttttgccgacggatggggcaaaagaagcagcgaccagctagagcagggcagccacacagctcgtccgacgcagcccaggcacctgcagagcagccacacagctcgtccgatgcagcccaggcaccttgccccagggagcgctgcttgggaccgcccaccactccgggcccataccgcagcatctatttctcaagcccaaagggccaccttacccgactggggttggagttcttcgaccagccggcagtccccctggcccgggcatttctgggacaggtcctagtccggcgacttcctaatggcacagaactccgaggccgcatcgtggagaccgaggcatacctggggccagaggatgaagccgcccactcaaggggtggccggcagaccccccgcaaccgaggcatgttcatgaagccggggaccctgtacgtgtacatcatttacggcatgtacttctgcatgaacatctccagccagggggacggggcttgcgtcttgctgcgagcactggagcccctggaaggtctggagaccatgcgtcagcttcgcagcaccctccggaaaggcaccgccagccgtgtcctcaaggaccgcgagctctgcagtggcccctccaagctgtgccaggccctggccatcaacaagagctttgaccagagggacctggcacaggatgaagctgtatggctggagcgtggtcccctggagcccagtgagccggctgtagtggcagcagcccgggtgggcgtcggccatgcaggg

SEQ ID NO: 128365 - protein, 423 aa, Artificial Sequence
  derived and/or modified sequence
MAAPRVFPLSCAVQQYAWGKMGSNSEVARLLASSDPLAQIAEDKPYAELWMGTHPRGDAKILDNRISQKTLSQWIAENQDSLGSKVKDTFNGNLPFLFKVLSVETPLSIQAHPNKELAEKLHLQAPQHYPDANHKPEMAIALTPFQGLCGFRPVEEIVTFLKKVPEFQFLIGDEAATHLKQTMSHDSQAVASSLQSCFSHLMKSEKKVVVEQLNLLVKRISQQAAAGNNMEDIFGELLLQLHQQYPGDIGCFAIYFLNLLTLKPGEAMFLEANVPHAYLKGDCVECMACSDNTVRAGLTPKFIDVPTLCEMLSYTPSSSKDRLFLPTRSQEDPYLSIYDPPVPDFTIMKTEVPGSVTEYKVLALDSASILLMVQGTVIASTPTTQTPIPLQRGGVLFIGANESVSLKLTEPKDLLIFRACCLL

SEQ ID NO: 128366 - DNA, 1272 bp, Artificial Sequence
  derived and/or modified sequence
atggctgctcccagagtttttccactgagttgcgccgtacaacaatatgcttggggtaaaatgggctctaacagcgaggtggcacgactgctcgcaagctccgatccactagctcagatcgctgaggacaaaccctatgctgagctttggatggggacacacccacgcggggatgctaagatcctggataatcgcatcagccagaaaacgttgtcccagtggattgcagaaaaccaagactccctcgggtccaaagtcaaggacacatttaacggcaaccttccctttctttttaaggtcctctccgtcgaaacccctctgtctattcaggcccaccccaacaaggaactggctgagaaactgcacttgcaggctccccaacattaccccgacgcgaaccataagcctgaaatggctatcgctcttaccccattccaaggactctgcggattccgccctgtcgaggaaatcgtcacttttctgaagaaagttcctgaatttcagtttcttattggcgacgaggctgcgacccacttgaagcaaacaatgtctcatgacagccaggcggttgcatcgtctctgcagtcttgcttttcccatcttatgaaaagcgaaaaaaaggtagtagtagagcagctcaatctgttggtaaagaggatctcccagcaggcggccgctggcaacaatatggaggacatctttggtgaactgctcctgcagttacaccagcagtacccaggtgacattggatgttttgcaatctatttcctaaacctgctgactctgaaaccaggtgaggccatgtttttagaggcaaatgttccacatgcatacctgaagggcgactgcgtcgaatgtatggcgtgctccgacaatacagtccgtgccggtctcacaccaaaattcatagatgttcctaccctctgtgagatgctgagttacaccccgtccagctcaaaagacagactgtttttgccgacaaggtcacaggaggacccctacctctctatttatgacccacctgtgcccgatttcacaatcatgaagaccgaagtgcccggcagcgtgacggaatacaaagtattagcccttgactctgcatccatccttctcatggtccaaggcaccgtgatcgcctccactcccacaactcagacccccattccgctccagcggggcggcgtcctctttattggagccaacgaaagcgttagcctgaagctgacagagcccaaagacttgctgattttccgcgcgtgttgcctgttgtag

SEQ ID NO: 128367 - DNA, 1272 bp, Artificial Sequence
  derived and/or modified sequence
atggccgcccccagggtcttccccctgagctgtgctgtgcagcagtatgcctggggcaagatgggcagcaacagcgaggtggcccggctgctggccagcagtgaccccctggcccagattgctgaggacaagccctatgcagagctgtggatgggcacccaccccagaggagatgccaagatcctggacaaccgcatcagccagaagaccctgagccagtggattgctgagaaccaggacagcctgggcagcaaggtgaaggacaccttcaatggaaacctgcccttcctgttcaaggtgctgtctgtggagacccccctgagcatccaggcccaccccaacaaggagctggccgagaagctgcacctgcaggccccccagcactacccagatgccaaccacaagccagagatggccatcgccctgacccccttccagggcctgtgtggcttccggcctgtggaggagatcgtgaccttcctgaagaaggtgcctgagttccagttcctgattggagatgaagctgccacccacctgaagcagaccatgagccatgacagccaggccgtggccagcagcctgcagagctgcttcagccacctgatgaagtctgagaagaaggtggtggtggagcagctgaacctgctggtgaagaggatcagccagcaggccgccgccggcaacaacatggaggacatctttggagagctgctgctgcagctgcaccagcagtacccaggggacatcggctgctttgccatctacttcctgaacctgctgaccctgaagccaggagaggccatgttcctggaggccaacgtgccccacgcctacctgaagggggactgtgtggagtgcatggcctgcagcgacaacacagtgcgggccggcctgacccccaagttcattgatgtgcccaccctgtgtgagatgctgagctacacccccagcagcagcaaggacaggctcttcctgcccaccaggagccaggaggacccctacctgagcatctatgacccccctgtgcctgacttcaccatcatgaagacagaggtgcccggctctgtgacagagtacaaggtgctggccctggacagcgccagcatcctgctgatggtgcagggcaccgtcatcgccagcacccccaccacccagacccccatccccctgcagagaggaggagtgctcttcatcggggccaatgaatctgtgtccctgaagctgacagagcccaaggacctgctgatcttccgggcctgctgcctgctgtag

SEQ ID NO: 128368 - DNA, 3051 bp, Artificial Sequence
  derived and/or modified sequence
cgggggctgccgggaaaggcatacgtgcttaatcctggtgcagggggcgagcatggccgctccgcgagtattcccactttcctgtgcggtgcagcagtatgcctgggggaagatgggttccaacagcgaagtggcgcggctgttggccagcagtgatccactggcccagatcgcagaggacaagccttatgcagagttgtggatggggactcacccccgaggggatgccaagatccttgacaaccgcatctcacagaagaccctaagccagtggattgctgagaaccaggacagcttgggctcaaaggtcaaggacacctttaatggcaacctgcccttcctcttcaaagtgctctcagttgaaacacccctgtccatccaggcacaccctaacaaggagctggcagagaagctgcacctccaggctccgcagcactaccccgatgccaaccacaagccagagatggccattgccctcacccccttccagggcttgtgtggcttccggccagttgaggagattgtaacctttctaaagaaggtgcctgagtttcagttcctgattggagatgaggcagcaacacacctgaagcagaccatgagccatgactcccaggctgtggcctcctctctgcagagctgtttctcccacctgatgaagagtgagaagaaggtggtggtggaacagctcaacctgttggtgaagcggatctcccagcaagcggctgccggaaacaacatggaggacatctttggggagcttttgctacagctgcaccagcagtacccaggtgatatcggctgctttgccatctacttcctgaacctgcttaccctgaagcctggggaggccatgtttctggaggccaacgtaccccatgcctacctgaaaggagactgcgtggagtgcatggcgtgttcagacaacacagttcgtgctggcctgacacccaagttcattgatgtgccaaccctgtgtgaaatgctcagctatacccctagctccagcaaggacaggctctttctcccaacacggagtcaggaagacccctacctctcaatctatgacccccctgtaccagacttcaccattatgaagacggaggtccctggctctgtcactgaatacaaggtcttggcactggactctgccagcatcctcctgatggtacaggggacagtaatagccagcacacccacaacccagacaccaatccctctgcaacgtggtggcgtgctcttcattggggccaatgagagtgtctcactgaagcttactgagccgaaggacctgctgatattccgtgcctgctgtctgctgtaaaggctgcagcctccccagctctcctctgccagccaccctaaattccagccaacctcacctcctcgggcccagctcaagcccccttccttgctctggaccccttaggtataccctggaagagctggggtgggggaggagggagcgtgaaggtagtgactcctgaacacacccaggtggaaccatctttggggaggagaggcccgtgtgaggggtctgatactccctttgtcttccctctctactcctcgctacacctgagccaggctcttgccaactctgttccagcctatggctttaggctagctgttaaatatgtgacccagcattagctcagcatctgtcagagcaagagaccaggtaatttctaagaacagggttctagcgatgggactgcccatttcctcagctgcagaggaggaaagggaaagggtaggcctgtagactaacgctgtttacacccttgttctgtcaaagcaattaaagatcacttgtgttgaggctgtggggtaatgagcactcagcctttggggtacctgttcctaaagtgggccaaaagagccctccctacatgatgccccagtttttgctttattcctatttcatacagcttctcgggggagtgagcaggctacactccagaacaccggtatgggaaggagtgggagaggaagccagctttggcctcacaggcacagcttgcaagcaggccttgggtctgcccagaggcacagcttgcaagcagccctacagagaaggtgactcaaaggatacaccagtcaccagtgcaagactcttcgctcctgtttttctcttttttttttttttgagacggagtctcggtctgtagcccaggctggagtgcagtggcacgatctcggctcattgcaagctccgcctcccgggttcacgccactcttctgcctcagcctcccaagtagctgggaccacaggcgcccaccaccacgcccagccaatttttttggtatttttagtagagatggggtttcactgtgttagccaggatggtctcgatcttctgacctcgtgatccgcccacctcagcctcccaaagtgctgggattacaggcgtgagccaccacgcctggcccggctcctgtttttcaactggccctagaggaggggtccgcaaaccaggctggcaggccagttctggccatacctgttcatttccatactgtctggctgctttcaagccacagtggcaaagttgaagagttgcactagactgtacggcctgcaaaactgaaaccattgactgtcaaccacttctctacaacatactcaactgttgcagattacagggactcaggaaccgaattagacaattttcatggcgaggagaagcccagttagctttcctaaacgggcaggaagtgtgaaggagggaatctcctgatgccctgctccaggggtggcacacacctgcaagaggctgtcggctgtctgctgctgctgaggtttctgacctgcaatcgtagatcctgtcaccacagactaatcacttagtccactggctccttcctgtgggataaaggtttaaattcatgcaaaagaatctttctgggcttctgcccacactagagtccctatacaatggagttccaggaaaccaccttcaaaaatctcctgggttttcttgcctccaaattttcttcagctaaaaaacaataaagatgagctggaaagaaaaggtctgctaaagggaa

SEQ ID NO: 128369 - DNA, 1272 bp, Artificial Sequence
  derived and/or modified sequence
atggccgccccccgggtgttccccctgagctgcgccgtgcagcagtatgcttggggcaagatgggttctaactccgaggtggcaaggctgctagctagctctgacccactggcacagattgctgaggacaaaccttacgcggaactgtggatgggcacccaccctcgcggcgacgccaaaatattggataaccggatcagtcagaaaacactatctcagtggatcgcggagaaccaagattccctgggttctaaggtcaaggatacattcaatggcaatcttccttttctgtttaaggtcctcagcgtggagacccccttgtccattcaagcccacccaaataaggagctggctgaaaagctacacctacaggctccccaacattatcctgacgccaatcacaaaccagaaatggcaatcgctttaacacctttccaaggcttatgtgggttccggccagtggaggaaattgtcacctttctaaaaaaggttcctgagtttcagttccttattggagacgaagccgccacacacctaaagcagactatgagccacgacagccaggcagtggcctcatcccttcagtcttgcttctctcacctgatgaagtccgaaaaaaaagttgtggtcgagcagctgaatctgcttgtgaaacggatttcgcaacaggctgcggctgggaacaacatggaggacattttcggcgaattgttactgcagctgcatcagcaatacccaggcgatattggctgcttcgcgatttactttctaaacttactgaccctgaagcctggcgaggcgatgttcttggaggccaacgtgccacacgcgtacctaaaaggtgactgcgttgagtgcatggcttgcagcgataatactgttcgcgccggcctcacacccaaatttatcgacgtgcctacgctgtgcgaaatgctctcgtacaccccctcatcctccaaggacagactatttctcccgacaaggagtcaagaggacccttacctctctatctacgatcctcccgtcccagacttcacaatcatgaaaacagaagtgccagggtcagtgactgagtacaaagtgctggctttagattctgcctctattctactgatggtgcaggggacagtgatcgcaagtacaccaaccactcaaacacccattcctctgcagcggggcggcgtgttgttcattggcgcgaatgaatccgtcagtctgaaactaaccgagccaaaggacctactgatcttccgggcctgctgtctcctgtag

SEQ ID NO: 128370 - DNA, 1272 bp, Artificial Sequence
  derived and/or modified sequence
atggccgcaccaagggtatttcctttgtcatgcgccgttcaacaatacgcttggggaaagatgggttcaaactcagaagtggcaagactgttggcctcttcagatccactggcccagatcgccgaggataaaccctatgcagaattgtggatgggcacacacccacgcggtgatgccaagatcctcgacaataggatctctcagaagactctcagtcagtggattgccgaaaatcaggattcgctggggagcaaagtgaaggatactttcaatgggaatctgccttttctgttcaaggtgttgtcggtggaaacccccctctccatccaggcccaccccaacaaggagctcgcagaaaagctgcacctgcaagcccctcagcactacccagacgccaaccataaacctgagatggcaattgcgctcacaccctttcagggtttgtgcgggtttaggccagtcgaggaaatcgtcacattcctgaagaaggtacctgaatttcaattcctgattggggacgaagctgcgacacacctgaaacagactatgagtcacgactcccaggctgtcgctagcagcttgcaaagctgcttctcccacctaatgaagagtgagaaaaaggtggttgtggagcagctcaatttgctagtaaaacgcatatcccagcaagctgcggcaggaaacaatatggaagacatatttggagaactgttattgcagctacaccagcagtaccctggggatataggctgcttcgccatctacttccttaacctcctgacactcaagcctggggaggcaatgtttctggaggcgaacgtcccccatgcctatctcaagggcgactgcgtggagtgtatggcctgcagcgacaataccgtacgcgcagggctgacaccaaaattcatcgatgtccctacactctgtgagatgttaagttacactccttctagcagtaaggacagactcttcctccccaccagatcccaggaagatccatacctcagtatttatgatcctccagtccccgacttcactatcatgaaaaccgaagtccctgggagcgtcaccgagtacaaggttctggcactcgacagcgcttctattctcctgatggtccaaggtacagttatagctagtaccccaaccacccagacccccatcccattacagcgcggtggtgtgctttttattggcgctaatgaaagtgtctctctcaagctaactgagccaaaagaccttctaattttcagggcatgttgcctcctgtag

SEQ ID NO: 128371 - DNA, 1272 bp, Artificial Sequence
  derived and/or modified sequence
atggccgcccccagagtgttccccctgagctgcgccgtgcagcagtacgcctggggcaagatgggcagcaacagcgaggtggccagactgctggccagcagcgaccccctggcccagatcgccgaggacaagccctacgccgagctgtggatgggcacccaccccagaggcgacgccaagatcctggacaacagaatcagccagaagaccctgagccagtggatcgccgagaaccaggacagcctgggcagcaaggtgaaggacaccttcaacggcaacctgcccttcctgttcaaggtgctgagcgtggagacccccctgagcatccaggcccaccccaacaaggagctggccgagaagctgcacctgcaggccccccagcactaccccgacgccaaccacaagcccgagatggccatcgccctgacccccttccagggcctgtgcggcttcagacccgtggaggagatcgtgaccttcctgaagaaggtgcccgagttccagttcctgatcggcgacgaggccgccacccacctgaagcagaccatgagccacgacagccaggccgtggccagcagcctgcagagctgcttcagccacctgatgaagagcgagaagaaggtggtggtggagcagctgaacctgctggtgaagagaatcagccagcaggccgccgccggcaacaacatggaggacatcttcggcgagctgctgctgcagctgcaccagcagtaccccggcgacatcggctgcttcgccatctacttcctgaacctgctgaccctgaagcccggcgaggccatgttcctggaggccaacgtgccccacgcctacctgaagggcgactgcgtggagtgcatggcctgcagcgacaacaccgtgagagccggcctgacccccaagttcatcgacgtgcccaccctgtgcgagatgctgagctacacccccagcagcagcaaggacagactgttcctgcccaccagaagccaggaggacccctacctgagcatctacgacccccccgtgcccgacttcaccatcatgaagaccgaggtgcccggcagcgtgaccgagtacaaggtgctggccctggacagcgccagcatcctgctgatggtgcagggcaccgtgatcgccagcacccccaccacccagacccccatccccctgcagagaggcggcgtgctgttcatcggcgccaacgagagcgtgagcctgaagctgaccgagcccaaggacctgctgatcttcagagcctgctgcctgctgtag

SEQ ID NO: 128372 - protein, 466 aa, Artificial Sequence
  derived and/or modified sequence
MTLKASEGESGGSMHTALSDLYLEHLLQKRSRPEAVSHPLNTVTEDMYTNGSPAPGSPAQVKGQEVRKVRLIQFEKVTEEPMGITLKLNEKQSCTVARILHGGMIHRQGSLHVGDEILEINGTNVTNHSVDQLQKAMKETKGMISLKVIPNQQSRLPALQMFMRAQFDYDPKKDNLIPCKEAGLKFATGDIIQIINKDDSNWWQGRVEGSSKESAGLIPSPELQEWRVASMAQSAPSEAPSCSPFGKKKKYKDKYLAKHSSIFDQLDVVSYEEVVRLPAFKRKTLVLIGASGVGRSHIKNALLSQNPEKFVYPVPYTTRPPRKSEEDGKEYHFISTEEMTRNISANEFLEFGSYQGNMFGTKFETVHQIHKQNKIAILDIEPQTLKIVRTAELSPFIVFIAPTDQGTQTEALQQLQKDSEAIRSQYAHYFDLSLVNNGVDETLKKLQEAFDQACSSPQWVPVSWVY

SEQ ID NO: 128373 - DNA, 1401 bp, Artificial Sequence
  derived and/or modified sequence
atgactctcaaagccagcgagggcgagtcaggcggaagcatgcacacggccctgtccgacttatacctcgagcatctactgcagaaaagatctcgccctgaggccgtttcccatccattaaataccgtcaccgaggacatgtacaccaacgggagcccagcccccggctcacccgctcaagtaaaaggccaggaggtgaggaaagtcagactcatccagttcgaaaaggtaacagaggagcccatgggaatcacgcttaaactgaatgagaaacagtcctgcaccgttgcccggattttacacgggggcatgatacatcgccagggatcccttcacgtcggcgacgagatccttgagatcaatggcaccaatgtgacaaaccattctgtggaccagctgcagaaagctatgaaggagactaaaggcatgattagcctcaaggtaatccctaaccagcaatctaggctacccgccctccaaatgttcatgcgtgcccagttcgactatgatcctaaaaaggataatcttattccttgtaaggaggctggactgaaattcgccactggtgatattattcagataattaacaaagacgacagtaactggtggcaaggccgggtggaagggtcttccaaggagtccgccggcttgattcctagccctgaactccaggaatggcgagtagcatccatggcacagagcgctcctagtgaagccccctcctgcagcccctttgggaaaaaaaagaagtacaaggacaaatacttagccaagcactcttctattttcgaccagcttgacgtggtcagctatgaggaagtcgtaagacttccagcctttaagcgaaagacccttgtgctgatcggggcgtctggcgtaggccgatcccacataaagaacgcactgctgtcgcagaaccctgaaaagttcgtgtatccggtgccctacacaactaggccgccaaggaagagtgaggaggatggcaaggaatatcatttcatcagcactgaggagatgacccgcaatattagcgctaatgagtttctcgagtttggttcataccagggaaatatgtttggcaccaagttcgagactgtccaccagatacacaagcagaacaaaatcgctattctggacatcgagccacagaccctgaagatcgtgcgaacagctgaactctccccattcatagtcttcatagccccaacggatcaggggacccagacagaagccctgcagcaattacagaaagactcagaggcgatccgctcccagtatgctcattacttcgatctgtccctcgtgaataatggagtggatgagacccttaagaagcttcaggaagctttcgaccaggcatgcagctctcctcagtgggtgcccgtatcctgggtttactag

SEQ ID NO: 128374 - DNA, 1401 bp, Artificial Sequence
  derived and/or modified sequence
atgaccctgaaggccagcgagggggagagcggcggctccatgcacacagccctgagtgacctgtacctggagcacctgctgcagaagaggagcaggcctgaggccgtgagccaccccctgaacacagtgacagaggacatgtacaccaacggcagccctgcccctggcagccctgcccaggtgaagggccaggaggtgaggaaggtgcggctcatccagtttgagaaggtgacagaggagcccatgggcatcaccctgaagctgaatgagaagcagagctgcaccgtggcccgcatcctgcatggaggcatgatccaccggcagggcagcctgcacgtgggagatgagatcctggagatcaatggcaccaacgtgaccaaccacagcgtggaccagctgcagaaggccatgaaggagaccaagggcatgatcagcctgaaggtgatccccaaccagcagagccggctgcctgccctgcagatgttcatgagggcccagtttgattatgaccccaagaaggacaacctgatcccctgcaaggaggccggcctgaagtttgccaccggggacatcatccagatcatcaacaaggatgacagcaactggtggcagggccgggtggagggcagcagcaaggagagcgctggcctcatccccagccctgagctgcaggagtggagggtggcctccatggcccagagcgcccccagcgaggcccccagctgcagcccctttgggaagaagaagaagtacaaggacaagtacctggccaagcacagcagcatctttgaccagctggatgtggtgtcctatgaggaggtggtgcggctgcctgccttcaagaggaagaccctggtgctgattggagccagcggcgtgggccgcagccacatcaagaatgccctgctgagccagaaccctgagaagtttgtgtaccctgtgccctacaccacccggccccccaggaagtctgaggaggatggcaaggagtaccacttcatcagcacagaggagatgaccaggaacatcagcgccaatgagttcctggagtttggcagctaccagggcaacatgtttggcaccaagtttgaaacagtgcaccagatccacaagcagaacaagatcgccatcctggacatcgagccccagaccctgaagatcgtgaggacagctgagctgagccccttcatcgtgttcatcgcccccacagaccagggcacccagacagaggccctgcagcagctgcagaaggacagcgaggccatccgcagccagtatgcccactactttgacctgagcctggtgaacaatggagtggatgagaccctgaagaagctgcaggaggcctttgaccaggcctgcagcagcccccagtgggtgcctgtgtcctgggtgtactag

SEQ ID NO: 128375 - DNA, 2042 bp, Artificial Sequence
  derived and/or modified sequence
gtccgcgccctcccggcgcaccgcctgcggggcggtgactggcccagccgcaccgcgtctcccgccttctccgcagccccgcaggccccgggccctgtcattcccagcgctgccctgtcttgcgttccagtgttccagcttctgcgagatgaccctcaaggcgagcgagggcgagagtgggggcagcatgcacacggcgctctccgacctctacctggagcatttgctgcagaagcgtagtcggccagaggctgtatcgcatccattgaatactgtgaccgaggacatgtacaccaacgggtctcctgccccaggtagccctgcccaggtcaagggacaggaggtgcggaaagtgcgactcatacagtttgagaaggtcacagaagagcccatgggaatcacgctgaagctgaatgaaaaacagtcctgtacggtggccagaattcttcatggtggcatgatccatagacaaggctcccttcacgtgggggatgagatcctagaaatcaatggcacaaatgtgacaaatcattcagtggatcagctgcagaaggcgatgaaagaaaccaaaggaatgatctcattaaaagtaattcccaaccagcaaagccgtcttcctgcactacagatgttcatgagagcgcagtttgactatgatcccaaaaaggacaatctgatcccttgcaaggaggcgggactgaagtttgctactggggacattatccagattatcaacaaggatgacagcaattggtggcagggacgggtggaaggctcctccaaggagtcagcaggattgatcccttcccctgagctgcaggaatggcgagtggcaagtatggctcagtcagctcctagcgaagccccgagctgcagtccctttgggaagaagaagaagtacaaagacaaatatctggccaagcacagctcgatttttgatcagttggatgttgtttcctacgaggaagtcgttcggctccctgcattcaagaggaagaccctggtgctgatcggagccagtggggtgggtcgcagccacattaagaatgccctgctcagccagaatccggagaagtttgtgtaccctgtcccatatacaacacggccgccaaggaagagtgaggaagatgggaaggagtaccactttatctcaacggaggagatgacgaggaacatctctgccaatgagttcttggagtttggcagctaccaaggcaacatgtttggcaccaaatttgaaacagtgcaccagatccataagcagaacaagattgccatccttgacattgagccccagaccctgaaaattgttcggacagcagaactttcgcctttcattgtgttcattgcacctactgaccagggcactcagacagaagccctgcagcagctgcagaaggactctgaggccatccgcagccagtacgctcactactttgacctctcactggtcaataatggtgttgatgaaacccttaagaaattacaagaagccttcgaccaagcgtgcagttctccacagtgggtgcctgtctcctgggtttactaagcttgtagaatgggggaacccactgtatgcccctctccagcatttggaattccacccgccttgctttaagacaaacagggctgctccaactagttttgtgtcagcttccagctctctgcagctatcctaattcagccagtaaggttcagtcttcttgctcaggctcctgaagggttgattctcctgatagatggggccccactgatctggatttgaaaaggatttctagaaattgggggtaagaagtactaccaaaatgtaactgctaatcaagggtgatgcacagcaaaagcaatggaccccatccctctaaagcctgccctcctttgccttcaactgtatatgctgggtatttcatttgtctttttattttggagaaagcgtttttaactgcaactttctataatgccaaaatgacacatctgtgcaatagaatgatgtctgctctagggaaaccttcaaaagcaataaaaatgctgtgttgaaatgccaa

SEQ ID NO: 128376 - DNA, 1401 bp, Artificial Sequence
  derived and/or modified sequence
atgaccctgaaggccagcgagggcgagagcggcggcagcatgcacactgcactgagcgacttgtacctggagcacctcttgcagaaaaggagtcgccctgaagcagtgtcccaccctctgaacacggtcacagaggacatgtatacgaacggctcaccagcccccggcagccccgcccaggtgaaggggcaggaggtcagaaaagtgcggctcattcagttcgaaaaggttacagaggagccaatgggcatcactcttaagttaaacgagaagcagagttgcaccgtcgcgcggattctccatggtgggatgatccaccgtcaagggagcttgcacgtcggggacgagattctggagattaacggtactaatgtcacaaatcacagtgtagaccagctgcagaaggctatgaaggagacgaaaggcatgatctcactcaaggtgatccccaaccagcaaagtcgtctgcccgcccttcagatgttcatgcgggcccagttcgattacgatcccaaaaaggacaatctaataccatgcaaggaagcgggcctgaagttcgccacaggagacattattcaaatcattaataaggatgattccaattggtggcagggacgagtggagggcagctcgaaggaaagcgccggattgatcccgtcaccagaattacaagaatggcgcgttgcaagcatggcgcagtccgcccccagcgaagcaccttcatgttctccatttggcaagaagaagaaatataaagacaagtatctggctaagcacagcagtatctttgatcagcttgatgttgtctcttacgaagaggtagtgcggctgcctgcgtttaaacggaagaccctggtcctcatcggcgcctctggggtcgggaggtcacacatcaagaatgctttactgagtcaaaaccctgaaaagttcgtttatcccgtcccctataccacccgacctccacgcaaaagtgaggaggatggcaaggagtaccacttcattagcacggaggagatgactaggaacatttcagctaatgagttcttagagttcggttcctatcagggaaacatgtttggaaccaagttcgagacggtgcaccaaatccacaaacaaaataaaatagccatactcgatattgagcctcaaacgctgaaaatagtgcgaacagcagagttatccccatttatagtttttatcgcaccgacagaccagggaactcaaactgaggccttacaacaattgcagaaggatagcgaggcaatccgaagccaatatgcacactacttcgatctcagtctagtgaataacggagtggacgagacattaaaaaagctccaagaagccttcgaccaggcttgttcctcaccccagtgggtgcctgtgtcttgggtctactag

SEQ ID NO: 128377 - DNA, 1401 bp, Artificial Sequence
  derived and/or modified sequence
atgaccctgaaggcctctgagggggaaagcggaggctcgatgcatacggctttaagcgacttgtatctcgagcacctgctccagaagaggagtcggcctgaggccgtctctcatcctttgaacacggtcaccgaggatatgtacactaacggaagccccgcacctgggtcccccgctcaggtgaagggacaggaagttcgcaaagtccgtctgatacagtttgaaaaggtgaccgaagaacctatgggcatcaccttgaaattgaacgaaaagcaaagctgtacagtggcgagaattcttcatggcggtatgatccaccgtcagggctccctgcacgtgggagatgagattctggagattaatggaactaatgtgactaatcattcggtggaccagctgcagaaagccatgaaagagactaagggtatgatatccttgaaagtgattcctaaccagcaaagcagactccccgcactgcaaatgttcatgcgagcccagttcgattacgatccaaaaaaggataacctcatcccttgcaaagaagccggactgaaatttgcaaccggagatatcatccagatcataaataaagatgattcaaattggtggcagggtcgggttgagggctcttctaaggagtctgccggactcattccatcacctgaacttcaagaatggcgagttgcctctatggcccagagcgcccctagcgaggctccgagctgctcccccttcggcaaaaaaaagaaatacaaggacaaatatcttgctaagcattccagcatcttcgatcagctcgatgtggtcagctatgaggaggtcgtgagacttcctgcgttcaagaggaagaccctagtgctgatcggagcctcaggcgtgggcaggagccacatcaaaaacgccctactctcacaaaaccctgaaaagtttgtgtatccagtcccttacactacacggcctcccagaaaatccgaggaggacgggaaggaataccatttcatatctacagaagagatgacccgtaacatctctgccaatgaatttctggagttcggttcatatcagggcaacatgtttggaaccaagtttgagactgtccaccagattcacaagcagaacaaaatcgctatcctggacatcgaaccgcagacgttgaagatagtgcgaactgccgaattgagcccctttatcgtctttatcgccccaactgatcagggcacacagaccgaagctttacaacagctccagaaggactccgaagcgatccggagccagtatgcccattattttgaccttagtctggtcaataatggggtcgacgagaccctcaagaaacttcaagaggcctttgatcaagcctgtagttccccccaatgggtccctgtttcatgggtgtattag

SEQ ID NO: 128378 - DNA, 1401 bp, Artificial Sequence
  derived and/or modified sequence
atgaccctgaaggccagcgagggcgagagcggcggcagcatgcacaccgccctgagcgacctgtacctggagcacctgctgcagaagagaagcagacccgaggccgtgagccaccccctgaacaccgtgaccgaggacatgtacaccaacggcagccccgcccccggcagccccgcccaggtgaagggccaggaggtgagaaaggtgagactgatccagttcgagaaggtgaccgaggagcccatgggcatcaccctgaagctgaacgagaagcagagctgcaccgtggccagaatcctgcacggcggcatgatccacagacagggcagcctgcacgtgggcgacgagatcctggagatcaacggcaccaacgtgaccaaccacagcgtggaccagctgcagaaggccatgaaggagaccaagggcatgatcagcctgaaggtgatccccaaccagcagagcagactgcccgccctgcagatgttcatgagagcccagttcgactacgaccccaagaaggacaacctgatcccctgcaaggaggccggcctgaagttcgccaccggcgacatcatccagatcatcaacaaggacgacagcaactggtggcagggcagagtggagggcagcagcaaggagagcgccggcctgatccccagccccgagctgcaggagtggagagtggccagcatggcccagagcgcccccagcgaggcccccagctgcagccccttcggcaagaagaagaagtacaaggacaagtacctggccaagcacagcagcatcttcgaccagctggacgtggtgagctacgaggaggtggtgagactgcccgccttcaagagaaagaccctggtgctgatcggcgccagcggcgtgggcagaagccacatcaagaacgccctgctgagccagaaccccgagaagttcgtgtaccccgtgccctacaccaccagaccccccagaaagagcgaggaggacggcaaggagtaccacttcatcagcaccgaggagatgaccagaaacatcagcgccaacgagttcctggagttcggcagctaccagggcaacatgttcggcaccaagttcgagaccgtgcaccagatccacaagcagaacaagatcgccatcctggacatcgagccccagaccctgaagatcgtgagaaccgccgagctgagccccttcatcgtgttcatcgcccccaccgaccagggcacccagaccgaggccctgcagcagctgcagaaggacagcgaggccatcagaagccagtacgcccactacttcgacctgagcctggtgaacaacggcgtggacgagaccctgaagaagctgcaggaggccttcgaccaggcctgcagcagcccccagtgggtgcccgtgagctgggtgtactag

SEQ ID NO: 128379 - protein, 1456 aa, Artificial Sequence
  derived and/or modified sequence
MRLPLLLVFASVIPGAVLLLDTRQFLIYNEDHKRCVDAVSPSAVQTAACNQDAESQKFRWVSESQIMSVAFKLCLGVPSKTDWVAITLYACDSKSEFQKWECKNDTLLGIKGEDLFFNYGNRQEKNIMLYKGSGLWSRWKIYGTTDNLCSRGYEAMYTLLGNANGATCAFPFKFENKWYADCTSAGRSDGWLWCGTTTDYDTDKLFGYCPLKFEGSESLWNKDPLTSVSYQINSKSALTWHQARKSCQQQNAELLSITEIHEQTYLTGLTSSLTSGLWIGLNSLSFNSGWQWSDRSPFRYLNWLPGSPSAEPGKSCVSLNPGKNAKWENLECVQKLGYICKKGNTTLNSFVIPSESDVPTHCPSQWWPYAGHCYKIHRDEKKIQRDALTTCRKEGSDLASIHTIEEFDFIISQLGYEPNDELWIGLNDIKIQMYFEWSDGTPVTFTKWLRGEPSHENNRQEDCVVMKGKDGYWADRGCEWPLGYICKMKSRSQGPEIVEVEKGCRKGWKKHHFYCYMIGHTLSTFAEANQTCNNENAYLTTIEDRYEQAFLTSFVGLRPEKYFWTGLSDIQTKGTFQWTIEEEVRFTHWNSDMPGRKPGCVAMRTGIAGGLWDVLKCDEKAKFVCKHWAEGVTHPPKPTTTPEPKCPEDWGASSRTSLCFKLYAKGKHEKKTWFESRDFCRALGGDLASINNKEEQQTIWRLITASGSYHKLFWLGLTYGSPSEGFTWSDGSPVSYENWAYGEPNNYQNVEYCGELKGDPTMSWNDINCEHLNNWICQIQKGQTPKPEPTPAPQDNPPVTEDGWVIYKDYQYYFSKEKETMDNARAFCKRNFGDLVSIQSESEKKFLWKYVNRNDAQSAYFIGLLISLDKKFAWMDGSKVDYVSWATGEPNFANEDENCVTMYSNSGFWNDINCGYPNAFICQRHNSSINATTVMPTMPSVPSGCKEGWNFYSNKCFKIFGFMEEERKNWQEARKACIGFGGNLVSIQNEKEQAFLTYHMKDSTFSAWTGLNDVNSEHTFLWTDGRGVHYTNWGKGYPGGRRSSLSYEDADCVVIIGGASNEAGKWMDDTCDSKRGYICQTRSDPSLTNPPATIQTDGFVKYGKSSYSLMRQKFQWHEAETYCKLHNSLIASILDPYSNAFAWLQMETSNERVWIALNSNLTDNQYTWTDKWRVRYTNWAADEPKLKSACVYLDLDGYWKTAHCNESFYFLCKRSDEIPATEPPQLPGRCPESDHTAWIPFHGHCYYIESSYTRNWGQASLECLRMGSSLVSIESAAESSFLSYRVEPLKSKTNFWIGLFRNVEGTWLWINNSPVSFVNWNTGDPSGERNDCVALHASSGFWSNIHCSSYKGYICKRPKIIDAKPTHELLTTKADTRKMDPSKPSSNVAGVVIIVILLILTGAGLAAYFFYKKRRVHLPQEGAFENTLYFNSQSSPGTSDMKDLVGNIEQNEHSVI

SEQ ID NO: 128380 - protein, 498 aa, Artificial Sequence
  derived and/or modified sequence
MRLPLLLVFASVIPGAVLLLDTRQFLIYNEDHKRCVDAVSPSAVQTAACNQDAESQKFRWVSESQIMSVAFKLCLGVPSKTDWVAITLYACDSKSEFQKWECKNDTLLGIKGEDLFFNYGNRQEKNIMLYKGSGLWSRWKIYGTTDNLCSRGYEAMYTLLGNANGATCAFPFKFENKWYADCTSAGRSDGWLWCGTTTDYDTDKLFGYCPLKFEGSESLWNKDPLTSVSYQINSKSALTWHQARKSCQQQNAELLSITEIHEQTYLTGLTSSLTSGLWIGLNSLSFNSGWQWSDRSPFRYLNWLPGSPSAEPGKSCVSLNPGKNAKWENLECVQKLGYICKKGNTTLNSFVIPSESDVPTHCPSQWWPYAGHCYKIHRDEKKIQRDALTTCRKEGSDLASIHTIEEFDFIISQLGYEPNDELWIGLNDIKIQMYFEWSDGTPVTFTKWLRGEPSHENNRQEDCVVMKGKAGVQWHNLGSMQPLPREFKRFSCLSLPSS

SEQ ID NO: 128381 - protein, 1456 aa, Artificial Sequence [sequence omitted]

SEQ ID NO: 128382 - DNA, 4371 bp, Artificial Sequence
  derived and/or modified sequence
atgagactgcccctgctgctggtgttcgccagcgtgatccccggcgccgtgctgctgctggacaccagacagttcctgatctacaacgaggaccacaagagatgcgtggacgccgtgagccccagcgccgtgcagaccgccgcctgcaaccaggacgccgagagccagaagttcagatgggtgagcgagagccagatcatgagcgtggccttcaagctgtgcctgggcgtgcccagcaagaccgactgggtggccatcaccctgtacgcctgcgacagcaagagcgagttccagaagtgggagtgcaagaacgacaccctgctgggcatcaagggcgaggacctgttcttcaactacggcaacagacaggagaagaacatcatgctgtacaagggcagcggcctgtggagcagatggaagatctacggcaccaccgacaacctgtgcagcagaggctacgaggccatgtacaccctgctgggcaacgccaacggcgccacctgcgccttccccttcaagttcgagaacaagtggtacgccgactgcaccagcgccggcagaagcgacggctggctgtggtgcggcaccaccaccgactacgacaccgacaagctgttcggctactgccccctgaagttcgagggcagcgagagcctgtggaacaaggaccccctgaccagcgtgagctaccagatcaacagcaagagcgccctgacctggcaccaggccagaaagagctgccagcagcagaacgccgagctgctgagcatcaccgagatccacgagcagacctacctgaccggcctgaccagcagcctgaccagcggcctgtggatcggcctgaacagcctgagcttcaacagcggctggcagtggagcgacagaagccccttcagatacctgaactggctgcccggcagccccagcgccgagcccggcaagagctgcgtgagcctgaaccccggcaagaacgccaagtgggagaacctggagtgcgtgcagaagctgggctacatctgcaagaagggcaacaccaccctgaacagcttcgtgatccccagcgagagcgacgtgcccacccactgccccagccagtggtggccctacgccggccactgctacaagatccacagagacgagaagaagatccagagagacgccctgaccacctgcagaaaggagggcagcgacctggccagcatccacaccatcgaggagttcgacttcatcatcagccagctgggctacgagcccaacgacgagctgtggatcggcctgaacgacatcaagatccagatgtacttcgagtggagcgacggcacccccgtgaccttcaccaagtggctgagaggcgagcccagccacgagaacaacagacaggaggactgcgtggtgatgaagggcaaggacggctactgggccgacagaggctgcgagtggcccctgggctacatctgcaagatgaagagcagaagccagggccccgagatcgtggaggtggagaagggctgcagaaagggctggaagaagcaccacttctactgctacatgatcggccacaccctgagcaccttcgccgaggccaaccagacctgcaacaacgagaacgcctacctgaccaccatcgaggacagatacgagcaggccttcctgaccagcttcgtgggcctgagacccgagaagtacttctggaccggcctgagcgacatccagaccaagggcaccttccagtggaccatcgaggaggaggtgagattcacccactggaacagcgacatgcccggcagaaagcccggctgcgtggccatgagaaccggcatcgccggcggcctgtgggacgtgctgaagtgcgacgagaaggccaagttcgtgtgcaagcactgggccgagggcgtgacccacccccccaagcccaccaccacccccgagcccaagtgccccgaggactggggcgccagcagcagaaccagcctgtgcttcaagctgtacgccaagggcaagcacgagaagaagacctggttcgagagcagagacttctgcagagccctgggcggcgacctggccagcatcaacaacaaggaggagcagcagaccatctggagactgatcaccgccagcggcagctaccacaagctgttctggctgggcctgacctacggcagccccagcgagggcttcacctggagcgacggcagccccgtgagctacgagaactgggcctacggcgagcccaacaactaccagaacgtggagtactgcggcgagctgaagggcgaccccaccatgagctggaacgacatcaactgcgagcacctgaacaactggatctgccagatccagaagggccagacccccaagcccgagcccacccccgccccccaggacaacccccccgtgaccgaggacggctgggtgatctacaaggactaccagtactacttcagcaaggagaaggagaccatggacaacgccagagccttctgcaagagaaacttcggcgacctggtgagcatccagagcgagagcgagaagaagttcctgtggaagtacgtgaacagaaacgacgcccagagcgcctacttcatcggcctgctgatcagcctggacaagaagttcgcctggatggacggcagcaaggtggactacgtgagctgggccaccggcgagcccaacttcgccaacgaggacgagaactgcgtgaccatgtacagcaacagcggcttctggaacgacatcaactgcggctaccccaacgccttcatctgccagagacacaacagcagcatcaacgccaccaccgtgatgcccaccatgcccagcgtgcccagcggctgcaaggagggctggaacttctacagcaacaagtgcttcaagatcttcggcttcatggaggaggagagaaagaactggcaggaggccagaaaggcctgcatcggcttcggcggcaacctggtgagcatccagaacgagaaggagcaggccttcctgacctaccacatgaaggacagcaccttcagcgcctggaccggcctgaacgacgtgaacagcgagcacaccttcctgtggaccgacggcagaggcgtgcactacaccaactggggcaagggctaccccggcggcagaagaagcagcctgagctacgaggacgccgactgcgtggtgatcatcggcggcgccagcaacgaggccggcaagtggatggacgacacctgcgacagcaagagaggctacatctgccagaccagaagcgaccccagcctgaccaacccccccgccaccatccagaccgacggcttcgtgaagtacggcaagagcagctacagcctgatgagacagaagttccagtggcacgaggccgagacctactgcaagctgcacaacagcctgatcgccagcatcctggacccctacagcaacgccttcgcctggctgcagatggagaccagcaacgagagagtgtggatcgccctgaacagcaacctgaccgacaaccagtacacctggaccgacaagtggagagtgagatacaccaactgggccgccgacgagcccaagctgaagagcgcctgcgtgtacctggacctggacggctactggaagaccgcccactgcaacgagagcttctacttcctgtgcaagagaagcgacgagatccccgccaccgagcccccccagctgcccggcagatgccccgagagcgaccacaccgcctggatccccttccacggccactgctactacatcgagagcagctacaccagaaactggggccaggccagcctggagtgcctgagaatgggcagcagcctggtgagcatcgagagcgccgccgagagcagcttcctgagctacagagtggagcccctgaagagcaagaccaacttctggatcggcctgttcagaaacgtggagggcacctggctgtggatcaacaacagccccgtgagcttcgtgaactggaacaccggcgaccccagcggcgagagaaacgactgcgtggccctgcacgccagcagcggcttctggagcaacatccactgcagcagctacaagggctacatctgcaagagacccaagatcatcgacgccaagcccacccacgagctgctgaccaccaaggccgacaccagaaagatggaccccagcaagcccagcagcaacgtggccggcgtggtgatcatcgtgatcctgctgatcctgaccggcgccggcctggccgcctacttcttctacaagaagagaagagtgcacctgccccaggagggcgccttcgagaacaccctgtacttcaacagccagagcagccccggcaccagcgacatgaaggacctggtgggcaacatcgagcagaacgagcacagcgtgatctag

SEQ ID NO: 128383 - DNA, 1497 bp, Artificial Sequence
  derived and/or modified sequence
atgagactgcccctgctgctggtgttcgccagcgtgatccccggcgccgtgctgctgctggacaccagacagttcctgatctacaacgaggaccacaagagatgcgtggacgccgtgagccccagcgccgtgcagaccgccgcctgcaaccaggacgccgagagccagaagttcagatgggtgagcgagagccagatcatgagcgtggccttcaagctgtgcctgggcgtgcccagcaagaccgactgggtggccatcaccctgtacgcctgcgacagcaagagcgagttccagaagtgggagtgcaagaacgacaccctgctgggcatcaagggcgaggacctgttcttcaactacggcaacagacaggagaagaacatcatgctgtacaagggcagcggcctgtggagcagatggaagatctacggcaccaccgacaacctgtgcagcagaggctacgaggccatgtacaccctgctgggcaacgccaacggcgccacctgcgccttccccttcaagttcgagaacaagtggtacgccgactgcaccagcgccggcagaagcgacggctggctgtggtgcggcaccaccaccgactacgacaccgacaagctgttcggctactgccccctgaagttcgagggcagcgagagcctgtggaacaaggaccccctgaccagcgtgagctaccagatcaacagcaagagcgccctgacctggcaccaggccagaaagagctgccagcagcagaacgccgagctgctgagcatcaccgagatccacgagcagacctacctgaccggcctgaccagcagcctgaccagcggcctgtggatcggcctgaacagcctgagcttcaacagcggctggcagtggagcgacagaagccccttcagatacctgaactggctgcccggcagccccagcgccgagcccggcaagagctgcgtgagcctgaaccccggcaagaacgccaagtgggagaacctggagtgcgtgcagaagctgggctacatctgcaagaagggcaacaccaccctgaacagcttcgtgatccccagcgagagcgacgtgcccacccactgccccagccagtggtggccctacgccggccactgctacaagatccacagagacgagaagaagatccagagagacgccctgaccacctgcagaaaggagggcagcgacctggccagcatccacaccatcgaggagttcgacttcatcatcagccagctgggctacgagcccaacgacgagctgtggatcggcctgaacgacatcaagatccagatgtacttcgagtggagcgacggcacccccgtgaccttcaccaagtggctgagaggcgagcccagccacgagaacaacagacaggaggactgcgtggtgatgaagggcaaggccggcgtgcagtggcacaacctgggcagcatgcagcccctgcccagagagttcaagagattcagctgcctgagcctgcccagcagctag

SEQ ID NO: 128384 - DNA, 4371 bp, Artificial Sequence
  derived and/or modified sequence
atgagattgccactgttactcgtgtttgcttcagtcattcctggagccgtgctcctgctggacacacggcaattcctaatttataacgaagaccacaagcggtgtgtggacgctgtgtcccctagcgcggtccagacggccgcttgtaatcaagatgccgagtctcaaaagtttcggtgggtctcagagagtcagattatgagcgtggcattcaaactttgccttggcgtaccctccaagaccgactgggtggctataaccctctacgcatgcgattctaaatccgagtttcagaaatgggagtgcaaaaacgacacactcctgggtataaagggagaggatcttttctttaattacgggaacagacaggagaaaaatatcatgctgtacaaaggatccggcctctggtctcggtggaagatttacggcaccacagacaacttatgcagcaggggatacgaggccatgtatactctcctgggcaacgccaatggagctacttgtgcctttccttttaaattcgagaacaagtggtatgctgactgtacctccgcaggtcggagtgacggatggttatggtgtggtactaccaccgactatgatactgacaagctcttcggatattgccctctgaaatttgagggctccgagtctctctggaataaggaccctctgacctctgttagctaccaaataaacagcaagtccgcactgacttggcaccaggctaggaagagttgccagcagcagaacgctgaattactgagcataacagagattcatgaacagacatacctcacagggctcacctcgagtttgacctctggtctctggatcgggttaaattcactcagtttcaactccgggtggcagtggagtgacaggtcaccttttcggtatcttaactggctgcccgggtccccctccgcggagcctggaaaatcatgtgtgtcgttgaatccgggcaaaaacgccaagtgggagaatctggaatgcgtgcaaaaactcggctacatctgtaagaaaggaaacactaccctcaactctttcgttatcccaagtgaatccgacgtcccaacccactgccccagccaatggtggccgtacgcaggccactgctataaaattcatcgcgatgagaagaaaattcagcgggatgcactcacgacctgccgcaaagaaggttctgaccttgcctcaatacatacaatcgaagagtttgactttatcatcagccaactgggctacgagccaaatgacgagctctggattggcctgaacgacattaaaatccagatgtattttgagtggtctgacggaacacccgtgacttttaccaaatggctgaggggggagccttctcatgagaacaacagacaggaggactgtgtagtgatgaagggcaaagatgggtattgggcagacagaggctgcgagtggccacttggttacatttgcaaaatgaaatcgagatctcaaggacctgaaatcgtagaggtggagaaagggtgccggaaagggtggaagaaacaccacttttactgttacatgattgggcacacactcagcaccttcgcagaggcaaaccagacatgcaacaacgagaacgcttacttgactaccatcgaggatcgttatgaacaggcctttctcacatctttcgtgggtctgcggccagagaaatatttttggaccggcttgagtgatattcagaccaagggaaccttccaatggactatcgaggaagaagtgcgcttcactcattggaactcggatatgccaggaagaaagccagggtgtgtcgctatgcgtaccgggatcgccggaggactctgggatgttctaaaatgcgatgaaaaggctaaatttgtctgcaagcactgggcagagggggtgacacatccccctaagccaacaaccacccctgaacccaagtgccctgaggattggggagcctcgagccgcacctctctgtgcttcaaactttacgctaaaggaaaacacgagaagaagacatggttcgagagccgcgacttctgcagggcgctagggggggatctcgcatcaatcaacaacaaagaggaacaacaaacgatatggcgcttaataaccgcctcaggctcctaccataagctattctggcttgggctgacctacggcagtccctccgagggattcacttggtcggacggatcacccgtgtcctatgaaaattgggcgtatggggaacccaataattatcagaacgttgaatactgcggagagcttaagggggatccgaccatgtcctggaatgatattaactgcgaacatctaaataattggatatgccagatacaaaaaggacagacgcctaagcctgaacccaccccagctccccaggacaaccctcccgtgaccgaggacgggtgggttatctacaaagactatcagtattattttagcaaggaaaaagagaccatggataatgctcgggccttctgtaaacgcaattttggagacctggtaagcatccaatcagagagcgaaaaaaaatttttgtggaagtacgtgaaccggaatgatgcccaaagcgcttattttattggtcttctcatctcactcgataagaaatttgcctggatggacggcagcaaagtggactacgtgagctgggctaccggggagcccaattttgcaaacgaagacgagaattgcgtgaccatgtactcaaatagcggcttctggaacgatatcaattgcggatacccaaatgcttttatttgtcagaggcataactccagtattaacgccaccaccgtgatgccgactatgccatctgtaccttcaggatgtaaggagggctggaacttctattcgaataagtgttttaaaatctttgggtttatggaagaggagcgaaaaaactggcaggaggctcggaaggcatgcatcggctttgggggtaacttggtgtccatccagaatgagaaggagcaggccttcctgacatatcacatgaaagatagcacgttcagcgcgtggaccggtctgaatgacgtcaacagcgagcacacatttctgtggaccgatggcagaggcgtccattacaccaattggggaaagggctatcctggggggaggagatcatctctgtcctacgaggacgcagactgtgtggtgataatcggtggagcgagtaacgaagccggtaaatggatggatgacacttgtgatagcaagagaggttacatctgtcagacaaggagtgatcctagccttactaatcctccagccaccattcaaacggacgggttcgtgaagtatggaaaatcctcctattctttaatgagacagaaattccagtggcacgaagcagagacctactgtaaactgcacaatagcttgatcgcctcgatattggatccttattccaacgcgtttgcatggctgcagatggagacctctaacgaacgcgtctggattgctctgaattctaatttaaccgacaaccagtatacctggaccgataaatggagagtgcggtataccaattgggccgccgatgaaccaaagctgaagtccgcttgcgtatatttggacctggatggctactggaaaaccgcccactgcaatgaaagtttttacttcctctgcaaaagatctgatgaaatccccgccacagaacccccccagctacccgggagatgcccggaatctgaccataccgcctggattccctttcatggacactgttattatatagagagcagctacacacggaactggggacaggcctcattggagtgtctccgtatggggtcatcgctggtcagcatcgagtccgccgccgagagttcattcctgtcctacagagtcgaacctctgaagtccaagaccaatttttggattggcctgttccgcaatgtggagggaacttggctgtggataaacaactccccggtgtccttcgtaaactggaacaccggagatccttcaggtgagaggaacgactgcgtcgccctgcacgcgtcctccggcttctggagtaacatccactgcagtagttacaaaggatacatttgtaagagacccaagattatcgacgccaagcccacgcacgagctcctaactaccaaagcggacaccagaaaaatggatcccagcaaaccgtctagcaatgtagctggagtggtaatcattgtgattctgttgattctgactggggctggcctcgctgcctattttttctataaaaaacgaagggtgcaccttccccaggaaggtgcttttgagaataccctttatttcaacagccagtcaagcccaggcacaagtgacatgaaggatctggtggggaacatagaacagaacgagcatagtgtgatttag

SEQ ID NO: 128385 - DNA, 1497 bp, Artificial Sequence
  derived and/or modified sequence
atgaggctgcccctgttattggtgtttgccagcgttattccaggcgccgtcctcttactcgataccaggcagtttctgatctataatgaagaccataagagatgcgtcgatgctgtaagtccttcagccgttcagaccgcagcttgtaaccaggacgccgaaagccagaagttccgatgggtgagcgagtctcagatcatgtccgtggcctttaaactctgcctgggagtgcccagcaaaactgattgggtggccataaccctttacgcttgcgactctaagagtgaattccaaaagtgggaatgcaaaaacgataccctgctgggcataaaaggcgaggatctgttcttcaattacgggaatcgccaggagaagaacatcatgctgtacaagggttctggactttggtctcgatggaagatttacggcactacagacaatctttgcagtaggggctatgaggctatgtacactttgctgggtaacgcgaacggtgcaacatgcgctttccccttcaaatttgaaaacaaatggtatgccgattgcacaagcgccggtaggagcgatggatggttgtggtgcgggaccaccacagactacgacacagacaagctgttcggttattgccccctgaaattcgagggaagcgagtccctatggaataaggatcccctgacctccgttagttatcagattaactcaaaatccgccctgacctggcaccaggctcgcaaatcttgtcagcagcagaatgctgaactgctgtcaattaccgagattcatgaacagacttacctcacaggactgacctccagcttgacctcgggcttgtggattggactaaattcgctaagcttcaactctggatggcagtggtctgacaggtccccctttcggtatcttaattggctgcctgggtcgccgtccgctgagccaggcaagtcatgtgtgagcttgaatcctgggaaaaatgccaaatgggaaaatctggagtgcgtacagaagctgggctatatctgcaaaaaaggcaacactactctgaacagtttcgtgatcccctctgaatcagatgtaccgacacactgcccatctcagtggtggccttacgccggacattgttacaaaattcatcgcgacgagaagaagatccagagggacgcccttaccacatgcaggaaggaaggcagcgatttggccagcatccacaccatagaggaatttgattttatcatttctcagctgggatacgagccaaacgatgagctgtggatcgggttgaacgatattaaaattcagatgtactttgagtggtctgatggtacccctgtaaccttcactaaatggctgaggggggaaccaagtcacgaaaacaatcgccaggaggactgcgtcgtgatgaaggggaaagcaggagtccagtggcataacttaggcagcatgcagccccttccacgggaattcaagcgcttctcctgcctgtctctgcctagttcttag

SEQ ID NO: 128386 - DNA, 4371 bp, Artificial Sequence
  derived and/or modified sequence
atgaggctgcccctgctgctggtgtttgccagcgtcatccctggagctgtgctgctgctggacacccggcagttcctgatctacaatgaagaccacaagagatgtgtggatgctgtgagccccagcgctgtgcagacagctgcctgcaaccaggatgctgagagccagaagttccgctgggtgtctgagagccagatcatgtctgtggccttcaagctgtgcctgggcgtgcccagcaagacagactgggtggccatcaccctgtatgcctgtgacagcaagtctgagttccagaagtgggagtgcaagaatgacaccctgctgggcatcaagggagaagatctcttcttcaactacggcaaccggcaggagaagaacatcatgctgtacaagggcagcggcctgtggagccgctggaagatctacggcaccacagacaacctgtgcagccggggctatgaggccatgtacaccctgctgggcaatgccaacggggccacctgtgccttccccttcaagtttgagaacaagtggtacgccgactgcaccagcgctggccgcagtgatggctggctgtggtgtggcaccaccacagattatgacacagacaagctgtttggctactgccccctgaagtttgagggcagcgagagcctgtggaacaaggaccccctgacctctgtgtcctaccagatcaacagcaagagcgccctgacctggcaccaggccaggaagagctgccagcagcagaatgctgagctgctgagcatcacagagatccacgagcagacctacctgaccggcctgaccagcagcctgaccagcggcctgtggattggcctgaacagcctgtccttcaacagcggctggcagtggagcgacaggagccccttccgctacctgaactggctgcccggcagccccagcgctgagcccgggaagagctgtgtgtccctgaaccctgggaagaatgccaagtgggagaacctggagtgtgtgcagaagctgggctacatctgcaagaagggcaacaccaccctgaacagctttgtgatccccagcgagagtgatgtgcccacccactgccccagccagtggtggccctatgccggccactgctacaagatccacagagatgagaagaagatccagagagatgccctgaccacctgcaggaaggagggcagtgacctggccagcatccacaccatcgaggagtttgacttcatcatcagccagctgggctatgagcccaatgatgagctgtggattggcctgaatgacatcaagatccagatgtactttgagtggagcgatggcacccctgtgaccttcaccaagtggctgcggggggagcccagccatgagaacaaccggcaggaggactgtgtggtgatgaagggcaaggatggctactgggccgaccggggctgtgagtggcccctgggctacatctgcaagatgaagagccgcagccagggccctgagatcgtggaggtggagaagggctgcaggaagggctggaagaagcaccacttctactgctacatgattggccacaccctgagcacctttgctgaggccaaccagacctgcaacaatgaaaatgcctacctgaccaccattgaagatagatatgagcaggccttcctgaccagctttgtgggcctgcggcctgagaagtacttctggacaggcctgagtgacatccagaccaagggcaccttccagtggaccatcgaggaggaggtgcgcttcacccactggaacagcgacatgcctggcaggaagccaggctgtgtggccatgaggactggaattgctgggggcctgtgggatgtgctgaagtgtgatgagaaggccaagtttgtgtgcaagcactgggccgagggcgtgacccacccccccaagcccaccaccaccccagagcccaagtgcccagaggactggggcgccagcagcaggaccagcctgtgcttcaagctgtatgccaagggcaagcatgagaagaagacctggtttgagagccgggacttctgccgggccctgggcggggacctggccagcatcaacaacaaggaggagcagcagaccatctggaggctcatcacagccagcggcagctaccacaagctgttctggctgggcctgacctacggcagccccagcgagggcttcacctggagcgatggcagccctgtgtcctatgagaactgggcctatggagagcccaacaactaccagaatgtggagtactgtggggagctgaagggggaccccaccatgtcctggaatgacatcaactgtgagcacctgaacaactggatctgccagatccagaagggccagacccccaagccagagcccaccccagccccccaggacaacccccctgtgacagaagatggctgggtgatctacaaggactaccagtactacttcagcaaggagaaggagaccatggacaatgcccgggccttctgcaagaggaactttggagacctggtgtccatccagagcgagagcgagaagaagttcctgtggaagtatgtgaacagaaatgatgcccagagcgcctacttcatcggcctgctgatcagcctggacaagaagtttgcctggatggatggcagcaaggtggactatgtgtcctgggccactggagagcccaactttgccaatgaagatgagaactgtgtgaccatgtacagcaacagcggcttctggaatgacatcaactgtggctacccaaatgccttcatctgccagaggcacaacagcagcatcaatgccaccaccgtgatgcccaccatgcccagcgtgcccagcggctgcaaggagggctggaacttctacagcaacaagtgcttcaagatcttcggcttcatggaggaggagaggaagaactggcaggaggccaggaaggcctgcatcggctttggaggcaacctggtgtccatccagaatgagaaggagcaggccttcctgacctaccacatgaaggacagcaccttcagcgcctggacaggcctgaatgatgtgaacagcgagcacaccttcctgtggacagatggccggggcgtgcactacaccaactggggcaagggctacccaggcggcagaagaagcagcctgtcctatgaagatgctgactgtgtggtgatcatcggcggggccagcaatgaagctgggaagtggatggatgacacctgtgacagcaagaggggctacatctgccagaccaggagtgaccccagcctgaccaaccccccagccaccatccagacagatggctttgtgaagtatggcaagagcagctacagcctgatgaggcagaagttccagtggcatgaagctgagacctactgcaagctgcacaacagcctcatcgccagcatcctggacccctacagcaatgcctttgcctggctgcagatggagaccagcaatgaaagagtgtggatcgccctgaacagcaacctgacagacaaccagtacacctggacagacaagtggagggtgcgctacaccaactgggccgcagatgagcccaagctgaagagcgcctgtgtgtacctggacctggatggctactggaagacagcccactgcaatgaaagcttctacttcctgtgcaagagaagtgatgagatcccagccacagagcccccccagctgcccggccgctgcccagagagtgaccacacagcctggatccccttccacggccactgctactacatcgagagcagctacaccaggaactggggccaggccagcctggagtgcctgaggatgggcagcagcctggtgtccattgaatctgctgctgagagcagcttcctgagctacagagtggagcccctgaagagcaagaccaacttctggattggcctcttcagaaatgtggagggcacctggctgtggatcaacaacagccctgtgtcctttgtgaactggaacacaggagaccccagcggggagagaaatgactgtgtggccctgcacgccagcagcggcttctggagcaacatccactgcagcagctacaagggctacatctgcaagaggcccaagatcattgatgccaagcccacccatgagctgctgaccaccaaggctgacaccaggaagatggaccccagcaagcccagcagcaatgtggccggcgtggtgatcatcgtcatcctgctgatcctgactggagctggcctggccgcctacttcttctacaagaagagaagagtgcacctgccccaggagggcgcctttgagaacaccctgtacttcaacagccagagcagccctggcaccagtgacatgaaggacctggtgggcaacatcgagcagaatgagcacagcgtcatctag

SEQ ID NO: 128387 - DNA, 1497 bp, Artificial Sequence
  derived and/or modified sequence
atgaggctgcccctgctgctggtgtttgccagcgtcatccctggagctgtgctgctgctggacacccggcagttcctgatctacaatgaagaccacaagagatgtgtggatgctgtgagccccagcgctgtgcagacagctgcctgcaaccaggatgctgagagccagaagttccgctgggtgtctgagagccagatcatgtctgtggccttcaagctgtgcctgggcgtgcccagcaagacagactgggtggccatcaccctgtatgcctgtgacagcaagtctgagttccagaagtgggagtgcaagaatgacaccctgctgggcatcaagggagaagatctcttcttcaactacggcaaccggcaggagaagaacatcatgctgtacaagggcagcggcctgtggagccgctggaagatctacggcaccacagacaacctgtgcagccggggctatgaggccatgtacaccctgctgggcaatgccaacggggccacctgtgccttccccttcaagtttgagaacaagtggtacgccgactgcaccagcgctggccgcagtgatggctggctgtggtgtggcaccaccacagattatgacacagacaagctgtttggctactgccccctgaagtttgagggcagcgagagcctgtggaacaaggaccccctgacctctgtgtcctaccagatcaacagcaagagcgccctgacctggcaccaggccaggaagagctgccagcagcagaatgctgagctgctgagcatcacagagatccacgagcagacctacctgaccggcctgaccagcagcctgaccagcggcctgtggattggcctgaacagcctgtccttcaacagcggctggcagtggagcgacaggagccccttccgctacctgaactggctgcccggcagccccagcgctgagcccgggaagagctgtgtgtccctgaaccctgggaagaatgccaagtgggagaacctggagtgtgtgcagaagctgggctacatctgcaagaagggcaacaccaccctgaacagctttgtgatccccagcgagagtgatgtgcccacccactgccccagccagtggtggccctatgccggccactgctacaagatccacagagatgagaagaagatccagagagatgccctgaccacctgcaggaaggagggcagtgacctggccagcatccacaccatcgaggagtttgacttcatcatcagccagctgggctatgagcccaatgatgagctgtggattggcctgaatgacatcaagatccagatgtactttgagtggagcgatggcacccctgtgaccttcaccaagtggctgcggggggagcccagccatgagaacaaccggcaggaggactgtgtggtgatgaagggcaaggccggcgtgcagtggcacaacctgggctccatgcagcccctgccccgggagttcaagcgcttcagctgcctgagcctgcccagcagctag

SEQ ID NO: 128388 - DNA, 5171 bp, Artificial Sequence
  derived and/or modified sequence
gggaacttggattaggtggagaggcagttggggggcctcgttgttttgcgtcttagttccgccctcctgtccatcaggagaaggaaaggataaaccctgggccatgaggctacccctgctcctggtttttgcctctgtcattccgggtgctgttctcctactggacaccaggcaatttttaatctataatgaagatcacaagcgctgcgtggatgcagtgagtcccagtgccgtccaaaccgcagcttgcaaccaggatgccgaatcacagaaattccgatgggtgtccgaatctcagattatgagtgttgcatttaaattatgcctgggagtgccatcaaaaacggactgggttgctatcactctctatgcctgtgactcaaaaagtgaatttcagaaatgggagtgcaaaaatgacacacttttggggatcaaaggagaagatttattttttaactacggcaacagacaagaaaagaatattatgctctacaagggatcgggtttatggagcaggtggaagatctatggaaccacagacaatctgtgctccagaggttatgaagccatgtatacgctactaggcaatgccaatggagcaacctgtgcattcccgttcaagtttgaaaacaagtggtacgcagattgcacgagtgctgggcggtcggatggatggctctggtgcggaaccactactgactatgacacagacaagctatttggatattgtccattgaaatttgagggcagtgaaagcttatggaataaagacccgctgaccagcgtttcctaccagataaactccaaatccgctttaacgtggcaccaggcgaggaaaagctgccaacaacagaacgctgagctcctgagcatcacagagattcatgagcaaacatacctgacaggattaaccagttccttgacctcaggactctggattggacttaacagtctgagcttcaacagcggttggcagtggagtgaccgcagtcctttccgatatttgaactggttaccaggaagtccatcagctgaacctggaaaaagctgtgtgtcactaaatcctggaaaaaatgctaaatgggaaaatctggaatgtgttcagaaactgggctatatttgcaaaaagggcaacaccactttaaattcttttgttattccctcagaaagtgatgtgcctactcactgtcctagtcagtggtggccgtatgccggtcactgttacaagattcacagagatgagaaaaaaatccagagggatgctctgaccacctgcaggaaggaaggcagtgacctcgcaagtatccacaccattgaggaattcgactttattatctcccagctaggatatgagccaaatgacgaattgtggatcggcttaaatgacattaagattcaaatgtactttgagtggagtgatgggacccctgtaacgtttaccaaatggcttcgtggagaaccaagccatgaaaacaacagacaggaggattgtgtggtgatgaaaggcaaggatgggtactgggcagatcggggctgtgagtggcctcttggctacatctgcaagatgaaatcacgaagccaaggtccagaaatagtggaagtcgaaaaaggctgcaggaaaggctggaaaaaacatcacttttactgctatatgattggacatacgctttcaacatttgcagaagcaaaccaaacctgtaataatgagaatgcttatttaacaactattgaagacagatatgaacaagccttcctgactagtttcgttggcttaaggcctgaaaaatatttctggacaggactttcagatatacaaaccaaagggacttttcagtggaccatcgaggaagaggttcggttcacccactggaattcagatatgccagggcgaaagccagggtgtgttgccatgagaaccgggattgcagggggcttatgggatgttttgaaatgtgatgaaaaggcaaaatttgtgtgcaagcactgggcagaaggagtaacccacccaccgaagcccacgacgactcccgaacccaaatgtccggaggattggggcgccagcagtagaacaagcttgtgtttcaagctgtatgcaaaaggaaaacatgagaagaaaacgtggtttgaatctcgagatttttgtcgagctctgggtggagacttagctagcatcaataacaaagaggaacagcaaacaatatggcgattaataacagctagtggaagctaccacaaactgttttggttgggattgacatatggaagcccttcagaaggttttacttggagtgatggttctcctgtttcatatgaaaactgggcttatggagaacctaataattatcaaaatgttgaatactgtggtgagctgaaaggtgaccctactatgtcttggaatgatattaattgtgaacaccttaacaactggatttgccagatacaaaaaggacaaacaccaaaacctgagccaacaccagctcctcaagacaatccaccagttactgaagatgggtgggttatttacaaagactaccagtattatttcagcaaagagaaggaaaccatggacaatgcgcgagcgttttgcaagaggaattttggtgatcttgtttctattcaaagtgaaagtgaaaagaagtttctatggaaatatgtaaacagaaatgatgcacagtctgcatattttattggtttattgatcagcttggataaaaagtttgcttggatggatggaagcaaagtggattacgtgtcttgggccacaggtgaacccaattttgcaaatgaagatgaaaactgtgtgaccatgtattcaaattcagggttttggaatgacattaactgtggctatccaaacgccttcatttgccagcgacataacagtagtatcaatgctaccacagttatgcctaccatgccctcggtcccatcagggtgcaaggaaggttggaatttctacagcaacaagtgtttcaaaatctttggatttatggaagaagaaagaaaaaattggcaagaggcacgaaaagcttgtataggctttggagggaatctggtctccatacaaaatgaaaaagagcaagcatttcttacctatcacatgaaggactccactttcagtgcctggactgggctgaatgatgtcaattcagaacacacgttcctttggacggatggacgaggagtccattacacaaactgggggaaaggttaccctggtggaagaagaagcagtctttcttatgaagatgctgactgtgttgttattattggaggtgcatcaaatgaagcaggaaaatggatggatgatacctgcgacagtaaacgaggctacatatgccagacacgatccgacccttccttgactaatcctccagcaacgattcaaacagatggctttgttaaatatggcaaaagcagctattcactcatgagacaaaaatttcaatggcatgaagcggagacatactgcaagcttcacaattcccttatagccagcattctggatccctacagtaatgcatttgcgtggctgcagatggaaacatctaatgaacgtgtgtggatcgccctgaacagtaacttgactgataatcaatacacttggactgataagtggagggtgaggtacactaactgggctgctgatgagcccaaattgaaatcagcatgtgtttatctggatcttgatggctactggaagacagcacattgcaatgaaagtttttactttctctgtaaaagatcagatgaaatccctgctactgaacccccacaactgcctggcagatgcccggagtcagatcacacagcatggattcctttccatggtcactgttactatattgagtcctcatatacaagaaactggggccaagcttctctggaatgtcttcgaatgggttcctctctggtttccattgaaagtgctgcagaatccagttttctgtcatatcgggttgagccacttaaaagtaaaaccaatttttggataggattgttcagaaatgttgaagggacgtggctgtggataaataacagtccggtctcctttgtcaactggaacacaggagatccctctggtgaacggaatgattgtgtagctttacatgcgtcttctgggttttggagtaatattcactgttcttcctacaaaggatatatttgtaaaagaccaaaaattattgatgctaaacctactcatgaattacttacaacaaaagctgacacaaggaagatggacccttctaaaccgtcttccaacgtggccggagtagtcatcattgtgatcctcctgattttaacgggtgctggccttgccgcctatttcttttataagaaaagacgtgtgcacctacctcaagagggcgcctttgaaaacactctgtattttaacagtcagtcaagcccaggaactagtgatatgaaagatctcgtgggcaatattgaacagaatgaacactcggtcatctagtacctcaatgcgattctgagatatttgaatttcataaaattgtaactgaaatttaaaatttttagttcaatgtgattgttttctttaaaatgagtactgaattgtactggtctgtccttttttcctttgcctaattgaagaaataattgcttgttttctagcctggcaagatattttcataaaagagggataacaatgctgattactaccttttaaaatattttagataaatgcacagcaccacagcaccacatctaagcattagtgatgggtagctgatgtcagcttcatgtggattttaagcactctagaaacaatgaagcttcttggcatattttaaggagctcccaaaatgtgttacctattaaattgtaactcagcaagtagaagaccatttgaaaagtcaggtacaaatatcctcaagtggcataaaaatgtagtcagttttctcttttaccagtttttatttccactccaattatttagaactttatttgtacatgtgcagaagaataaggcagctgagaatcttgtttcccccaagagagttttacaggctgagtgttgcaaatgtgttctttgtcctgttatatgtatatcaggaatacaaggatgtgaaataaaactgtaaatttgcataactggatgtacttagataatgtgaaataaacattaaagacaaggtctatttttaata

SEQ ID NO: 128389 - DNA, 1600 bp, Artificial Sequence
  derived and/or modified sequence
gggaacttggattaggtggagaggcagttggggggcctcgttgttttgcgtcttagttccgccctcctgtccatcaggagaaggaaaggataaaccctgggccatgaggctacccctgctcctggtttttgcctctgtcattccgggtgctgttctcctactggacaccaggcaatttttaatctataatgaagatcacaagcgctgcgtggatgcagtgagtcccagtgccgtccaaaccgcagcttgcaaccaggatgccgaatcacagaaattccgatgggtgtccgaatctcagattatgagtgttgcatttaaattatgcctgggagtgccatcaaaaacggactgggttgctatcactctctatgcctgtgactcaaaaagtgaatttcagaaatgggagtgcaaaaatgacacacttttggggatcaaaggagaagatttattttttaactacggcaacagacaagaaaagaatattatgctctacaagggatcgggtttatggagcaggtggaagatctatggaaccacagacaatctgtgctccagaggttatgaagccatgtatacgctactaggcaatgccaatggagcaacctgtgcattcccgttcaagtttgaaaacaagtggtacgcagattgcacgagtgctgggcggtcggatggatggctctggtgcggaaccactactgactatgacacagacaagctatttggatattgtccattgaaatttgagggcagtgaaagcttatggaataaagacccgctgaccagcgtttcctaccagataaactccaaatccgctttaacgtggcaccaggcgaggaaaagctgccaacaacagaacgctgagctcctgagcatcacagagattcatgagcaaacatacctgacaggattaaccagttccttgacctcaggactctggattggacttaacagtctgagcttcaacagcggttggcagtggagtgaccgcagtcctttccgatatttgaactggttaccaggaagtccatcagctgaacctggaaaaagctgtgtgtcactaaatcctggaaaaaatgctaaatgggaaaatctggaatgtgttcagaaactgggctatatttgcaaaaagggcaacaccactttaaattcttttgttattccctcagaaagtgatgtgcctactcactgtcctagtcagtggtggccgtatgccggtcactgttacaagattcacagagatgagaaaaaaatccagagggatgctctgaccacctgcaggaaggaaggcagtgacctcgcaagtatccacaccattgaggaattcgactttattatctcccagctaggatatgagccaaatgacgaattgtggatcggcttaaatgacattaagattcaaatgtactttgagtggagtgatgggacccctgtaacgtttaccaaatggcttcgtggagaaccaagccatgaaaacaacagacaggaggattgtgtggtgatgaaaggcaaggctggagtgcaatggcacaatcttggctcaatgcaacctctgcctcgagagttcaagcgattctcctgcctcagcctcccgagtagctga

SEQ ID NO: 128390 - DNA, 4371 bp, Artificial Sequence
  derived and/or modified sequence
atgcggctgcccctgctgctggtgttcgccagcgtgatccccggcgctgtcctgttgttagacacccgtcagttcctgatttataatgaggatcataaacggtgcgttgacgctgtatcgccttctgccgtgcaaaccgcggcttgtaaccaagatgccgaaagccagaagtttaggtgggtctccgagagtcagatcatgagtgtagcctttaagctgtgcttaggggtgccgtcaaaaacagactgggttgccatcactctctatgcatgcgacagcaaatccgagtttcaaaagtgggagtgcaaaaacgatactttgttaggcatcaaaggcgaagacctctttttcaattatggcaatcgccaggagaagaacatcatgctgtataaaggaagtggtctttggagcagatggaagatctacggcaccaccgataacttatgctcccggggctacgaggcgatgtacaccctcttggggaatgccaatggcgctacttgcgctttcccattcaagttcgagaataagtggtacgctgactgtacatctgctggaaggtctgacggttggctttggtgcggaaccactactgactacgatacagataaactgttcggatattgcccactcaaattcgagggaagcgagagtctttggaacaaagatcccctgacgtctgtgagttatcagattaactccaagtccgccttgacttggcatcaagcacgtaaaagttgtcagcaacagaacgccgagttgttgtcaattaccgagatacatgagcaaacatatctgacaggactgaccagttccctcacttcaggtctttggattgggttgaacagcctgagcttcaattccgggtggcaatggtccgatcgctccccattcaggtatctcaactggcttccagggtctccatctgctgagccaggcaagagctgtgtatctctgaatcccggcaagaacgccaagtgggaaaacctggagtgtgtgcaaaaactcggatatatttgcaaaaagggcaacacgacactcaactctttcgtaatcccaagtgagtctgacgtgcctacccattgccctagtcaatggtggccctatgccggccactgttataagatacatcgggatgaaaaaaaaatacaaagagatgctctaaccacctgcaggaaggagggatccgacctggcatctatccatacaatcgaggagtttgatttcattatcagtcagctaggatatgaaccaaatgacgaattgtggatagggctaaacgatattaaaattcagatgtatttcgaatggtccgacggaacacctgtgacatttaccaagtggcttcgtggggaaccctcccacgagaacaatcgtcaggaggattgcgtggtgatgaagggcaaggacggatattgggctgatcgggggtgcgagtggccacttggctacatttgcaaaatgaaatcccggtcacagggtcctgagattgttgaggtggaaaaagggtgtaggaagggctggaagaagcatcacttttattgttacatgattggccatactcttagcacatttgccgaagctaaccagacctgcaacaatgagaatgcatatctaaccacaatcgaggacaggtatgagcaggcatttttgacttcattcgtgggcttgcgtcccgagaaatatttctggacaggcctgtccgacatccagaccaagggtacattccagtggacgattgaggaagaagtgcgcttcacccattggaactctgacatgccaggacggaaacccggatgtgtggccatgcgcaccgggatcgccggcgggctatgggacgtactcaaatgcgatgaaaaagccaagtttgtctgcaagcactgggccgagggggtgacccacccgccaaaaccaaccactactccagagcctaaatgccccgaagactggggagcctccagtcgcacctccctctgttttaaattgtacgccaagggcaagcatgagaaaaagacctggtttgagagtcgtgatttttgcagagccctcggaggggatcttgcatccattaataataaggaggaacagcaaaccatctggcggctgattacagccagtggatcctatcacaagctgttctggctcggactcacttacggctctcccagtgaggggtttacatggtccgatggcagccccgtgtcttacgagaactgggcctacggagaacccaataactatcagaacgtagagtactgcggtgagttgaagggagatccgaccatgtcttggaatgacattaattgcgagcatctcaataattggatttgtcagatacagaaaggccagacgcccaagcctgagcccactccagctcctcaagataatcccccagttaccgaagacggctgggtgatttacaaggactaccaatactatttttctaaggaaaaggaaaccatggacaatgcccgagcattctgtaagcggaattttggagacctcgtctccattcaaagtgagtctgaaaaaaagttcctctggaaatatgtcaaccggaacgacgcccagtctgcctattttatcggactgctgatttccctggacaaaaagttcgcttggatggacggctccaaggtggactatgtgagctgggcaaccggtgaacccaactttgcaaatgaggatgagaattgcgtcacaatgtattccaattcgggattttggaacgatattaattgcgggtatccgaatgctttcatttgccagagacataactcatccatcaacgccactaccgtgatgcccacaatgcccagcgtcccaagtggctgtaaagagggctggaatttctatagcaacaagtgctttaagatctttgggtttatggaggaggagcgtaaaaactggcaagaggcaaggaaggcctgtataggctttgggggcaacctggtaagcattcaaaacgagaaggaacaagctttccttacctaccatatgaaggactctaccttcagcgcgtggactggactgaacgacgttaatagcgagcatacctttctgtggacagacggtagaggcgtgcactatacaaattgggggaagggctatccgggaggacggagatcttctctatcctatgaagatgccgactgtgtggtgatcataggtggggcaagcaatgaagccggaaagtggatggacgatacctgcgactccaagcgaggatacatttgccagactcgtagcgatccctccctgacaaaccccccagctaccatacagacagatggcttcgtgaaatacggtaaatcatcgtatagtctcatgcgacagaagttccagtggcatgaagccgagacctactgtaaactccacaactcactcatcgcgtcgattctcgatccttatagtaatgcattcgcatggctgcaaatggagacctcaaatgagagagtatggatagcacttaacagcaatctcaccgataatcaatacacttggactgacaagtggcgcgtccgttatactaactgggccgcagacgaacctaaactaaagagcgcctgtgtgtacttggacctggacggatactggaaaacagcccactgtaatgagtccttctacttcttgtgtaagagatcagacgagatccctgctaccgagcctccccagctgcccggccggtgcccagagtctgaccatacggcctggataccctttcacggacattgctactatatcgaaagttcctacactagaaattggggtcaagccagtttggagtgcctgcgcatgggaagcagcctagtatccattgagtcggccgccgaatcttcgttcctatcgtaccgcgttgaaccactcaagagcaagactaatttttggatcggcctcttccgtaatgtggagggcacatggctttggatcaacaattcccccgtttcatttgtgaattggaacactggcgacccttccggcgaaaggaatgactgcgttgctctgcatgccagctcgggcttctggtctaacatccactgctcatcttacaaaggatatatctgtaagaggccaaagattatcgatgctaaacctacacacgaattgctcaccaccaaggcggatactcgtaagatggaccccagtaagcccagctcaaatgtggcgggcgtggttattattgtcattctgctcattcttaccggagctggtctggccgcctattttttctacaagaagcgccgggtgcacctgccacaggagggtgcctttgaaaatacgctgtactttaatagtcagtcttcacccggcacgtctgatatgaaggacttggtgggcaatatagaacagaatgagcactcagtgatttag

SEQ ID NO: 128391 - DNA, 1497 bp, Artificial Sequence
  derived and/or modified sequence
atgcggctgcccctgctgctggtgttcgccagcgtgatccccggcgcagtgctcctgctggacacccgtcagttcctcatctataacgaagaccacaagagatgcgtggatgcagtgtcacccagtgccgtacagacagccgcctgcaaccaagacgctgagagtcagaaatttcgatgggtctccgaatcccaaatcatgtccgtggccttcaagttgtgccttggtgtccctagcaaaaccgattgggtggcgataaccctctacgcatgcgacagcaaatctgaattccagaaatgggaatgcaaaaatgatacacttctgggcatcaagggcgaagatctgttttttaactacggcaacaggcaggaaaaaaatattatgctctataaaggcagtggcttgtggagcaggtggaagatatatggtactacagacaacctctgttctaggggctacgaagccatgtataccctgctcgggaatgccaacggtgcgacctgcgcattccccttcaagttcgagaacaagtggtacgccgattgtacttccgccggaaggtctgatggatggctttggtgtggtaccaccaccgactacgacacagataagctcttcggctattgcccgctaaaatttgaaggctccgagagtctctggaacaaggatcctctgacatctgtgagctatcagatcaattcaaagtccgcccttacatggcaccaggcacgtaaaagctgccagcagcagaatgctgaactcctcagcataacggagattcatgagcagacttacttaaccggattaacctcgtcattgacctcaggtctctggattgggctgaacagcttgtctttcaactctggatggcagtggagcgaccggtctccgttcaggtatctcaactggctcccaggctcaccatctgcagagcctggaaagagttgcgtgtcactgaacccgggtaaaaacgcaaaatgggaaaatctcgaatgtgtgcagaagctcggctacatctgtaaaaaaggtaacaccaccctgaatagttttgtgattccaagtgaatctgacgtccctactcattgcccaagccagtggtggccctatgctggacactgctacaagatccacagggacgagaaaaagattcagcgcgacgctctcacaacgtgtcgtaaggagggtagcgatctcgcatcaatccatacaattgaagagtttgattttattataagtcagctgggctacgaaccaaatgacgagctgtggatcggccttaacgacatcaagatacagatgtactttgagtggtctgacggtacccccgtcacctttacgaaatggctgaggggggaacccagccatgaaaacaatagacaggaagattgcgttgtgatgaagggcaaggctggggtccaatggcataacctcggcagcatgcagccactccctagagagtttaagcgcttctcttgtttaagcctgccgagtagctag

SEQ ID NO: 128392 - DNA, 4371 bp, Artificial Sequence
  derived and/or modified sequence
atgcgactgcctctattgctcgtgttcgcgtccgttatccccggagcggtactgctcctcgacactaggcaattcctgatatataacgaggatcacaaaagatgcgtggatgccgtgtcaccatccgccgtgcagaccgccgcttgtaaccaggatgccgagtcgcagaagttccggtgggtgagtgagagccaaattatgagcgttgcctttaaactgtgcctgggcgtcccatctaagaccgactgggttgccatcaccctatatgcttgtgactccaaaagtgagtttcagaagtgggagtgcaagaatgacaccctcttaggcataaaaggagaagatttgtttttcaattacggcaaccgtcaggaaaagaatataatgttgtataagggctcaggactatggtctcgctggaagatttacggcacaactgataatctgtgttcccggggttatgaagctatgtacacccttctcggtaatgctaacggtgccacatgcgcgttcccgttcaagtttgagaataagtggtatgctgactgcacctcagcaggaaggtcagatgggtggctgtggtgcggcactacgaccgactatgatacagataaactgtttggctattgtccgttgaaattcgaaggatccgagagcttgtggaacaaagatccgcttacatccgttagttatcagatcaatagcaaaagcgcgctgacatggcatcaagctaggaaatcctgccagcaacaaaatgccgaactgctgtccatcacggagatccatgagcaaacatatctcactggcctgacaagttctctgacatcagggctgtggattgggttgaatagccttagcttcaatagcggctggcaatggagtgataggtccccattcagatatctgaattggctcccaggatccccttccgccgaacccggaaagtcctgtgtctccttgaaccccggaaaaaacgcgaagtgggaaaatctggagtgtgtgcagaagctgggctatatatgtaagaagggaaacacaacactcaattccttcgtgatcccaagcgaatcagatgtccctacccattgcccatcccagtggtggccttacgccggacactgttacaagattcatagggacgagaaaaagattcagcgagatgccctgaccacgtgtcgcaaagagggcagtgaccttgcatcaattcacacgatcgaggagtttgattttatcatctcacagctgggttatgagccaaacgatgaactctggattggattgaacgacatcaagatccagatgtactttgagtggagtgacggtaccccagttacttttacaaagtggctgaggggcgagccctcacatgaaaacaataggcaagaggattgcgtggtgatgaaaggcaaagatgggtactgggccgatcggggttgcgaatggccactcggttatatttgcaagatgaaatcccggtcacaggggcctgaaattgtggaagtcgaaaaggggtgccgaaaaggttggaagaaacaccacttctattgctacatgatcggacacaccctgtctacattcgcagaggccaatcagacttgtaacaatgagaatgcatacttaacaacaatagaagaccggtatgagcaggcgtttttgacgagcttcgttggactccggccagaaaaatatttctggaccggactctccgacatccaaacaaaaggtacattccaatggaccattgaggaagaggtgcgttttactcactggaattcagacatgcccggacgcaagcccggttgcgtcgccatgcgcaccggcatagcgggagggctctgggatgttctgaaatgtgacgagaaagccaaatttgtgtgtaagcactgggctgagggagtgactcatcctcccaaacctaccactactcctgaaccaaaatgcccagaagactggggcgcatcctctcggaccagcctttgttttaaactgtatgccaagggcaagcacgaaaaaaagacgtggttcgaatcacgagacttttgccgtgcactgggcggagatctcgcctccatcaataataaggaagagcagcagactatatggcggctgatcacggccagcggaagctaccacaagctgttttggctcggactgacctatggaagcccatctgaaggattcacttggtccgacggtagtccagtgagctacgagaattgggcttatggcgaacctaataactaccagaatgtggagtattgtggtgagctgaaaggcgatccaacgatgtcttggaatgatattaattgcgaacacttgaacaactggatttgccaaatccagaaggggcagacaccaaaacccgagcccacccccgctcctcaggataaccctcctgtaacagaagatggctgggtcatctacaaagactaccagtactacttttctaaggaaaaagagacgatggacaacgcccgtgccttctgcaaacgcaactttggggacctggtgtccattcagtccgaatccgagaaaaaattcttgtggaagtatgtgaatcgcaatgacgcccagagtgcatacttcatcgggctgctcatctcactggataaaaagtttgcatggatggatggctcaaaagtggattacgttagctgggctacgggggagcccaatttcgccaatgaggacgaaaattgcgtcacaatgtattctaacagtgggttttggaacgacatcaattgcggttacccgaatgccttcatttgtcagcggcataactcgtcaataaacgccacaacagttatgcctactatgccgtccgttcccagtggttgtaaggaagggtggaatttttacagtaataagtgttttaaaatcttcggatttatggaagaagaacgcaaaaattggcaagaggctagaaaggcatgcattggttttgggggaaacttagtgtcgatccaaaatgaaaaggagcaagcctttctaacgtaccacatgaaagactccacattcagcgcctggacgggtcttaatgacgtcaatagcgagcacactttcttgtggaccgatggaaggggggtccattacactaattggggaaagggctatcctggcggaagaaggagcagcctgagctacgaagacgccgactgcgtcgtaatcattggaggagctagtaacgaggcagggaaatggatggacgacacatgcgacagtaagcggggatacatctgccaaaccaggtccgatcccagcctcaccaaccccccagctacgattcagacagatggcttcgtaaagtatggtaaaagctcctacagtttgatgagacaaaagttccaatggcatgaggctgagacgtattgtaagctccataactctctcatagcgagcatcttggacccctatagtaacgcatttgcctggctccagatggaaacaagcaacgagagggtctggatcgccctcaatagcaacctgaccgataatcagtatacctggaccgacaagtggcgcgtccggtatactaattgggccgcagacgaacctaaactcaaatccgcttgtgtctatctggacttggatgggtattggaagaccgcgcattgtaatgagtctttctacttcctgtgcaaacgatctgacgagataccagctacagaacctccccagcttcctggcagatgtcctgaatcagatcacaccgcctggattccgttccacgggcactgctattatattgagtccagttacacaagaaactggggtcaggcgagtctcgagtgcctccgcatgggctcctcactggtgagtatcgaaagcgccgctgagtcctctttcttgagctatcgggtggagcctctgaagtcaaaaacaaacttttggataggactgtttcggaatgtcgaaggtacatggctgtggataaacaactcgccagttagttttgtgaattggaacactggcgatccttcaggggagcgcaacgactgtgtggctctgcacgcctcatccggattctggagcaacatccactgctcttcttataaagggtacatctgtaagaggcccaaaatcattgatgcaaagcctacccacgagttgctcacaacaaaggctgacactaggaagatggacccatcaaaaccctcgagtaacgtcgccggtgtggttatcattgttatcctgctaatcctgaccggagctggtctggcagcctactttttttacaagaagagacgggtgcacctgcctcaggaaggtgcctttgaaaatactctgtattttaacagccagtccagccccggaactagcgacatgaaggacctggtaggcaatattgagcaaaatgaacattcagtaatttag

SEQ ID NO: 128393 - DNA, 1497 bp, Artificial Sequence
  derived and/or modified sequence
atgcgccttccgctgctcctggtatttgccagtgtgatacccggtgccgttttgttactagatacccgccagtttctgatatataacgaagaccataagagatgtgtcgatgctgtttcaccatccgctgtacagactgccgcttgcaaccaagatgccgagtcccagaaatttaggtgggtgagtgagagccaaatcatgtccgtcgcctttaagctctgtctgggggttccctctaagaccgactgggtggcaatcacactgtacgcatgcgactctaaatctgagtttcaaaaatgggaatgcaagaatgacacactccttggcatcaagggggaagatctatttttcaactacggcaatcggcaggaaaagaacattatgctctacaaagggtctgggctgtggagtcgatggaagatttatggtactactgacaatctgtgctctcggggttatgaggcgatgtataccctgctggggaatgccaacggagctacctgcgcctttcctttcaagttcgaaaacaagtggtatgcagactgcacatctgcagggcgtagcgacggctggctctggtgcgggactacaactgactacgacactgataagctgtttggatactgccctcttaaattcgaaggctccgaatcactttggaacaaggaccctttaacctctgtttcctaccagataaatagcaaaagcgccctgacatggcatcaggcgagaaaaagctgtcagcagcaaaacgctgagctgctgtctattactgagatccatgaacagacttatctgacagggctaacctcgtccttgacttctggtctgtggattggactgaattctctgtccttcaacagtggctggcagtggagtgaccgctcacctttcagatatttgaactggttgccaggaagcccatccgccgaacctggcaaatcgtgtgtgtccctcaatcccggtaaaaatgccaagtgggagaatctcgagtgtgttcagaagttgggatatatttgcaaaaaggggaatacaaccctcaacagtttcgtcatcccatccgagagcgatgttccgacacactgcccctctcagtggtggccatacgcagggcactgttacaagatccatagagacgaaaagaagatccagcgcgacgctctcactacctgtcgcaaagagggctccgatctagctagtatccacactattgaggaatttgactttattatttcccagttgggatacgaaccaaatgatgaattgtggatcggcttaaacgatatcaaaattcagatgtactttgaatggtctgacggcacacccgtgacttttacaaaatggctgcgcggtgagccgagccacgagaataacaggcaggaagactgtgtcgtgatgaaaggaaaggccggtgttcagtggcacaatctcggatccatgcagcccttgcctagggagttcaaaaggttcagctgcctatctctccccagttcctag

SEQ ID NO: 128394 - DNA, 4371 bp, Artificial Sequence
  derived and/or modified sequence
atgaggctgccgctgctcttagtgttcgctagcgtgatccccggcgccgtcttgctgctggacactagacaattcctcatttacaatgaggaccacaaaagatgtgtggacgcagtctctccttccgcagtccagactgccgcttgcaatcaagacgcggagtcccaaaaattcagatgggtctccgaatcccaaatcatgagcgtggcatttaagctgtgcctgggtgtaccgagcaaaactgactgggttgccattaccctgtatgcctgtgatagtaagagcgagttccagaagtgggagtgtaagaatgacacccttctcggcattaagggcgaggacttattcttcaattatggcaatcggcaagaaaagaacatcatgctgtataagggctcagggctgtggtccaggtggaagatctatggcaccacagataatctgtgctccagaggatacgaggcaatgtacacactgctgggcaacgccaatggcgccacgtgcgcatttccctttaaatttgagaacaaatggtatgcggattgtacatctgcagggcgctcagacggatggctgtggtgtggaaccactactgactacgacacggacaagctgtttggctactgtccactgaagtttgaaggctctgaatccctctggaacaaagatcccctcaccagtgtctcttaccagatcaacagtaagtcagcacttacctggcatcaggcccgcaagagctgccagcagcagaacgcagagctactgtcaatcactgagattcatgaacagacataccttaccgggctaacttcgagcctaacatcagggctctggattggacttaatagcctgtccttcaacagcggctggcaatggtccgaccgttcccccttccgctatctgaactggttgccaggatccccctctgctgagcccggaaagagttgcgtgagcctaaacccgggaaagaacgcaaaatgggaaaatctcgagtgcgtgcagaagttgggatacatttgtaagaagggcaacacaactcttaactcttttgtcatccccagcgagagtgatgttcccacgcactgtccctctcaatggtggccctacgcagggcattgttacaaaatccatagagatgaaaagaagatccagagggatgcccttacgacgtgtcgaaaggaaggtggcgaccttacaagtattcatacgatcgaggagctggacttcatcatcagccagctaggatacgagccaaacgatgagctgtggatcggactgaacgatatcaaaatccaaatgtacttcgaatggagcgatggaacccccgtcacctttaccaaatggttgcgcggagagccctcccatgagaacaaccgccaggaggattgcgtggtgatgaaaggtaaggacggctactgggccgatcgaggctgtgagtggccactagggtacatctgtaagatgaaatctaggagtcaggggccagagattgtcgaggtggagaaggggtgtcgaaagggctggaaaaaacaccacttctactgctatatgataggacatactctaagcactttcgctgaggcgaatcaaacttgcaacaacgagaatgcatacttgacgaccatcgaggaccggtatgagcaggcattcctcacttcctttgtcggcctcaggccggagaagtacttttggaccggtctgagcgacatccagaccaagggcacatttcagtggacaatcgaggaggaggtacggtttactcactggaatagcgacatgcctggtaggaagcccggctgcgtggccatgcggaccgggattgcaggcgggctgtgggatgtgctcaagtgcgacgagaaggccaaattcgtgtgcaaacattgggctgagggagtgacccaccctcctaaacccacaaccactcctgagccaaagtgtcccgaggactggggagcctcctcacgtacaagtctgtgtttcaagctttacgcaaaggggaagcacgaaaagaaaacatggtttgagtctagagatttctgccgcgcgctcggcggagatttagcttccatcaataacaaagaagagcagcagaccatttggcgcctcatcacagcgtctggtagctaccacaagctgttttggctaggcttaacatatggctccccgtcagaggggttcacttggtccgacggatcaccagtttcctacgagaattgggcctacggcgagcctaataattaccagaacgtggaatactgcggtgaactgaaaggggaccccaccatgtcttggaacgatatcaattgtgagcatcttaataattggatctgccagatccagaaaggacagaccccaaagccagagccaactcccgcgccgcaagacaacccccctgtcacagaagacgggtgggtcatctacaaggactatcaatactacttcagcaaggagaaggagaccatggataacgcaagggccttttgtaagcggaattttggcgacctagtatcaatccagtccgagagtgaaaagaaattcctctggaagtacgtgaataggaacgatgcccagtccgcttattttattggattacttatcagcctggataaaaaatttgcctggatggacgggtccaaagtggactatgtgagctgggctactggcgagccaaactttgcaaacgaagatgagaattgcgtcaccatgtattccaattccggtttttggaacgacataaactgtgggtacccaaatgccttcatttgccagcgacataactcctccataaacgccaccaccgtgatgcctaccatgccgtctgtgccctcgggctgtaaagagggctggaatttctatagcaacaagtgctttaagatcttcgggtttatggaagaagaaaggaaaaattggcaagaggctagaaaggcctgtattgggttcggcggaaatttagtctctatccagaatgaaaaagaacaagcctttctaacatatcatatgaaggacagtaccttctctgcatggaccggcctgaacgacgtcaattccgaacatacattcctctggactgatggacggggcgttcactacaccaactggggcaagggatatccaggggggcgccgctccagtctaagctacgaagatgccgactgtgtagtgataatcggaggagcgagcaacgaggccggtaagtggatggatgatacatgtgattccaagcgggggtacatttgtcagaccaggtccgatccttccttgaccaatccacctgccaccatccagacagatggcttcgtgaagtacggaaaatcatcctatagcctgatgaggcagaagttccaatggcacgaggctgagacttattgcaagctgcacaacagcttaattgcttcaatattggacccatacagcaatgcattcgcctggttacagatggaaacatctaacgaacgggtgtggattgcactgaactccaatctcactgataaccagtacacatggacagacaagtggagggtgcgctacaccaactgggcagccgatgagcctaagttaaagagcgcatgtgtctatcttgacttggacggctactggaaaactgcccactgcaatgagagcttttatttcctatgcaagcgatctgacgaaatcccagcgaccgagccccctcagctacctgggaggtgtcccgagagcgatcatacagcttggatcccctttcacggacactgttattacatcgaatcgtcgtacactagaaactggggacaggcttctctggagtgtctgcgcatgggcagttccctcgtgtcaatcgagtcggccgcagagtcctcgttcctgtcataccgtgtcgaacctcttaaaagtaagactaatttctggattggcttatttaggaacgtagagggcacctggctctggatcaataacagtccggtgtccttcgtgaactggaacactggagacccctcaggagaacgtaacgactgtgttgccctccatgcatccagtggcttctggagcaacattcattgcagctcctataagggctacatttgcaaacggcccaagataattgatgccaagcccactcacgagctattgaccactaaagccgatactcggaagatggatccttctaagccaagctccaacgttgccggagtggttatcattgtgatcttgctgattctgactggcgcaggtctggctgcttacttcttctacaagaaaagaagagtacatctcccgcaagaaggagccttcgagaatacactctattttaattcccagtcgagccccgggacatcagacatgaaggatttggttggcaacatcgagcagaacgaacactccgtcatctag

SEQ ID NO: 128395 - DNA, 4371 bp, Artificial Sequence
  derived and/or modified sequence
atgaggctgcccctgctgctggtgtttgccagcgtcatccctggagctgtgctgctgctggacacccggcagttcctgatctacaatgaagaccacaagagatgtgtggatgctgtgagccccagcgctgtgcagacagctgcctgcaaccaggatgctgagagccagaagttccgctgggtgtctgagagccagatcatgtctgtggccttcaagctgtgcctgggcgtgcccagcaagacagactgggtggccatcaccctgtatgcctgtgacagcaagtctgagttccagaagtgggagtgcaagaatgacaccctgctgggcatcaagggagaagatctcttcttcaactacggcaaccggcaggagaagaacatcatgctgtacaagggcagcggcctgtggagccgctggaagatctacggcaccacagacaacctgtgcagccggggctatgaggccatgtacaccctgctgggcaatgccaacggggccacctgtgccttccccttcaagtttgagaacaagtggtacgccgactgcaccagcgctggccgcagtgatggctggctgtggtgtggcaccaccacagattatgacacagacaagctgtttggctactgccccctgaagtttgagggcagcgagagcctgtggaacaaggaccccctgacctctgtgtcctaccagatcaacagcaagagcgccctgacctggcaccaggccaggaagagctgccagcagcagaatgctgagctgctgagcatcacagagatccacgagcagacctacctgaccggcctgaccagcagcctgaccagcggcctgtggattggcctgaacagcctgtccttcaacagcggctggcagtggagcgacaggagccccttccgctacctgaactggctgcccggcagccccagcgctgagcccgggaagagctgtgtgtccctgaaccctgggaagaatgccaagtgggagaacctggagtgtgtgcagaagctgggctacatctgcaagaagggcaacaccaccctgaacagctttgtgatccccagcgagagtgatgtgcccacccactgccccagccagtggtggccctatgccggccactgctacaagatccacagagatgagaagaagatccagagagatgccctgaccacctgcaggaaggagggcggggacctgaccagcatccacaccatcgaggagctggacttcatcatcagccagctgggctatgagcccaatgatgagctgtggattggcctgaatgacatcaagatccagatgtactttgagtggagcgatggcacccctgtgaccttcaccaagtggctgcggggggagcccagccatgagaacaaccggcaggaggactgtgtggtgatgaagggcaaggatggctactgggccgaccggggctgtgagtggcccctgggctacatctgcaagatgaagagccgcagccagggccctgagatcgtggaggtggagaagggctgcaggaagggctggaagaagcaccacttctactgctacatgattggccacaccctgagcacctttgctgaggccaaccagacctgcaacaatgaaaatgcctacctgaccaccattgaagatagatatgagcaggccttcctgaccagctttgtgggcctgcggcctgagaagtacttctggacaggcctgagtgacatccagaccaagggcaccttccagtggaccatcgaggaggaggtgcgcttcacccactggaacagcgacatgcctggcaggaagccaggctgtgtggccatgaggactggaattgctgggggcctgtgggatgtgctgaagtgtgatgagaaggccaagtttgtgtgcaagcactgggccgagggcgtgacccacccccccaagcccaccaccaccccagagcccaagtgcccagaggactggggcgccagcagcaggaccagcctgtgcttcaagctgtatgccaagggcaagcatgagaagaagacctggtttgagagccgggacttctgccgggccctgggcggggacctggccagcatcaacaacaaggaggagcagcagaccatctggaggctcatcacagccagcggcagctaccacaagctgttctggctgggcctgacctacggcagccccagcgagggcttcacctggagcgatggcagccctgtgtcctatgagaactgggcctatggagagcccaacaactaccagaatgtggagtactgtggggagctgaagggggaccccaccatgtcctggaatgacatcaactgtgagcacctgaacaactggatctgccagatccagaagggccagacccccaagccagagcccaccccagccccccaggacaacccccctgtgacagaagatggctgggtgatctacaaggactaccagtactacttcagcaaggagaaggagaccatggacaatgcccgggccttctgcaagaggaactttggagacctggtgtccatccagagcgagagcgagaagaagttcctgtggaagtatgtgaacagaaatgatgcccagagcgcctacttcatcggcctgctgatcagcctggacaagaagtttgcctggatggatggcagcaaggtggactatgtgtcctgggccactggagagcccaactttgccaatgaagatgagaactgtgtgaccatgtacagcaacagcggcttctggaatgacatcaactgtggctacccaaatgccttcatctgccagaggcacaacagcagcatcaatgccaccaccgtgatgcccaccatgcccagcgtgcccagcggctgcaaggagggctggaacttctacagcaacaagtgcttcaagatcttcggcttcatggaggaggagaggaagaactggcaggaggccaggaaggcctgcatcggctttggaggcaacctggtgtccatccagaatgagaaggagcaggccttcctgacctaccacatgaaggacagcaccttcagcgcctggacaggcctgaatgatgtgaacagcgagcacaccttcctgtggacagatggccggggcgtgcactacaccaactggggcaagggctacccaggcggcagaagaagcagcctgtcctatgaagatgctgactgtgtggtgatcatcggcggggccagcaatgaagctgggaagtggatggatgacacctgtgacagcaagaggggctacatctgccagaccaggagtgaccccagcctgaccaaccccccagccaccatccagacagatggctttgtgaagtatggcaagagcagctacagcctgatgaggcagaagttccagtggcatgaagctgagacctactgcaagctgcacaacagcctcatcgccagcatcctggacccctacagcaatgcctttgcctggctgcagatggagaccagcaatgaaagagtgtggatcgccctgaacagcaacctgacagacaaccagtacacctggacagacaagtggagggtgcgctacaccaactgggccgcagatgagcccaagctgaagagcgcctgtgtgtacctggacctggatggctactggaagacagcccactgcaatgaaagcttctacttcctgtgcaagagaagtgatgagatcccagccacagagcccccccagctgcccggccgctgcccagagagtgaccacacagcctggatccccttccacggccactgctactacatcgagagcagctacaccaggaactggggccaggccagcctggagtgcctgaggatgggcagcagcctggtgtccattgaatctgctgctgagagcagcttcctgagctacagagtggagcccctgaagagcaagaccaacttctggattggcctcttcagaaatgtggagggcacctggctgtggatcaacaacagccctgtgtcctttgtgaactggaacacaggagaccccagcggggagagaaatgactgtgtggccctgcacgccagcagcggcttctggagcaacatccactgcagcagctacaagggctacatctgcaagaggcccaagatcattgatgccaagcccacccatgagctgctgaccaccaaggctgacaccaggaagatggaccccagcaagcccagcagcaatgtggccggcgtggtgatcatcgtcatcctgctgatcctgactggagctggcctggccgcctacttcttctacaagaagagaagagtgcacctgccccaggagggcgcctttgagaacaccctgtacttcaacagccagagcagccctggcaccagtgacatgaaggacctggtgggcaacatcgagcagaatgagcacagcgtcatctag

SEQ ID NO: 128396 - DNA, 5171 bp, Artificial Sequence
  derived and/or modified sequence
gggaacttggattaggtggagaggcagttggggggcctcgttgttttgcgtcttagttccgccctcctgtccatcaggagaaggaaaggataaaccctgggccatgaggctacccctgctcctggtttttgcctctgtcattccgggtgctgttctcctactggacaccaggcaatttttaatctataatgaagatcacaagcgctgcgtggatgcagtgagtcccagtgccgtccaaaccgcagcttgcaaccaggatgccgaatcacagaaattccgatgggtgtccgaatctcagattatgagtgttgcatttaaattatgcctgggagtgccatcaaaaacagactgggttgctatcactctctatgcctgtgactcaaaaagtgaatttcagaaatgggagtgcaaaaatgacacacttttggggatcaaaggagaagatttattttttaactacggcaacagacaagaaaagaatattatgctctacaagggatcgggtttatggagcaggtggaagatctatggaaccacagacaatctgtgctccagaggttatgaagccatgtatacgctactaggcaatgccaatggagcaacctgtgcattcccgttcaagtttgaaaacaagtggtacgcagattgcacgagtgctgggcggtcggatggatggctctggtgcggaaccactactgactatgacacagacaagctatttggatattgtccattgaaatttgagggcagtgaaagcttatggaataaagacccgctgaccagcgtttcctaccagataaactccaaatccgctttaacgtggcaccaagcgaggaaaagctgccaacaacagaacgctgagctcctgagcatcacagagatacatgagcaaacatacctgacaggattaaccagttccttgacctcaggactctggattggacttaacagtctgagcttcaacagcggttggcagtggagtgaccgcagtcctttccgatatttgaactggttaccaggaagtccatcagctgaacctggaaaaagctgtgtgtcactaaatcctggaaaaaatgctaaatgggaaaatctggaatgtgttcagaaactgggctatatttgcaaaaagggcaacaccactttaaattcttttgttattccctcagaaagtgatgtgcctactcactgtcctagtcagtggtggccgtatgccggtcactgttacaagattcacagagatgagaaaaaaatccagagggatgctctgaccacctgcaggaaggaaggcggtgacctcacaagtatccacaccatcgaggaattggactttattatctcccagctaggatatgagccaaatgacgaattgtggatcggcttaaatgacattaagattcaaatgtactttgagtggagtgatgggacccctgtaacgtttaccaaatggcttcgtggagaaccaagccatgaaaacaacagacaggaggattgtgtggtgatgaaaggcaaggatgggtactgggcagatcggggctgtgagtggcctcttggctacatctgcaagatgaaatcacgaagccaaggtccagaaatagtggaagtcgaaaaaggctgcaggaaaggctggaaaaaacatcacttttactgctatatgattggacatacgctttcaacatttgcagaagcaaaccaaacctgtaataatgagaatgcttatttaacaactattgaagacagatatgaacaagccttcctgactagtttcgttggcttaaggcctgaaaaatatttctggacaggactttcagatatacaaaccaaagggacttttcagtggaccatcgaggaagaggttcggttcacccactggaattcagatatgccagggcgaaagccagggtgtgttgccatgagaaccgggattgcagggggcttatgggatgttttgaaatgtgatgaaaaggcaaaatttgtgtgcaagcactgggcagaaggagtaacccacccaccgaagcccacgacgactcccgaacccaaatgtccggaggattggggcgccagcagtagaacaagcttgtgtttcaagctgtatgcaaaaggaaaacatgagaagaaaacgtggtttgaatctcgagatttttgtcgagctctgggtggagacttagctagcatcaataacaaagaggaacagcaaacaatatggcgattaataacagctagtggaagctaccacaaactgttttggttgggattgacatatggaagcccttcagaaggttttacttggagtgatggttctcctgtttcatatgaaaactgggcttatggagaacctaataattatcaaaatgttgaatactgtggtgagctgaaaggtgaccctactatgtcttggaatgatattaattgtgaacaccttaacaactggatttgccagatacaaaaaggacaaacaccaaaacctgagccaacaccagctcctcaagacaatccaccagttactgaagatgggtgggttatttacaaagactaccagtattatttcagcaaagagaaggaaaccatggacaatgcgcgagcgttttgcaagaggaattttggtgatcttgtttctattcaaagtgaaagtgaaaagaagtttctatggaaatatgtaaacagaaatgatgcacagtctgcatattttattggtttattgatcagcttggataaaaagtttgcttggatggatggaagcaaagtggattacgtgtcttgggccacaggtgaacccaattttgcaaatgaagatgaaaactgtgtgaccatgtattcaaattcagggttttggaatgacattaactgtggctatccaaacgccttcatttgccagcgacataacagtagtatcaatgctaccacagttatgcctaccatgccctcggtcccatcagggtgcaaggaaggttggaatttctacagcaacaagtgtttcaaaatctttggatttatggaagaagaaagaaaaaattggcaagaggcacgaaaagcttgtataggctttggagggaatctggtctccatacaaaatgaaaaagagcaagcatttcttacctatcacatgaaggactccactttcagtgcctggactgggctgaatgatgtcaattcagaacacacgttcctttggacggatggacgaggagtccattacacaaactgggggaaaggttaccctggtggaagaagaagcagtctttcttatgaagatgctgactgtgttgttattattggaggtgcatcaaatgaagcaggaaaatggatggatgatacctgcgacagtaaacgaggctacatatgccagacacgatccgacccttccttgactaatcctccagcaacgattcaaacagatggctttgttaaatatggcaaaagcagctattcactcatgagacaaaaatttcaatggcatgaagcggagacatactgcaagcttcacaattcccttatagccagcattctggatccctacagtaatgcatttgcgtggctgcagatggaaacatctaatgaacgtgtgtggatcgccctgaacagtaacttgactgataatcaatacacttggactgataagtggagggtgaggtacactaactgggctgctgatgagcccaaattgaaatcagcatgtgtttatctggatcttgatggctactggaagacagcacattgcaatgaaagtttttactttctctgtaaaagatcagatgaaatccctgctactgaacccccacaactgcctggcagatgcccggagtcagatcacacagcatggattcctttccatggtcactgttactatattgagtcctcatatacaagaaactggggccaagcttctctggaatgtcttcgaatgggttcctctctggtttccattgaaagtgctgcagaatccagttttctgtcatatcgggttgagccacttaaaagtaaaaccaatttttggataggattgttcagaaatgttgaagggacgtggctgtggataaataacagtccggtctcctttgtcaactggaacacaggagatccctctggtgaacggaatgattgtgtagctttacatgcgtcttctgggttttggagtaatattcactgttcatcctacaaaggatatatttgtaaaagaccaaaaattattgatgctaaacctactcatgaattacttacaacaaaagctgacacaaggaagatggacccttctaaaccgtcttccaacgtggccggagtagtcatcattgtgatcctcctgattttaacgggtgctggccttgccgcctatttcttttataagaaaagacgtgtgcacctacctcaagagggcgcctttgaaaacactctgtattttaacagtcagtcaagcccaggaactagtgatatgaaagatctcgtgggcaatattgaacagaatgaacactcggtcatctagtacctcaatgcgattctgagatatttgaatttcataaaattgtaactgaaatttaaaatttttagttcaatgtgattgttttctttaaaatgagtactgaattgtactggtctgtccttttttcctttgcctaattgaagaaataattgcttgttttctagcctggcaagatattttcataaaagagggataacaatgctgattactaccttttaaaatattttagataaatgcacagcaccacagcaccacatctaagcattagtgatgggtagctgatgtcagcttcatgtggattttaagcactctagaaacaatgaagcttcttggcatattttaaggagctcccaaaatgtgttacctattaaattgtaactcagcaagtagaagaccatttgaaaagtcaggtacaaatttcctcaagtggcataaaaatgtagtcagttttctcttttaccagtttttatttccactccaattatttagaactttatttgtacatgtgcagaagaataaggcagctgagaatcttgtttcccccaagagagttttacaggctgagtgttgcaaatgtgttctttgtcctgttatatgtatatcaggaatacaaggatgtgaaataaaactgtaaatttgcataactggatgtacttagataatgtgaaataaacattaaagacaaggtctatttttaata

SEQ ID NO: 128397 - DNA, 4371 bp, Artificial Sequence
  derived and/or modified sequence
atgcggctgcccctgctgctggtgttcgccagcgtgatccccggcgcggtgctgctgcttgacactaggcagttccttatttacaatgaggatcacaaacgatgtgtagacgcagtgagcccatctgccgtgcagacggccgcttgtaaccaggatgctgagtcccagaaattccgctgggtgagcgagtcacagattatgagtgtggccttcaagctgtgtctgggagtgccatcaaaaaccgattgggtagcaattacactgtatgcctgtgacagcaaaagtgagtttcagaagtgggagtgcaagaacgacaccctattgggtatcaaaggagaagacctctttttcaactatggaaaccgccaggaaaaaaacattatgctgtataagggcagcggcttgtggtcccggtggaagatctatggtaccaccgataacctgtgctcccgcggttacgaagccatgtacacactgctcggaaacgccaatggcgctacttgtgccttcccattcaagtttgagaataaatggtacgctgactgcacctccgcaggcagaagtgacggatggctgtggtgtggtactaccacggactatgacaccgacaagctgttcggctattgtcctcttaaattcgaggggagtgagtcgctgtggaataaagatccactaacatctgtgagttatcaaattaactccaagtcagccctcacatggcaccaagcacgcaagtcctgtcagcagcagaatgccgaactcctgagtattacggagatccacgagcaaacatatctaaccggactgacatcatccctgactagtggcctctggatcggcttaaactctctcagtttcaatagtggatggcagtggtcagatcgaagccccttccgatacctaaattggctgcctggatctccaagcgcagaaccgggcaaatcctgtgtgtcactcaatccagggaaaaatgctaaatgggagaaccttgaatgcgtgcagaagctggggtatatttgtaagaaaggcaacaccactctgaactccttcgtgataccaagtgaatcagatgtgcctacacattgcccgtcacagtggtggccgtacgctggacactgctacaagattcatagagacgagaaaaaaatacaacgcgacgcgctcacaacttgcaggaaggaggggggggacctcacgagtatccatactatagaggagctcgatttcatcatatctcagctgggctatgaacccaacgatgaactctggatcggcctcaacgatattaagatccagatgtactttgaatggtcggatggcacgcccgtgaccttcacaaagtggctgcgcggagagccgagccacgaaaataataggcaggaggactgcgttgttatgaagggcaaagacggatactgggcggaccgtggatgcgagtggccgctaggatatatttgcaaaatgaaaagcaggtcccagggccccgaaatagttgaagtggaaaaaggctgtaggaaaggctggaagaagcatcacttttactgctatatgatcgggcatactcttagtacgttcgccgaagctaatcaaacctgcaacaatgagaatgcttacttaaccactatcgaagatagatatgaacaggccttcctgactagttttgttgggctgaggccggagaagtacttctggactggcctatctgatatacagaccaaggggacttttcagtggacaattgaggaggaagtgcggtttactcactggaacagtgatatgcctgggaggaagcctgggtgcgttgccatgcgtacaggaatcgcaggaggcctgtgggacgtattgaagtgtgacgaaaaagctaagtttgtctgcaaacactgggcggagggggtgacacaccccccgaaacccactactactcccgagccaaaatgcccggaagattggggcgcatcctctaggacctcattatgctttaaattgtatgccaaagggaaacacgaaaagaagacttggttcgagagtagggacttttgccgcgcactcgggggtgacctggccagcattaataataaggaggagcagcagacaatatggcggctcattactgctagcggatcctaccacaagctattttggctcggactgacctacggatcacccagcgaagggttcacctggagtgacggctctcctgtgtcctatgaaaattgggcatatggagaaccaaacaactaccaaaatgtagaatactgtggcgagctcaaaggagatcccaccatgtcttggaatgacatcaactgcgaacacctgaacaattggatctgccagatccagaagggacagacccccaagcccgagcctacacctgccccacaggacaacccgcccgtcaccgaagacggctgggtgatttataaagactaccagtactactttagcaaggaaaaagagacaatggacaacgccagagctttctgtaagcgaaacttcggggatctggtgtcaattcagtcagaatcagagaaaaagtttttatggaagtacgtgaaccgcaacgatgcacagagcgcttattttataggcctactcatcagcctggacaaaaagtttgcgtggatggacggcagcaaggtggattacgtctcatgggccacaggcgagccaaatttcgccaacgaggatgaaaattgcgtcacgatgtactcaaacagtggcttctggaacgatatcaattgtgggtatcccaacgctttcatttgtcagagacataattcgtccatcaacgccacgaccgtcatgcccactatgccctccgtgccgagtggttgtaaggaaggctggaacttttactcaaacaaatgttttaagatcttcggttttatggaagaggagagaaaaaactggcaggaggctcgcaaggcttgcattggttttggcggcaatcttgttagcattcagaatgagaaggaacaagctttcctaacgtaccacatgaaagactctactttcagcgcctggactggactgaacgacgtaaacagtgagcatacattcctttggactgacgggagaggtgtccattacacaaattggggtaagggctatcctggcggccgccgtagttcgctttcctatgaggacgcagactgcgtggtgattataggaggggcatcgaacgaagcgggtaagtggatggacgacacctgcgattctaaacggggatatatttgccaaacacgtagcgatcccagcttgaccaatcccccagccacaattcagactgatgggttcgtaaagtatggcaagtctagctacagcttgatgaggcagaaatttcagtggcatgaagccgagacatactgtaagctgcataacagtctcatcgcttccatcctggacccatacagtaacgctttcgcttggcttcagatggagacgtccaatgaaagagtgtggattgcattgaacagtaaccttacggacaatcagtatacgtggacagataagtggagggtgcggtacacgaattgggccgcggatgaaccaaagctgaaatccgcctgcgtgtatctagacctggatggctattggaaaaccgcacactgtaacgagtctttttattttctgtgtaaaaggtcggacgaaatcccggccaccgagcctcctcagctgcccggacgttgcccagaatctgaccacactgcctggatccccttccatggacactgctattatattgaatctagttatacgcggaattggggccaagcatctctggagtgcctgaggatgggttccagtctggtgtcaatcgagagtgctgccgagtcctcctttttatcttatcgcgtcgaacctctgaagagtaagaccaacttctggatcggcctgttccgaaacgtggagggcacttggctgtggatcaataattcccccgtcagcttcgtcaattggaacactggcgatccgagcggcgagagaaatgattgcgtcgccctccacgcgtcttccggcttttggtcaaacatccactgttctagttataaggggtacatatgcaagagacctaagattattgacgctaagcccacccacgagttgctgactacaaaggctgacacgcgtaagatggatccatcaaaaccctccagcaacgtcgcgggtgtggtgatcatagtgatcctcctgatccttacaggcgcagggcttgccgcttactttttttataaaaaacggcgcgtgcacttgcctcaggagggggcgttcgaaaacacactatatttcaatagccagtcttccccagggacctcagatatgaaggacctggtggggaacatagagcaaaacgagcattccgtaatctag

SEQ ID NO: 128398 - DNA, 4371 bp, Artificial Sequence
  derived and/or modified sequence
atgcgtctgcctctgctgctggtttttgctagcgttatcccaggcgctgttcttctgttagacacccggcagtttctaatttacaacgaagaccataaaagatgtgtggacgccgtgagtccctccgccgtacaaacagccgcatgtaaccaggacgccgaatcacaaaaattcaggtgggtttcggagtcacagattatgtccgtggccttcaagctgtgccttggcgtgccatcaaaaactgactgggtggcaattacactgtatgcctgcgattccaagtcagagttccaaaaatgggaatgtaaaaatgacactctgctgggcattaaaggagaggatctctttttcaactatggcaacagacaagagaaaaacatcatgttgtataagggctcaggcctgtggtcccgttggaagatctacgggactaccgataacttatgcagtcggggatacgaagcaatgtacactctgctgggtaacgcaaacggagccacctgcgcatttccttttaagttcgaaaacaagtggtatgcggactgtacatcggcaggaaggtctgacggctggctgtggtgcggtaccactacagattacgatactgataagctgttcggatattgccctctcaaatttgaaggctcggagtcactgtggaataaagaccccttaactagcgtgtcttatcagatcaatagcaagtctgctctgacctggcaccaggcccgaaaatcttgtcaacaacagaacgctgagttactctccataaccgagattcatgaacagacctacttaacgggcctgactagtagtctgaccagcggcctctggattggcctgaactctctgagttttaactctggctggcaatggtctgatcggtcccccttccgttatctcaactggttgccaggcagcccgtctgccgagccagggaagtcttgtgtgtctttgaaccctggcaaaaacgccaaatgggagaaccttgagtgcgtccagaagctgggctacatttgtaagaaaggcaatacgaccctcaattccttcgtgattccctctgaatctgatgtcccaactcattgccctagccagtggtggccgtacgccggacactgctataaaattcacagggatgagaaaaaaatccaacgtgacgcactgacaacatgtagaaaagaaggaggcgatctgacatcaatacatactatcgaggaactggattttattatctcacagcttggctacgagcctaatgatgaactgtggatcggacttaatgacattaagatccagatgtatttcgaatggagcgatggcacaccagtaacctttacaaaatggctgcgcggtgaacccagccatgagaataatcgccaagaggactgcgtggtgatgaaaggaaaggatggatactgggccgatcggggttgcgagtggccattgggctacatttgcaagatgaagagccgaagtcaaggacctgagattgtggaggtagaaaaggggtgcagaaaaggatggaagaaacaccatttttattgttacatgattggccacaccctaagtacattcgctgaggctaaccaaacctgcaacaatgagaacgcctacctgacgactatcgaggacagatacgaacaggccttcttgacttcgtttgtgggactgaggccagagaagtatttttggacgggactgagcgatattcagactaaaggcaccttccagtggaccatcgaagaggaggtcaggtttacccactggaacagcgacatgcccggacgaaagcctggctgcgtcgccatgcgtaccggcatcgctggagggctctgggacgttcttaagtgtgatgaaaaggccaaatttgtgtgtaagcattgggctgaaggagttacccacccgccaaaacccacgaccacacccgagccaaagtgccccgaggattggggcgcatcatcccgtacgagcctgtgtttcaagctgtatgccaaaggcaagcacgaaaagaaaacctggtttgagtccagagacttttgtcgggctctgggcggagatctggcctctatcaataacaaagaagagcagcagactatctggaggctgattacggcgtcaggatcataccacaagctgttctggctgggattgacatacggttccccctctgagggattcacgtggtccgacggctcccccgtttcctatgaaaactgggcatacggagaacccaataattatcagaatgtcgagtattgtggggagctcaaaggagacccaaccatgagctggaatgacattaattgtgaacatctgaacaattggatatgtcagatccagaaaggccagacaccgaaacccgagcctacccctgccccacaagataatccccctgtgacagaggacggctgggtgatctataaggattaccaatactacttctccaaagaaaaggaaacaatggacaacgccagagccttctgcaagcggaactttggggacctggtgagcatccagagcgagagcgaaaagaagtttctttggaaatacgtcaataggaacgacgcacagagcgcttacttcatcggcctcctcatcagtttggacaagaagttcgcctggatggacggttccaaggtcgactatgttagctgggcgacgggggaaccaaattttgccaacgaggacgagaattgtgttactatgtacagtaactcagggttctggaacgatatcaattgtggttatccaaacgcattcatatgccagcgtcataatagttcaattaatgcaaccacggttatgcctacaatgccatctgtgccgagcggatgtaaagaagggtggaatttttattccaacaaatgttttaagatttttggattcatggaggaggagcgcaagaactggcaggaggcccgtaaagcttgcatcggatttgggggaaatcttgtgagcatccagaatgagaaagagcaggcgttcctgacgtaccacatgaaggattctacattcagcgcatggacaggattaaatgacgtcaacagtgaacacactttcctgtggacagatggaagaggtgtgcactataccaactggggtaaaggttaccctggtggaaggagatcaagtctgtcttacgaggacgcggattgcgtggtcattattgggggtgcaagcaatgaagccggtaaatggatggatgatacttgtgacagtaaacgtgggtacatatgccaaactcggtcagacccatcgctgaccaaccctccagctaccattcagaccgacggtttcgtcaagtacggcaaatccagttattccctgatgcgccaaaaattccagtggcatgaggccgagacatactgcaagttgcataattctctgattgcctctattttggatccttacagtaacgcctttgcctggctccaaatggaaaccagcaatgaacgggtttggattgctctgaattcaaaccttaccgataatcagtacacctggacagacaaatggcgtgttaggtacaccaactgggcggctgatgagcccaagttgaaatctgcctgtgtttatctggacctagatggatactggaagactgcgcattgtaacgagtcattttacttcttatgcaaacgctcagatgaaatccccgcaactgaaccgccacagctcccgggaaggtgcccggagagcgaccacaccgcctggattccctttcacggacactgttactatatcgagagctcttatactcgaaactggggccaagcctctttagagtgcttgcggatgggctcttcactcgtgtccatagagagtgctgccgagtcttccttcctatcttatcgcgtggaacccctgaagtccaagacgaatttttggatcgggctgttccgcaacgtggaggggacctggctgtggatcaacaattctcctgtgagcttcgtgaactggaatacaggggatccatcgggggagcgaaatgattgcgtggcgctgcatgcatccagtgggttctggagcaacatccactgctctagctacaagggttatatctgcaaaagacctaagatcatagacgctaagcccacccacgaacttctgacaacaaaagccgacaccaggaagatggatccatccaagcccagctcaaatgtagctggggtggttatcatcgtaatcttgttgatcttaacgggcgctgggttagcagcctacttcttctacaagaaaagacgggtccacctgccacaggaaggcgcattcgaaaacacactgtattttaactctcagtcttcccctggaacctccgatatgaaagacttggttggtaacatcgagcagaatgaacacagtgtgatctag

SEQ ID NO: 128399 - DNA, 4371 bp, Artificial Sequence
  derived and/or modified sequence
atgagactgcccctgctgctggtgttcgccagcgtgatccccggcgccgtgctgctgctggacaccagacagttcctgatctacaacgaggaccacaagagatgcgtggacgccgtgagccccagcgccgtgcagaccgccgcctgcaaccaggacgccgagagccagaagttcagatgggtgagcgagagccagatcatgagcgtggccttcaagctgtgcctgggcgtgcccagcaagaccgactgggtggccatcaccctgtacgcctgcgacagcaagagcgagttccagaagtgggagtgcaagaacgacaccctgctgggcatcaagggcgaggacctgttcttcaactacggcaacagacaggagaagaacatcatgctgtacaagggcagcggcctgtggagcagatggaagatctacggcaccaccgacaacctgtgcagcagaggctacgaggccatgtacaccctgctgggcaacgccaacggcgccacctgcgccttccccttcaagttcgagaacaagtggtacgccgactgcaccagcgccggcagaagcgacggctggctgtggtgcggcaccaccaccgactacgacaccgacaagctgttcggctactgccccctgaagttcgagggcagcgagagcctgtggaacaaggaccccctgaccagcgtgagctaccagatcaacagcaagagcgccctgacctggcaccaggccagaaagagctgccagcagcagaacgccgagctgctgagcatcaccgagatccacgagcagacctacctgaccggcctgaccagcagcctgaccagcggcctgtggatcggcctgaacagcctgagcttcaacagcggctggcagtggagcgacagaagccccttcagatacctgaactggctgcccggcagccccagcgccgagcccggcaagagctgcgtgagcctgaaccccggcaagaacgccaagtgggagaacctggagtgcgtgcagaagctgggctacatctgcaagaagggcaacaccaccctgaacagcttcgtgatccccagcgagagcgacgtgcccacccactgccccagccagtggtggccctacgccggccactgctacaagatccacagagacgagaagaagatccagagagacgccctgaccacctgcagaaaggagggcggcgacctgaccagcatccacaccatcgaggagctggacttcatcatcagccagctgggctacgagcccaacgacgagctgtggatcggcctgaacgacatcaagatccagatgtacttcgagtggagcgacggcacccccgtgaccttcaccaagtggctgagaggcgagcccagccacgagaacaacagacaggaggactgcgtggtgatgaagggcaaggacggctactgggccgacagaggctgcgagtggcccctgggctacatctgcaagatgaagagcagaagccagggccccgagatcgtggaggtggagaagggctgcagaaagggctggaagaagcaccacttctactgctacatgatcggccacaccctgagcaccttcgccgaggccaaccagacctgcaacaacgagaacgcctacctgaccaccatcgaggacagatacgagcaggccttcctgaccagcttcgtgggcctgagacccgagaagtacttctggaccggcctgagcgacatccagaccaagggcaccttccagtggaccatcgaggaggaggtgagattcacccactggaacagcgacatgcccggcagaaagcccggctgcgtggccatgagaaccggcatcgccggcggcctgtgggacgtgctgaagtgcgacgagaaggccaagttcgtgtgcaagcactgggccgagggcgtgacccacccccccaagcccaccaccacccccgagcccaagtgccccgaggactggggcgccagcagcagaaccagcctgtgcttcaagctgtacgccaagggcaagcacgagaagaagacctggttcgagagcagagacttctgcagagccctgggcggcgacctggccagcatcaacaacaaggaggagcagcagaccatctggagactgatcaccgccagcggcagctaccacaagctgttctggctgggcctgacctacggcagccccagcgagggcttcacctggagcgacggcagccccgtgagctacgagaactgggcctacggcgagcccaacaactaccagaacgtggagtactgcggcgagctgaagggcgaccccaccatgagctggaacgacatcaactgcgagcacctgaacaactggatctgccagatccagaagggccagacccccaagcccgagcccacccccgccccccaggacaacccccccgtgaccgaggacggctgggtgatctacaaggactaccagtactacttcagcaaggagaaggagaccatggacaacgccagagccttctgcaagagaaacttcggcgacctggtgagcatccagagcgagagcgagaagaagttcctgtggaagtacgtgaacagaaacgacgcccagagcgcctacttcatcggcctgctgatcagcctggacaagaagttcgcctggatggacggcagcaaggtggactacgtgagctgggccaccggcgagcccaacttcgccaacgaggacgagaactgcgtgaccatgtacagcaacagcggcttctggaacgacatcaactgcggctaccccaacgccttcatctgccagagacacaacagcagcatcaacgccaccaccgtgatgcccaccatgcccagcgtgcccagcggctgcaaggagggctggaacttctacagcaacaagtgcttcaagatcttcggcttcatggaggaggagagaaagaactggcaggaggccagaaaggcctgcatcggcttcggcggcaacctggtgagcatccagaacgagaaggagcaggccttcctgacctaccacatgaaggacagcaccttcagcgcctggaccggcctgaacgacgtgaacagcgagcacaccttcctgtggaccgacggcagaggcgtgcactacaccaactggggcaagggctaccccggcggcagaagaagcagcctgagctacgaggacgccgactgcgtggtgatcatcggcggcgccagcaacgaggccggcaagtggatggacgacacctgcgacagcaagagaggctacatctgccagaccagaagcgaccccagcctgaccaacccccccgccaccatccagaccgacggcttcgtgaagtacggcaagagcagctacagcctgatgagacagaagttccagtggcacgaggccgagacctactgcaagctgcacaacagcctgatcgccagcatcctggacccctacagcaacgccttcgcctggctgcagatggagaccagcaacgagagagtgtggatcgccctgaacagcaacctgaccgacaaccagtacacctggaccgacaagtggagagtgagatacaccaactgggccgccgacgagcccaagctgaagagcgcctgcgtgtacctggacctggacggctactggaagaccgcccactgcaacgagagcttctacttcctgtgcaagagaagcgacgagatccccgccaccgagcccccccagctgcccggcagatgccccgagagcgaccacaccgcctggatccccttccacggccactgctactacatcgagagcagctacaccagaaactggggccaggccagcctggagtgcctgagaatgggcagcagcctggtgagcatcgagagcgccgccgagagcagcttcctgagctacagagtggagcccctgaagagcaagaccaacttctggatcggcctgttcagaaacgtggagggcacctggctgtggatcaacaacagccccgtgagcttcgtgaactggaacaccggcgaccccagcggcgagagaaacgactgcgtggccctgcacgccagcagcggcttctggagcaacatccactgcagcagctacaagggctacatctgcaagagacccaagatcatcgacgccaagcccacccacgagctgctgaccaccaaggccgacaccagaaagatggaccccagcaagcccagcagcaacgtggccggcgtggtgatcatcgtgatcctgctgatcctgaccggcgccggcctggccgcctacttcttctacaagaagagaagagtgcacctgccccaggagggcgccttcgagaacaccctgtacttcaacagccagagcagccccggcaccagcgacatgaaggacctggtgggcaacatcgagcagaacgagcacagcgtgatctag

SEQ ID NO: 128400 - protein, 1137 aa, Artificial Sequence
  derived and/or modified sequence
MSRRKPASGGLAASSSAPARQAVLSRFFQSTGSLKSTSSSTGAADQVDPGAAAAAAAAAAAAPPAPPAPAFPPQLPPHIATEIDRRKKRPLENDGPVKKKVKKVQQKEGGSDLGMSGNSEPKKCLRTRNVSKSLEKLKEFCCDSALPQSRVQTESLQERFAVLPKCTDFDDISLLHAKNAVSSEDSKRQINQKDTTLFDLSQFGSSNTSHENLQKTASKSANKRSKSIYTPLELQYIEMKQQHKDAVLCVECGYKYRFFGEDAEIAARELNIYCHLDHNFMTASIPTHRLFVHVRRLVAKGYKVGVVKQTETAALKAIGDNRSSLFSRKLTALYTKSTLIGEDVNPLIKLDDAVNVDEIMTDTSTSYLLCISENKENVRDKKKGNIFIGIVGVQPATGEVVFDSFQDSASRSELETRMSSLQPVELLLPSALSEQTEALIHRATSVSVQDDRIRVERMDNIYFEYSHAFQAVTEFYAKDTVDIKGSQIISGIVNLEKPVICSLAAIIKYLKEFNLEKMLSKPENFKQLSSKMEFMTINGTTLRNLEILQNQTDMKTKGSLLWVLDHTKTSFGRRKLKKWVTQPLLKLREINARLDAVSEVLHSESSVFGQIENHLRKLPDIERGLCSIYHKKCSTQEFFLIVKTLYHLKSEFQAIIPAVNSHIQSDLLRTVILEIPELLSPVEHYLKILNEQAAKVGDKTELFKDLSDFPLIKKRKDEIQGVIDEIRMHLQEIRKILKNPSAQYVTVSGQEFMIEIKNSAVSCIPTDWVKVGSTKAVSRFHSPFIVENYRHLNQLREQLVLDCSAEWLDFLEKFSEHYHSLCKAVHHLATVDCIFSLAKVAKQGDYCRPTVQEERKIVIKNGRHPVIDVLLGEQDQYVPNNTDLSEDSERVMIITGPNMGGKSSYIKQVALITIMAQIGSYVPAEEATIGIVDGIFTRMGAADNIYKGQSTFMEELTDTAEIIRKATSQSLVILDELGRGTSTHDGIAIAYATLEYFIRDVKSLTLFVTHYPPVCELEKNYSHQVGNYHMGFLVSEDESKLDPGAAEQVPDFVTFLYQITRGIAARSYGLNVAKLADVPGEILKKAAHKSKELEGLINTKRKRLKYFAKLWTMHNAQDLQKWTEEFNMEETQTSLLH

SEQ ID NO: 128401 - protein, 1128 aa, Artificial Sequence
  derived and/or modified sequence
MSRRKPASGGLAASSSAPARQAVLSRFFQSTGSLKSTSSSTGAADQVDPGAAAAAAPPAPAFPPQLPPHIATEIDRRKKRPLENDGPVKKKVKKVQQKEGGSDLGMSGNSEPKKCLRTRNVSKSLEKLKEFCCDSALPQSRVQTESLQERFAVLPKCTDFDDISLLHAKNAVSSEDSKRQINQKDTTLFDLSQFGSSNTSHENLQKTASKSANKRSKSIYTPLELQYIEMKQQHKDAVLCVECGYKYRFFGEDAEIAARELNIYCHLDHNFMTASIPTHRLFVHVRRLVAKGYKVGVVKQTETAALKAIGDNRSSLFSRKLTALYTKSTLIGEDVNPLIKLDDAVNVDEIMTDTSTSYLLCISENKENVRDKKKGNIFIGIVGVQPATGEVVFDSFQDSASRSELETRMSSLQPVELLLPSALSEQTEALIHRATSVSVQDDRIRVERMDNIYFEYSHAFQAVTEFYAKDTVDIKGSQIISGIVNLEKPVICSLAAIIKYLKEFNLEKMLSKPENFKQLSSKMEFMTINGTTLRNLEILQNQTDMKTKGSLLWVLDHTKTSFGRRKLKKWVTQPLLKLREINARLDAVSEVLHSESSVFGQIENHLRKLPDIERGLCSIYHKKCSTQEFFLIVKTLYHLKSEFQAIIPAVNSHIQSDLLRTVILEIPELLSPVEHYLKILNEQAAKVGDKTELFKDLSDFPLIKKRKDEIQGVIDEIRMHLQEIRKILKNPSAQYVTVSGQEFMIEIKNSAVSCIPTDWVKVGSTKAVSRFHSPFIVENYRHLNQLREQLVLDCSAEWLDFLEKFSEHYHSLCKAVHHLATVDCIFSLAKVAKQGDYCRPTVQEERKIVIKNGRHPVIDVLLGEQDQYVPNNTDLSEDSERVMIITGPNMGGKSSYIKQVALITIMAQIGSYVPAEEATIGIVDGIFTRMGAADNIYKGQSTFMEELTDTAEIIRKATSQSLVILDELGRGTSTHDGIAIAYATLEYFIRDVKSLTLFVTHYPPVCELEKNYSHQVGNYHMGFLVSEDESKLDPGAAEQVPDFVTFLYQITRGIAARSYGLNVAKLADVPGEILKKAAHKSKELEGLINTKRKRLKYFAKLWTMHNAQDLQKWTEEFNMEETQTSLLH

SEQ ID NO: 128402 - DNA, 3414 bp, Artificial Sequence
  derived and/or modified sequence
atgagcagaagaaagcccgccagcggcggcctggccgccagcagcagcgcccccgccagacaggccgtgctgagcagattcttccagagcaccggcagcctgaagagcaccagcagcagcaccggcgccgccgaccaggtggaccccggcgccgccgccgccgccgccgccgccgccgccgccgccccccccgccccccccgcccccgccttccccccccagctgcccccccacatcgccaccgagatcgacagaagaaagaagagacccctggagaacgacggccccgtgaagaagaaggtgaagaaggtgcagcagaaggagggcggcagcgacctgggcatgagcggcaacagcgagcccaagaagtgcctgagaaccagaaacgtgagcaagagcctggagaagctgaaggagttctgctgcgacagcgccctgccccagagcagagtgcagaccgagagcctgcaggagagattcgccgtgctgcccaagtgcaccgacttcgacgacatcagcctgctgcacgccaagaacgccgtgagcagcgaggacagcaagagacagatcaaccagaaggacaccaccctgttcgacctgagccagttcggcagcagcaacaccagccacgagaacctgcagaagaccgccagcaagagcgccaacaagagaagcaagagcatctacacccccctggagctgcagtacatcgagatgaagcagcagcacaaggacgccgtgctgtgcgtggagtgcggctacaagtacagattcttcggcgaggacgccgagatcgccgccagagagctgaacatctactgccacctggaccacaacttcatgaccgccagcatccccacccacagactgttcgtgcacgtgagaagactggtggccaagggctacaaggtgggcgtggtgaagcagaccgagaccgccgccctgaaggccatcggcgacaacagaagcagcctgttcagcagaaagctgaccgccctgtacaccaagagcaccctgatcggcgaggacgtgaaccccctgatcaagctggacgacgccgtgaacgtggacgagatcatgaccgacaccagcaccagctacctgctgtgcatcagcgagaacaaggagaacgtgagagacaagaagaagggcaacatcttcatcggcatcgtgggcgtgcagcccgccaccggcgaggtggtgttcgacagcttccaggacagcgccagcagaagcgagctggagaccagaatgagcagcctgcagcccgtggagctgctgctgcccagcgccctgagcgagcagaccgaggccctgatccacagagccaccagcgtgagcgtgcaggacgacagaatcagagtggagagaatggacaacatctacttcgagtacagccacgccttccaggccgtgaccgagttctacgccaaggacaccgtggacatcaagggcagccagatcatcagcggcatcgtgaacctggagaagcccgtgatctgcagcctggccgccatcatcaagtacctgaaggagttcaacctggagaagatgctgagcaagcccgagaacttcaagcagctgagcagcaagatggagttcatgaccatcaacggcaccaccctgagaaacctggagatcctgcagaaccagaccgacatgaagaccaagggcagcctgctgtgggtgctggaccacaccaagaccagcttcggcagaagaaagctgaagaagtgggtgacccagcccctgctgaagctgagagagatcaacgccagactggacgccgtgagcgaggtgctgcacagcgagagcagcgtgttcggccagatcgagaaccacctgagaaagctgcccgacatcgagagaggcctgtgcagcatctaccacaagaagtgcagcacccaggagttcttcctgatcgtgaagaccctgtaccacctgaagagcgagttccaggccatcatccccgccgtgaacagccacatccagagcgacctgctgagaaccgtgatcctggagatccccgagctgctgagccccgtggagcactacctgaagatcctgaacgagcaggccgccaaggtgggcgacaagaccgagctgttcaaggacctgagcgacttccccctgatcaagaagagaaaggacgagatccagggcgtgatcgacgagatcagaatgcacctgcaggagatcagaaagatcctgaagaaccccagcgcccagtacgtgaccgtgagcggccaggagttcatgatcgagatcaagaacagcgccgtgagctgcatccccaccgactgggtgaaggtgggcagcaccaaggccgtgagcagattccacagccccttcatcgtggagaactacagacacctgaaccagctgagagagcagctggtgctggactgcagcgccgagtggctggacttcctggagaagttcagcgagcactaccacagcctgtgcaaggccgtgcaccacctggccaccgtggactgcatcttcagcctggccaaggtggccaagcagggcgactactgcagacccaccgtgcaggaggagagaaagatcgtgatcaagaacggcagacaccccgtgatcgacgtgctgctgggcgagcaggaccagtacgtgcccaacaacaccgacctgagcgaggacagcgagagagtgatgatcatcaccggccccaacatgggcggcaagagcagctacatcaagcaggtggccctgatcaccatcatggcccagatcggcagctacgtgcccgccgaggaggccaccatcggcatcgtggacggcatcttcaccagaatgggcgccgccgacaacatctacaagggccagagcaccttcatggaggagctgaccgacaccgccgagatcatcagaaaggccaccagccagagcctggtgatcctggacgagctgggcagaggcaccagcacccacgacggcatcgccatcgcctacgccaccctggagtacttcatcagagacgtgaagagcctgaccctgttcgtgacccactacccccccgtgtgcgagctggagaagaactacagccaccaggtgggcaactaccacatgggcttcctggtgagcgaggacgagagcaagctggaccccggcgccgccgagcaggtgcccgacttcgtgaccttcctgtaccagatcaccagaggcatcgccgccagaagctacggcctgaacgtggccaagctggccgacgtgcccggcgagatcctgaagaaggccgcccacaagagcaaggagctggagggcctgatcaacaccaagagaaagagactgaagtacttcgccaagctgtggaccatgcacaacgcccaggacctgcagaagtggaccgaggagttcaacatggaggagacccagaccagcctgctgcactag

SEQ ID NO: 128403 - DNA, 3387 bp, Artificial Sequence
  derived and/or modified sequence
atgagcagaagaaagcccgccagcggcggcctggccgccagcagcagcgcccccgccagacaggccgtgctgagcagattcttccagagcaccggcagcctgaagagcaccagcagcagcaccggcgccgccgaccaggtggaccccggcgccgccgccgccgccgccccccccgcccccgccttccccccccagctgcccccccacatcgccaccgagatcgacagaagaaagaagagacccctggagaacgacggccccgtgaagaagaaggtgaagaaggtgcagcagaaggagggcggcagcgacctgggcatgagcggcaacagcgagcccaagaagtgcctgagaaccagaaacgtgagcaagagcctggagaagctgaaggagttctgctgcgacagcgccctgccccagagcagagtgcagaccgagagcctgcaggagagattcgccgtgctgcccaagtgcaccgacttcgacgacatcagcctgctgcacgccaagaacgccgtgagcagcgaggacagcaagagacagatcaaccagaaggacaccaccctgttcgacctgagccagttcggcagcagcaacaccagccacgagaacctgcagaagaccgccagcaagagcgccaacaagagaagcaagagcatctacacccccctggagctgcagtacatcgagatgaagcagcagcacaaggacgccgtgctgtgcgtggagtgcggctacaagtacagattcttcggcgaggacgccgagatcgccgccagagagctgaacatctactgccacctggaccacaacttcatgaccgccagcatccccacccacagactgttcgtgcacgtgagaagactggtggccaagggctacaaggtgggcgtggtgaagcagaccgagaccgccgccctgaaggccatcggcgacaacagaagcagcctgttcagcagaaagctgaccgccctgtacaccaagagcaccctgatcggcgaggacgtgaaccccctgatcaagctggacgacgccgtgaacgtggacgagatcatgaccgacaccagcaccagctacctgctgtgcatcagcgagaacaaggagaacgtgagagacaagaagaagggcaacatcttcatcggcatcgtgggcgtgcagcccgccaccggcgaggtggtgttcgacagcttccaggacagcgccagcagaagcgagctggagaccagaatgagcagcctgcagcccgtggagctgctgctgcccagcgccctgagcgagcagaccgaggccctgatccacagagccaccagcgtgagcgtgcaggacgacagaatcagagtggagagaatggacaacatctacttcgagtacagccacgccttccaggccgtgaccgagttctacgccaaggacaccgtggacatcaagggcagccagatcatcagcggcatcgtgaacctggagaagcccgtgatctgcagcctggccgccatcatcaagtacctgaaggagttcaacctggagaagatgctgagcaagcccgagaacttcaagcagctgagcagcaagatggagttcatgaccatcaacggcaccaccctgagaaacctggagatcctgcagaaccagaccgacatgaagaccaagggcagcctgctgtgggtgctggaccacaccaagaccagcttcggcagaagaaagctgaagaagtgggtgacccagcccctgctgaagctgagagagatcaacgccagactggacgccgtgagcgaggtgctgcacagcgagagcagcgtgttcggccagatcgagaaccacctgagaaagctgcccgacatcgagagaggcctgtgcagcatctaccacaagaagtgcagcacccaggagttcttcctgatcgtgaagaccctgtaccacctgaagagcgagttccaggccatcatccccgccgtgaacagccacatccagagcgacctgctgagaaccgtgatcctggagatccccgagctgctgagccccgtggagcactacctgaagatcctgaacgagcaggccgccaaggtgggcgacaagaccgagctgttcaaggacctgagcgacttccccctgatcaagaagagaaaggacgagatccagggcgtgatcgacgagatcagaatgcacctgcaggagatcagaaagatcctgaagaaccccagcgcccagtacgtgaccgtgagcggccaggagttcatgatcgagatcaagaacagcgccgtgagctgcatccccaccgactgggtgaaggtgggcagcaccaaggccgtgagcagattccacagccccttcatcgtggagaactacagacacctgaaccagctgagagagcagctggtgctggactgcagcgccgagtggctggacttcctggagaagttcagcgagcactaccacagcctgtgcaaggccgtgcaccacctggccaccgtggactgcatcttcagcctggccaaggtggccaagcagggcgactactgcagacccaccgtgcaggaggagagaaagatcgtgatcaagaacggcagacaccccgtgatcgacgtgctgctgggcgagcaggaccagtacgtgcccaacaacaccgacctgagcgaggacagcgagagagtgatgatcatcaccggccccaacatgggcggcaagagcagctacatcaagcaggtggccctgatcaccatcatggcccagatcggcagctacgtgcccgccgaggaggccaccatcggcatcgtggacggcatcttcaccagaatgggcgccgccgacaacatctacaagggccagagcaccttcatggaggagctgaccgacaccgccgagatcatcagaaaggccaccagccagagcctggtgatcctggacgagctgggcagaggcaccagcacccacgacggcatcgccatcgcctacgccaccctggagtacttcatcagagacgtgaagagcctgaccctgttcgtgacccactacccccccgtgtgcgagctggagaagaactacagccaccaggtgggcaactaccacatgggcttcctggtgagcgaggacgagagcaagctggaccccggcgccgccgagcaggtgcccgacttcgtgaccttcctgtaccagatcaccagaggcatcgccgccagaagctacggcctgaacgtggccaagctggccgacgtgcccggcgagatcctgaagaaggccgcccacaagagcaaggagctggagggcctgatcaacaccaagagaaagagactgaagtacttcgccaagctgtggaccatgcacaacgcccaggacctgcagaagtggaccgaggagttcaacatggaggagacccagaccagcctgctgcactag

SEQ ID NO: 128404 - DNA, 3414 bp, Artificial Sequence
  derived and/or modified sequence
atgagcaggagaaaacccgcctccgggggattagccgcaagttccagtgcccccgcgaggcaagcagtgttatcccgtttttttcagtctaccggcagccttaaaagtacttcctcatccacaggtgcagctgatcaggtggatccgggcgcagctgcagccgctgccgcggctgccgccgccgcccctccagcaccacctgctccagcctttccacctcagctccccccgcacatcgctacagagattgatcgcagaaagaaaagaccactggagaatgacggtcctgtaaagaaaaaggtcaagaaggtgcagcagaaggaaggcgggagcgacctcggtatgagcggtaactccgagcctaagaaatgcctgcgaacaaggaacgtgtccaaaagtctggagaagcttaaagagttttgctgcgacagtgcattaccccagtctcgggttcagaccgagtcactgcaagagcgttttgccgtgctcccaaaatgtaccgatttcgatgatatctcactgctccatgcaaagaatgccgtgtcttcggaggactcaaaacgccaaattaatcaaaaagataccaccttgttcgatctgtctcagttcgggtccagcaacacctcacatgaaaacctgcagaagacagccagcaaatctgccaacaaacggtccaaatctatatacacccctttagagctccaatatattgaaatgaagcagcagcataaggatgcagtcttgtgtgtggaatgcggatataagtacaggttctttggcgaggatgcggagattgcggcgagagaactgaacatctattgtcacctagaccacaatttcatgacagcgtcaatacctacccaccgcttgttcgtccatgtacggagattagtggctaaagggtataaggtgggggtcgtgaaacagaccgaaactgcagctctgaaagccattggtgataacaggtcttcccttttttccaggaagctcaccgcactgtatacaaaatctacacttatcggcgaagacgtcaaccccctgattaaactagacgatgccgtgaacgtggatgaaatcatgacagatacaagtactagctacttattgtgcatctccgagaacaaagagaatgtccgagataaaaagaaaggtaatattttcatcgggatcgtcggagtacagccggcgaccggagaggtcgtcttcgatagtttccaagactccgcaagtagatctgaactggaaacaagaatgtcctccctgcaacccgtggagcttctgctgccttccgccttgtctgagcagaccgaggctctgattcatagagccaccagcgtcagtgtccaggacgatcgtattagggttgagaggatggataacatctacttcgaatactctcacgccttccaggccgtgactgaattttatgcaaaagatactgtcgacatcaaaggcagccagataattagcggtattgtgaacctagaaaagcctgtgatctgcagtctggctgccatcataaagtacctgaaggagttcaaccttgagaaaatgctgagtaaaccggaaaattttaaacagttgtcttcgaaaatggaatttatgaccatcaacggcaccaccctgcggaatttggagatcttgcaaaaccagacggacatgaaaaccaaagggagtctcctgtgggtgctcgaccacacaaagacaagttttggccggcggaagctgaagaagtgggtcactcagcccctccttaagctgcgggagatcaacgcgcggttagacgcggtgtccgaggtcttacatagcgagtcatctgtgttcggacagattgaaaaccatctccgtaaactgcccgacatcgaacgggggctctgctcaatataccataagaaatgttctacccaggaattcttcttgattgttaaaactctgtaccacctgaaatctgagttccaggccatcatcccagcggtgaacagccacatccagtccgatcttctcaggacggtgatcttggagatccctgagctcctgagtccggtggaacattaccttaagatattgaacgagcaagcagccaaggtcggtgacaaaaccgagctcttcaaagaccttagcgattttccacttatcaagaagaggaaagatgagattcagggggtgatcgatgagatccggatgcacctgcaggaaatcaggaaaatcctcaagaatccatcggcacagtatgtcaccgtttcaggacaagagtttatgatcgaaatcaagaatagtgctgtatcctgcatcccaacagattgggtgaaggtaggaagcacgaaagccgtgagccgctttcactctccctttatcgttgagaattatcgacatctgaatcagcttcgtgaacagcttgttctcgactgttccgccgagtggttagattttttggaaaagttcagtgagcattaccatagcctttgtaaggccgtgcaccatctggctacagtggattgcattttctcccttgcaaaagtcgccaagcagggagattattgccgacccactgtgcaggaagagaggaaaatcgtgatcaaaaatgggagacaccctgtaattgatgtcctgctgggcgagcaggatcagtacgtacctaataacaccgatctgagtgaggatagcgagagagtcatgattataacaggccctaacatgggagggaagtcatcctacattaagcaggtcgctcttattaccattatggctcagattggatcatacgtacccgcagaggaagctacaatcgggatcgtggacggtattttcacgcggatgggagcggccgataacatctacaagggccagtccacatttatggaggagctgactgacaccgctgaaatcatacggaaggcaacatctcaaagtctagtgatcttagatgagctaggccggggaactagcacacatgatggaattgcaattgcgtacgcgacccttgagtactttatccgcgatgttaaatcactgactctgtttgttacgcactacccacccgtctgcgagctggaaaagaattattctcaccaagttggtaattatcatatgggatttcttgtgtctgaagatgaaagcaaattggaccccggggccgcagagcaggtacccgacttcgttacatttttgtaccaaataacgaggggtattgccgcacggagctacggcctgaacgtggccaaattagcagatgtcccaggcgagatcctgaagaaggctgcacacaaatcgaaagagctggagggactgatcaatacaaagagaaagcgcttaaaatacttcgccaaactgtggacaatgcacaacgcacaagacctccaaaaatggaccgaagaattcaacatggaagagactcagacgtcgctattgcactag

SEQ ID NO: 128405 - DNA, 3387 bp, Artificial Sequence
  derived and/or modified sequence
atgtccagaagaaaacctgcctctggcggcctggccgccagtagtagcgcacccgctcgtcaagccgtgcttagccgcttctttcagtcaacagggagtctgaaatctaccagtagttccactggggccgccgaccaggttgatccaggcgcagccgctgctgcagcccccccagcaccagcttttccaccacagttaccgcctcatatagcaaccgaaatagaccggcgcaaaaaacgtcctctggagaacgatggacccgtgaaaaagaaggtcaaaaaagttcagcaaaaagagggcggatctgacttaggcatgagtggcaattctgaacccaagaaatgtttgaggaccaggaacgtgtcaaagtccctggagaagctgaaagaattttgctgtgatagtgctctgccccagtctagagtacaaactgagtcactgcaggagaggtttgctgtcctacctaagtgtacggacttcgacgacattagtcttctgcacgcaaagaacgccgtatcatcagaagactctaagaggcaaattaaccagaaggatacgacgctgttcgatctgtctcagttcggatcatctaacacatctcatgagaacttgcaaaaaaccgcctctaaatcagccaataagagaagtaagtctatttacacccctctggaactgcagtacattgagatgaaacaacaacacaaagatgcggtgctgtgtgttgagtgcggatataagtaccgcttttttggggaagatgctgaaattgccgcaagggagctcaatatctattgccatctggatcataacttcatgactgccagcataccaactcacagattattcgtccacgttcgacggctcgtagcaaagggctacaaggtcggcgtggtcaaacagacagagactgccgcacttaaggccatcggcgataaccgttcatccctcttcagtcggaaattgacagccttgtatacaaagtctacactgattggagaagacgtgaaccctctgattaagcttgacgacgctgtgaatgtggatgagatcatgactgacactagtacttcatatctgctttgtatctctgagaataaggaaaacgtgagggacaagaaaaagggcaatattttcataggaattgtgggggtgcagccggcaaccggtgaggtcgtctttgatagcttccaggacagcgcctcccgatctgagctagagaccaggatgagcagtctgcagccagtggagctgctgctgccgtccgctctttctgagcagaccgaggccctgattcatagagctacctcagtgagtgttcaggacgaccgaatccgagtagaacggatggacaacatttactttgaatactctcacgccttccaggccgtgaccgaattttacgctaaggacacagtggatatcaaaggctcgcagatcattagtgggatcgtaaatctggaaaagcccgttatctgcagcctggccgccatcatcaagtacctgaaggagttcaacctcgagaagatgctgtcaaagcccgaaaattttaagcaactctctagtaaaatggaattcatgaccataaacggcacaaccctcagaaatcttgagattttgcagaatcagacagatatgaaaaccaagggctcacttctatgggttttagaccataccaagacctcgtttggacggaggaagcttaaaaaatgggttacccagccattgcttaaacttagagagattaacgcacggcttgatgcagtgtccgaagtcttgcactctgagtcctccgtttttgggcaaatcgaaaatcacctccgcaaactgcctgacatcgaacgaggcctttgttccatttatcacaagaagtgttccacacaagaattctttctgatcgtgaaaacactttatcacctcaaaagcgaatttcaggctatcattcccgcagtgaattcacacatccagagcgacctgctgaggactgtgatactcgagatccccgagttgttgagccccgtcgaacactaccttaagatcctgaatgagcaggctgctaaagtgggagacaaaacagagctgttcaaagatctgagcgatttccccctcatcaagaagaggaaagacgagatccagggagtgattgatgagataagaatgcatctacaggaaataaggaaaatactgaaaaacccatctgctcaatacgtgacagtctccggccaggagtttatgattgaaattaaaaacagtgctgttagctgcatccctaccgattgggtcaaggtcggaagtacaaaggcagttagccggtttcactccccttttattgtggagaattaccgccacctgaatcagctgagagaacagcttgtattggactgctccgccgagtggctggatttcttggaaaaatttagtgagcattaccactcactctgtaaggcggtgcaccacttggctactgtggattgcattttcagtctcgccaaggtggccaaacagggagattattgccgcccgacggttcaggaggagcggaaaatcgtgattaagaatggtagacaccccgtgatcgacgttctgttaggagaacaagatcagtatgtccctaacaatactgatctgagtgaagatagcgagagggtcatgatcatcacaggacccaatatgggagggaaatcctcttacattaagcaggtcgcactgattaccatcatggcccagatcggaagctacgtgccggcagaagaagcgacaatcggcatcgtggacggcatattcacccgaatgggtgctgccgataacatttacaagggccagagcacctttatggaagaattaaccgataccgcagaaatcatacgcaaggccactagccagtccctcgtcatactagatgagttaggaagggggacatccacacatgacgggattgccattgcctatgctacattggaatatttcatccgcgatgtgaagagtctgactcttttcgtgacacactacccccccgtttgtgagctggaaaagaactacagtcatcaggtgggcaactatcatatgggattcctggtatccgaagacgagagcaagctcgatccaggagctgccgaacaggtgcctgactttgtgaccttcttatatcagattactcgtggaatcgcagcaaggagctatggactcaacgtcgccaagctcgccgacgtgcctggtgagattctgaaaaaggccgcccacaaaagcaaggaattagaaggcctcatcaatacaaaacgtaagaggcttaagtatttcgcaaaactgtggactatgcacaacgctcaggacctccagaagtggacagaggagtttaacatggaggagactcagacctcactcctccactag

SEQ ID NO: 128406 - DNA, 3414 bp, Artificial Sequence
  derived and/or modified sequence
atgagcaggaggaagccagccagcggcggcctggccgccagcagcagcgccccagcccggcaggccgtgctgagccgcttcttccagagcacaggcagcctgaagagcaccagcagcagcactggagctgctgaccaggtggaccctggagctgctgctgctgctgctgctgctgctgctgctgcccccccagcccccccagccccagccttccccccccagctgcccccccacatcgccacagaaattgacaggaggaagaagaggcccctggagaatgatggccctgtgaagaagaaggtgaagaaggtgcagcagaaggagggcggcagtgacctgggcatgagcggcaacagcgagcccaagaagtgcctgcggaccagaaatgtgtccaagagcctggagaagctgaaggagttctgctgtgacagcgccctgccccagagccgggtgcagacagagagcctgcaggagagatttgctgtgctgcccaagtgcacagactttgatgacatcagcctgctgcacgccaagaatgctgtgtcctctgaggacagcaagaggcagatcaaccagaaggacaccaccctgtttgacctgagccagtttggcagcagcaacaccagccatgagaacctgcagaagacagccagcaagagcgccaacaagaggagcaagagcatctacacccccctggagctgcagtacatcgagatgaagcagcagcacaaggatgctgtgctgtgtgtggagtgtggctacaagtaccgcttctttggagaagatgctgagattgctgcccgggagctgaacatctactgccacctggaccacaacttcatgacagccagcatccccacccaccggctgtttgtgcacgtgcggcggctggtggccaagggctacaaggtgggcgtggtgaagcagacagaaacagctgccctgaaggccatcggggacaacagaagcagcctcttcagcaggaagctgacagccctgtacaccaagagcaccctcatcggggaggatgtgaaccccctcatcaagctggatgatgctgtgaatgtggatgagatcatgacagacaccagcaccagctacctgctgtgcatcagcgagaacaaggaaaatgtgcgggacaagaagaagggcaacatcttcatcggcatcgtgggcgtgcagcctgccactggagaggtggtgtttgacagcttccaggacagcgccagccgctctgagctggagaccaggatgagcagcctgcagcctgtggagctgctgctgcccagcgccctgtctgagcagacagaggccctgatccaccgggccacctctgtgtctgtgcaggatgaccgcatccgggtggagaggatggacaacatctactttgagtacagccacgccttccaggccgtgacagagttctacgccaaggacacagtggacatcaagggcagccagatcatcagcggcatcgtgaacctggagaagcctgtgatctgcagcctggccgccatcatcaagtacctgaaggagttcaacctggagaagatgctgagcaagccagagaacttcaagcagctgagcagcaagatggagttcatgaccatcaatggcaccaccctgaggaacctggagatcctgcagaaccagacagacatgaagaccaagggcagcctgctgtgggtgctggaccacaccaagaccagctttggaagaaggaagctgaagaagtgggtgacccagcccctgctgaagctgcgggagatcaatgcccggctggatgctgtgtctgaggtgctgcacagcgagagctctgtgtttggccagatcgagaaccacctgaggaagctgcctgacatcgagcggggcctgtgcagcatctaccacaagaagtgcagcacccaggagttcttcctgattgtgaagaccctgtaccacctgaagtctgagttccaggccatcatcccagctgtgaacagccacatccagagcgacctgctgaggacagtcatcctggagatccctgagctgctgagccctgtggagcactacctgaagatcctgaatgagcaggccgccaaggtgggggacaagacagagctgttcaaggacctgagtgacttccccctcatcaagaagaggaaggatgagatccagggcgtgattgatgagatccgcatgcacctgcaggagatcaggaagatcctgaagaaccccagcgcccagtatgtgacagtgtctggccaggagttcatgattgagatcaagaacagcgctgtgtcctgcatccccacagactgggtgaaggtgggcagcaccaaggctgtgagccgcttccacagccccttcatcgtggagaactaccgccacctgaaccagctgcgggagcagctggtgctggactgcagcgctgagtggctggacttcctggagaagttcagcgagcactaccacagcctgtgcaaggctgtgcaccacctggccaccgtggactgcatcttcagcctggccaaggtggccaagcagggcgactactgccggcccaccgtgcaggaggagaggaagatcgtcatcaagaatggccgccaccctgtgattgatgtgctgctgggggagcaggaccagtatgtgcccaacaacacagacctgtctgaggacagcgagcgggtgatgatcatcaccggccccaacatgggcggcaagagcagctacatcaagcaggtggccctgatcaccatcatggcccagatcggcagctatgtgcctgctgaggaggccaccatcggcatcgtggatggcatcttcaccaggatgggcgctgctgacaacatctacaagggccagagcaccttcatggaggagctgacagacacagctgagatcatcaggaaggccaccagccagagcctggtgatcctggatgagctgggccggggcaccagcacccatgatggcatcgccatcgcctatgccaccctggagtacttcatcagagatgtgaagagcctgaccctgtttgtgacccactacccacctgtgtgtgagctggagaagaactacagccaccaggtgggcaactaccacatgggcttcctggtgtctgaagatgagagcaagctggaccctggagctgctgagcaggtgcctgactttgtgaccttcctgtaccagatcacccggggcattgctgcccggagctatggcctgaatgtggccaagctggctgatgtgcctggagagatcctgaagaaggccgcccacaagagcaaggagctggagggcctcatcaacaccaagaggaagaggctgaagtactttgccaagctgtggaccatgcacaatgcccaggacctgcagaagtggacagaggagttcaacatggaggagacccagaccagcctgctgcactag

SEQ ID NO: 128407 - DNA, 3387 bp, Artificial Sequence
  derived and/or modified sequence
atgagcaggaggaagccagccagcggcggcctggccgccagcagcagcgccccagcccggcaggccgtgctgagccgcttcttccagagcacaggcagcctgaagagcaccagcagcagcactggagctgctgaccaggtggaccctggagctgctgctgctgctgcccccccagccccagccttccccccccagctgcccccccacatcgccacagaaattgacaggaggaagaagaggcccctggagaatgatggccctgtgaagaagaaggtgaagaaggtgcagcagaaggagggcggcagtgacctgggcatgagcggcaacagcgagcccaagaagtgcctgcggaccagaaatgtgtccaagagcctggagaagctgaaggagttctgctgtgacagcgccctgccccagagccgggtgcagacagagagcctgcaggagagatttgctgtgctgcccaagtgcacagactttgatgacatcagcctgctgcacgccaagaatgctgtgtcctctgaggacagcaagaggcagatcaaccagaaggacaccaccctgtttgacctgagccagtttggcagcagcaacaccagccatgagaacctgcagaagacagccagcaagagcgccaacaagaggagcaagagcatctacacccccctggagctgcagtacatcgagatgaagcagcagcacaaggatgctgtgctgtgtgtggagtgtggctacaagtaccgcttcttcggggaggatgctgagattgctgcccgggagctgaacatctactgccacctggaccacaacttcatgacagccagcatccccacccaccggctgtttgtgcacgtgcggcggctggtggccaagggctacaaggtgggcgtggtgaagcagacagaaacagctgccctgaaggccatcggggacaacagaagcagcctcttcagcaggaagctgacagccctgtacaccaagagcaccctgattggagaagatgtgaaccccctcatcaagctggatgatgctgtgaatgtggatgagatcatgacagacaccagcaccagctacctgctgtgcatcagcgagaacaaggaaaatgtgcgggacaagaagaagggcaacatcttcatcggcatcgtgggcgtgcagcctgccaccggggaggtggtgtttgacagcttccaggacagcgccagccgctctgagctggagaccaggatgagcagcctgcagcctgtggagctgctgctgcccagcgccctgtctgagcagacagaggccctgatccaccgggccacctctgtgtctgtgcaggatgaccgcatccgggtggagaggatggacaacatctactttgagtacagccacgccttccaggccgtgacagagttctacgccaaggacacagtggacatcaagggcagccagatcatctctggaattgtgaacctggagaagcctgtgatctgcagcctggccgccatcatcaagtacctgaaggagttcaacctggagaagatgctgagcaagccagagaacttcaagcagctgagcagcaagatggagttcatgaccatcaatggcaccaccctgaggaacctggagatcctgcagaaccagacagacatgaagaccaagggcagcctgctgtgggtgctggaccacaccaagaccagctttggccgcaggaagctgaagaagtgggtgacccagcccctgctgaagctgcgggagatcaatgcccggctggatgctgtgtctgaggtgctgcacagcgagagctctgtgtttggccagatcgagaaccacctgaggaagctgcctgacatcgagcggggcctgtgcagcatctaccacaagaagtgcagcacccaggagttcttcctgattgtgaagaccctgtaccacctgaagtctgagttccaggccatcatcccagctgtgaacagccacatccagagcgacctgctgaggacagtcatcctggagatccctgagctgctgagccctgtggagcactacctgaagatcctgaatgagcaggccgccaaggtgggggacaagacagagctgttcaaggacctgagtgacttccccctcatcaagaagaggaaggatgagatccagggcgtgattgatgagatccgcatgcacctgcaggagatcaggaagatcctgaagaaccccagcgcccagtatgtgacagtgtctggccaggagttcatgattgagatcaagaacagcgctgtgtcctgcatccccacagactgggtgaaggtgggcagcaccaaggctgtgagccgcttccacagccccttcatcgtggagaactaccgccacctgaaccagctgcgggagcagctggtgctggactgcagcgctgagtggctggacttcctggagaagttcagcgagcactaccacagcctgtgcaaggctgtgcaccacctggccaccgtggactgcatcttcagcctggccaaggtggccaagcagggcgactactgccggcccaccgtgcaggaggagaggaagatcgtcatcaagaatggccgccaccctgtgattgatgtgctgctgggggagcaggaccagtatgtgcccaacaacacagacctgtctgaagattctgagcgggtgatgatcatcaccggccccaacatgggcggcaagagcagctacatcaagcaggtggccctgatcaccatcatggcccagatcggcagctatgtgcctgctgaggaggccaccatcggcatcgtggatggcatcttcaccaggatgggcgctgctgacaacatctacaagggccagagcaccttcatggaggagctgacagacacagctgagatcatcaggaaggccaccagccagagcctggtgatcctggatgagctgggccggggcaccagcacccatgatggcatcgccatcgcctatgccaccctggagtacttcatcagagatgtgaagagcctgaccctgtttgtgacccactacccacctgtgtgtgagctggagaagaactacagccaccaggtgggcaactaccacatgggcttcctggtgtctgaagatgagagcaagctggaccccggggctgctgagcaggtgcctgactttgtgaccttcctgtaccagatcacccggggcattgctgcccggagctatggcctgaatgtggccaagctggctgatgtgcctggagagatcctgaagaaggccgcccacaagagcaaggagctggagggcctcatcaacaccaagaggaagaggctgaagtactttgccaagctgtggaccatgcacaatgcccaggacctgcagaagtggacagaggagttcaacatggaggagacccagaccagcctgctgcactag

SEQ ID NO: 128408 - DNA, 3414 bp, Artificial Sequence
  derived and/or modified sequence
atgagccggcggaagcccgccagcggcggcctggccgccagcagcagtgctcccgccaggcaggccgtcctatcaaggttctttcagtccacaggaagtctaaagtccacttccagctccactggcgccgccgatcaggtggacccaggagctgcagccgctgccgccgctgccgcggcagccgccccacctgcaccccccgcacccgctttcccaccccaactccccccccacattgctaccgagattgataggcgcaagaaacgacccctcgagaacgacgggcctgtgaagaagaaggtcaagaaagtgcagcagaaagagggaggtagcgaccttggtatgagcggaaattcagaacccaagaaatgcttaaggaccaggaatgtaagcaaaagtctagaaaagctaaaggagttctgctgcgacagcgcactgccgcagtcccgggttcagacagaatccctgcaggagcgcttcgccgtgctgcctaaatgcacagactttgacgacatctctctgttacacgctaagaatgccgtttcctccgaagactccaagcgccagattaaccagaaggacacgaccctgtttgacctttcccaattcggttcttctaatacgagccatgagaatctccaaaaaaccgcgagcaaaagcgcaaataaaaggtctaagtctatctatactcccctggagctccagtacatcgagatgaagcagcaacacaaggatgcagttctctgcgtcgaatgcggttacaagtaccgctttttcggtgaggacgccgagatcgccgctcgagagttgaacatatactgtcacctggaccacaatttcatgactgcctcaattcccacccaccgacttttcgtgcatgttagaagacttgtagcaaaaggatacaaggtgggggtagttaaacaaacagaaactgctgctctgaaggccataggagataatcggagctcactcttctcacggaaactgacagctctctatacaaagtccacgctgatcggagaagacgtgaatccacttatcaaactggacgacgctgtgaacgtggatgaaatcatgactgacacgtccacatcctatctgctctgcatcagcgagaacaaggaaaatgtgcgcgacaagaaaaaagggaacatctttataggaattgttggcgtccagccagccactggcgaggtcgtctttgactcatttcaggattctgcctctcggagcgagcttgaaacccggatgagctcactccagcctgtcgaattacttcttccgtccgccctgtcagaacagacggaagcactcattcacagagctactagcgtgtccgtacaggacgacaggatacgcgtggaaaggatggacaatatttactttgagtatagtcacgctttccaggctgtcactgaattttacgctaaagatactgtagacataaaggggtcccaaatcatcagtgggattgtaaatcttgagaaacctgtaatatgttcgctggctgctatcattaagtatctgaaagagttcaatctggagaaaatgttgtcgaagcccgaaaacttcaagcagttatcttcgaaaatggagtttatgaccataaacggaaccacactccgaaatcttgaaatcttgcagaatcaaacagatatgaaaaccaaaggatctctcctctgggtgctggatcatacgaagacatctttcggacgcagaaagctaaagaagtgggtaacccagccgcttctaaaactgagagagatcaacgcgcgcctagatgccgtttcagaagtccttcattctgagagttccgtttttggccagatcgaaaaccacctccgaaagctccctgatatcgagcggggcctctgctcaatctatcataagaagtgtagcactcaggagttttttctaattgtgaagacactttaccacctgaaaagtgaattccaggctatcataccagcggtgaatagccatatccagtcggacctgctgaggaccgttattctggagatccctgaactgttgagtcctgtagagcactatctcaaaattcttaacgagcaagctgctaaagtgggcgacaagacggagctgtttaaagacctcagtgatttccccttgatcaaaaagcgaaaggatgagattcagggcgtgattgacgaaatacggatgcacttgcaagagatccggaagattctgaagaatccgtccgctcagtacgtgactgtgtctggtcaagagtttatgattgagataaagaacagtgcagtctcctgcattccgacggactgggtgaaagtcggcagcaccaaggctgtgtccagatttcattctccgtttattgtcgaaaactaccggcacctgaaccagttgcgggaacagctagttctggattgtagcgctgagtggctggatttccttgaaaaattctctgaacactaccactcactgtgtaaagcagtccaccatctagccacagtggactgcatcttcagccttgcgaaagtggcaaagcaaggggattattgccggcccaccgtccaggaagagcgcaagatcgtcatcaagaacggacgccatcccgtcatagacgtgctgttaggggagcaggaccagtacgtccccaacaacacagatttgtcagaggattcagagagggttatgattattactggacctaacatgggcgggaaatcctcttacataaaacaggttgcgctcataactatcatggcccagataggaagctacgtcccggctgaggaagctactatcgggatagtcgacggcattttcactcggatgggcgccgccgataacatctataagggccagagcacttttatggaagagcttactgatacggctgagatcatccgcaaagccacatcccaatccttggtgatcttggacgaactggggcgggggacaagcacacatgatggcattgccattgcctatgctaccctggaatacttcatcagagatgtgaaatctctcacattgtttgtcacacactaccctcccgtatgtgagcttgagaaaaattatagccaccaggtgggcaactaccacatgggttttttagtcagtgaagatgagtctaaattggacccaggggcggccgagcaggtccctgactttgttaccttcttataccagattacccgtggcatcgctgcgcggagttatggtctgaatgttgctaagttagctgacgttcccggcgagatactgaaaaaggcggctcataagtccaaggaattagaaggtctgattaacacaaagaggaaaaggctgaaatacttcgcgaagctctggaccatgcacaacgcgcaagacttacagaaatggacagaagagtttaatatggaggagacccagacctccctcctgcattag

SEQ ID NO: 128409 - DNA, 3387 bp, Artificial Sequence
  derived and/or modified sequence
atgagccggcggaagcccgccagcggcggcctggccgccagcagcagcgcacccgcccgtcaagcggtgctctcccgcttctttcagtccacggggtcacttaagtccactagcagttccaccggcgctgccgaccaggtggaccctggtgcagccgccgccgcagctccgccagcgcccgcttttcctccccagctccccccccatattgcaaccgagatagatcggaggaaaaaacgacctctggagaatgatggcccagtcaagaagaaagtcaagaaggttcagcagaaagaggggggttcagaccttgggatgtcaggcaatagtgagcccaagaaatgcctgcggacaaggaatgtgtcaaagtccctggaaaagttgaaggaattctgttgtgattcagctctccctcagtctagggttcaaaccgaatcactgcaagagagatttgcagtgttacccaaatgtaccgattttgatgacatcagcctcctgcatgcaaagaatgccgtgtcgtccgaagactctaagcggcagatcaatcaaaaagatactactctgttcgacctgagtcaattcggtagctcaaataccagtcacgagaatcttcagaaaaccgcctctaagtccgctaacaaaaggagcaaatctatttatactccccttgaactgcagtatatcgaaatgaagcagcaacataaggatgccgttctgtgtgtcgaatgtggctacaaatatagattctttggcgaggatgcagagattgctgcccgcgagttgaatatatactgccatctcgatcacaatttcatgaccgcaagtattccaacacacaggctattcgtccatgtgaggcggcttgtcgcgaagggctacaaagtgggtgtcgtgaagcaaacagaaaccgctgcactgaaggccattggagataacagaagttccctattttctaggaagctcacagcgttgtacacaaaatctacacttattggagaagatgtgaatccgttgatcaagctggacgatgccgtgaacgtggacgaaattatgacagatacgagcacatcatacttgctgtgtatcagcgagaacaaagagaacgtccgggacaaaaaaaaggggaatatatttatcggaattgtgggtgtccagccggccaccggggaagtggtgtttgactcatttcaagacagcgccagccgttcagaattggaaacacgcatgtcatccctccagccggtcgagctgttgcttccttctgctctatctgagcagacagaggccctcatccacagggccacaagtgttagcgtccaggacgacagaattcgcgtagaaaggatggataatatttatttcgagtattcccatgcgtttcaggctgtcaccgagttttacgccaaggataccgtggacattaaaggttcgcagataatatctgggatcgttaacctagagaagcccgtgatctgcagcctggccgctattataaaatacctgaaggaattcaacctggaaaagatgctgtccaagccggagaattttaaacagctatcatcaaagatggaattcatgactattaacggcaccacgctcaggaacctagagatcctgcagaatcagaccgacatgaagactaagggatctctcctgtgggtcttagaccatactaagacttcttttggtaggcgcaagttgaaaaaatgggtgacccagccattgttaaaactgagagaaataaacgctagattagacgcagtgagcgaggtgttacattccgaatcttcagtgttcggacagatcgagaatcacttgcgcaagctgcccgacattgagcgcggcctgtgtagcatctaccataaaaaatgctccacgcaagagttctttctgatcgtgaagacgttgtaccacctgaaaagtgagtttcaagctataatacctgccgtgaacagtcatatccagtctgacctgctgcgaacagtcattcttgagattccagaactcttgagtcctgttgagcattacctgaaaattctcaacgaacaggccgccaaggtaggggataagaccgagctgtttaaagacctctctgattttccactcattaagaagcgaaaagacgagattcagggcgtcattgatgaaatccggatgcacttgcaggaaatcaggaaaattctcaagaatccctctgctcagtacgtcacagtgagtggccaagagttcatgatcgagataaagaacagcgctgtgtcttgcattccaacggattgggttaaagtgggctcaacaaaggccgtttctaggtttcactccccttttatcgttgaaaattaccgccacctgaaccagctgagggaacagcttgtcttggactgctcggccgagtggctcgattttctcgagaaattctccgaacactatcatagcttgtgtaaggccgtccaccacctcgccaccgtggattgtatctttagtttggccaaggtcgctaaacaaggggactactgccggcctacagtccaggaggagcgaaagatcgtgatcaagaatggaaggcaccccgtaatcgacgtcctgctcggagagcaagatcagtatgtgccgaacaacacagatctctcggaagatagtgagcgtgtgatgataattaccggcccaaatatgggcggcaagtcaagctatattaagcaggtggccctgatcacaattatggcccagatcggctcttacgtgcccgcagaggaggcaaccatcgggatcgtggatgggattttcacaagaatgggagccgccgataacatctacaaggggcagtcaacttttatggaagaactgactgataccgccgaaatcattcgcaaggcgacttcccagagcctcgtgattttggacgagctggggcgcggtacatccacccatgacggaatcgcaatcgcctatgccaccctggaatactttattagagacgtgaagtccttgactttatttgtcacacattatcccccagtttgcgagctcgaaaaaaactattcccaccaggtgggaaactaccacatgggtttccttgtgagtgaagacgaatctaagctcgatcccggcgctgctgaacaagttcctgatttcgtaacctttctctatcagatcaccagaggcatcgccgctcgatcctacgggctgaacgtggctaagctcgccgacgtaccaggggagatcctgaagaaggccgctcataaatctaaagagctggaaggactgataaatactaaacgtaagcgcctgaaatattttgcgaagctttggaccatgcataacgctcaagacctccaaaagtggaccgaggaatttaatatggaggaaacacagacatcactactgcattag

SEQ ID NO: 128410 - DNA, 4092 bp, Artificial Sequence
  derived and/or modified sequence
ccgcagacgcctgggaactgcggccgcgggctcgcgctcctcgccaggccctgccgccgggctgccatccttgccctgccatgtctcgccggaagcctgcgtcgggcggcctcgctgcctccagctcagcccctgcgaggcaagcggttttgagccgattcttccagtctacgggaagcctgaaatccacctcctcctccacaggtgcagccgaccaggtggaccctggcgctgcagcggctgcagcggccgcagcggccgcagcgcccccagcgcccccagctcccgccttcccgccccagctgccgccgcacatagctacagaaattgacagaagaaagaagagaccattggaaaatgatgggcctgttaaaaagaaagtaaagaaagtccaacaaaaggaaggaggaagtgatctgggaatgtctggcaactctgagccaaagaaatgtctgaggaccaggaatgtttcaaagtctctggaaaaattgaaagaattctgctgcgattctgcccttcctcaaagtagagtccagacagaatctctgcaggagagatttgcagttctgccaaaatgtactgattttgatgatatcagtcttctacacgcaaagaatgcagtttcttctgaagattcgaaacgtcaaattaatcaaaaggacacaacactttttgatctcagtcagtttggatcatcaaatacaagtcatgaaaatttacagaaaactgcttccaaatcagctaacaaacggtccaaaagcatctatacgccgctagaattacaatacatagaaatgaagcagcagcacaaagatgcagttttgtgtgtggaatgtggatataagtatagattctttggggaagatgcagagattgcagcccgagagctcaatatttattgccatttagatcacaactttatgacagcaagtatacctactcacagactgtttgttcatgtacgccgcctggtggcaaaaggatataaggtgggagttgtgaagcaaactgaaactgcagcattaaaggccattggagacaacagaagttcactcttttcccggaaattgactgccctttatacaaaatctacacttattggagaagatgtgaatcccctaatcaagctggatgatgctgtaaatgttgatgagataatgactgatacttctaccagctatcttctgtgcatctctgaaaataaggaaaatgttagggacaaaaaaaagggcaacatttttattggcattgtgggagtgcagcctgccacaggcgaggttgtgtttgatagtttccaggactctgcttctcgttcagagctagaaacccggatgtcaagcctgcagccagtagagctgctgcttccttcggccttgtccgagcaaacagaggcgctcatccacagagccacatctgttagtgtgcaggatgacagaattcgagtcgaaaggatggataacatttattttgaatacagccatgctttccaggcagttacagagttttatgcaaaagatacagttgacatcaaaggttctcaaattatttctggcattgttaacttagagaagcctgtgatttgctctttggctgccatcataaaatacctcaaagaattcaacttggaaaagatgctctccaaacctgagaattttaaacagctatcaagtaaaatggaatttatgacaattaatggaacaacattaaggaatctggaaatcctacagaatcagactgatatgaaaaccaaaggaagtttgctgtgggttttagaccacactaaaacttcatttgggagacggaagttaaagaagtgggtgacccagccactccttaaattaagggaaataaatgcccggcttgatgctgtatcggaagttctccattcagaatctagtgtgtttggtcagatagaaaatcatctacgtaaattgcccgacatagagaggggactctgtagcatttatcacaaaaaatgttctacccaagagttcttcttgattgtcaaaactttatatcacctaaagtcagaatttcaagcaataatacctgctgttaattcccacattcagtcagacttgctccggaccgttattttagaaattcctgaactcctcagtccagtggagcattacttaaagatactcaatgaacaagctgccaaagttggggataaaactgaattatttaaagacctttctgacttccctttaataaaaaagaggaaggatgaaattcaaggtgttattgacgagatccgaatgcatttgcaagaaatacgaaaaatactaaaaaatccttctgcacaatatgtgacagtatcaggacaggagtttatgatagaaataaagaactctgctgtatcttgtataccaactgattgggtaaaggttggaagcacaaaagctgtgagccgctttcactctccttttattgtagaaaattacagacatctgaatcagctccgggagcagctagtccttgactgcagtgctgaatggcttgattttctagagaaattcagtgaacattatcactccttgtgtaaagcagtgcatcacctagcaactgttgactgcattttctccctggccaaggtcgctaagcaaggagattactgcagaccaactgtacaagaagaaagaaaaattgtaataaaaaatggaaggcaccctgtgattgatgtgttgctgggagaacaggatcaatatgtcccaaataatacagatttatcagaggactcagagagagtaatgataattaccggaccaaacatgggtggaaagagctcctacataaaacaagttgcattgattaccatcatggctcagattggctcctatgttcctgcagaagaagcgacaattgggattgtggatggcattttcacaaggatgggtgctgcagacaatatatataaaggacagagtacatttatggaagaactgactgacacagcagaaataatcagaaaagcaacatcacagtccttggttatcttggatgaactaggaagagggacgagcactcatgatggaattgccattgcctatgctacacttgagtatttcatcagagatgtgaaatccttaaccctgtttgtcacccattatccgccagtttgtgaactagaaaaaaattactcacaccaggtggggaattaccacatgggattcttggtcagtgaggatgaaagcaaactggatccaggcgcagcagaacaagtccctgattttgtcaccttcctttaccaaataactagaggaattgcagcaaggagttatggattaaatgtggctaaactagcagatgttcctggagaaattttgaagaaagcagctcacaagtcaaaagagctggaaggattaataaatacgaaaagaaagagactcaagtattttgcaaagttatggacgatgcataatgcacaagacctgcagaagtggacagaggagttcaacatggaagaaacacagacttctcttcttcattaaaatgaagactacatttgtgaacaaaaaatggagaattaaaaataccaactgtacaaaataactctccagtaacagcctatctttgtgtgacatgtgagcataaaattatgaccatggtatattcctattggaaacagagaggtttttctgaagacagtctttttcaagtttctgtcttcctaacttttctacgtataaacactcttgaatagacttccactttgtaattagaaaattttatggacagtaagtccagtaaagccttaagtggcagaatataattcccaagcttttggagggtgatataaaaatttacttgatatttttatttgtttcagttcagataattggcaactgggtgaatctggcaggaatctatccattgaactaaaataattttattatgcaaccagtttatccaccaagaacataagaattttttataagtagaaagaattggccaggcatggtggctcatgcctgtaatcccagcactttgggaggccaaggtaggcagatcacctgaggtcaggagttcaagaccagcctggccaacatggcaaaaccccatctttactaaaaatataaagtacatctc

SEQ ID NO: 128411 - DNA, 4337 bp, Artificial Sequence
  derived and/or modified sequence
atgtctcgccggaagcctgcgtcgggcggcctcgctgcctccagctcagcccctgcgaggcaagcggttttgagccgattcttccagtctacgggaagcctgaaatccacctcctcctccacaggtgcagccgaccaggtggaccctggcgctgcagcggctgcagcgcccccagctcccgccttcccgccccagctgccgccgcacatagctacagaaattgacagaagaaagaagagaccattggaaaatgatgggcctgttaaaaagaaagtaaagaaagtccaacaaaaggaaggaggaagtgatctgggaatgtctggcaactctgagccaaagaaatgtctgaggaccaggaatgtttcaaagtctctggaaaaattgaaagaattctgctgcgattctgcccttcctcaaagtagagtccagacagaatctctgcaggagagatttgcagttctgccaaaatgtactgattttgatgatatcagtcttctacacgcaaagaatgcagtttcttctgaagattcgaaacgtcaaattaatcaaaaggacacaacactttttgatctcagtcagtttggatcatcaaatacaagtcatgaaaatttacagaaaactgcttccaaatcagctaacaaacggtccaaaagcatctatacgccgctagaattacaatacatagaaatgaagcagcagcacaaagatgcagttttgtgtgtggaatgtggatataagtatagattctttggggaagatgcagagattgcagcccgagagctcaatatttattgccatttagatcacaactttatgacagcaagtatacctactcacagactgtttgttcatgtacgccgcctggtggcaaaaggatataaggtgggagttgtgaagcaaactgaaactgcagcattaaaggccattggagacaacagaagttcactcttttcccggaaattgactgccctttatacaaaatctacacttattggagaagatgtgaatcccctaatcaagctggatgatgctgtaaatgttgatgagataatgactgatacttctaccagctatcttctgtgcatctctgaaaataaggaaaatgttagggacaaaaaaaagggcaacatttttattggcattgtgggagtgcagcctgccacaggcgaggttgtgtttgatagtttccaggactctgcttctcgttcagagctagaaacccggatgtcaagcctgcagccagtagagctgctgcttccttcggccttgtccgagcaaacagaggcgctcatccacagagccacatctgttagtgtgcaggatgacagaattcgagtcgaaaggatggataacatttattttgaatacagccatgctttccaggcagttacagagttttatgcaaaagatacagttgacatcaaaggttctcaaattatttctggcattgttaacttagagaagcctgtgatttgctctttggctgccatcataaaatacctcaaagaattcaacttggaaaagatgctctccaaacctgagaattttaaacagctatcaagtaaaatggaatttatgacaattaatggaacaacattaaggaatctggaaatcctacagaatcagactgatatgaaaaccaaaggaagtttgctgtgggttttagaccacactaaaacttcatttgggagacggaagttaaagaagtgggtgacccagccactccttaaattaagggaaataaatgcccggcttgatgctgtatcggaagttctccattcagaatctagtgtgtttggtcagatagaaaatcatctacgtaaattgcccgacatagagaggggactctgtagcatttatcacaaaaaatgttctacccaagagttcttcttgattgtcaaaactttatatcacctaaagtcagaatttcaagcaataatacctgctgttaattcccacattcagtcagacttgctccggaccgttattttagaaattcctgaactcctcagtccagtggagcattacttaaagatactcaatgaacaagctgccaaagttggggataaaactgaattatttaaagacctttctgacttccctttaataaaaaagaggaaggatgaaattcaaggtgttattgacgagatccgaatgcatttgcaagaaatacgaaaaatactaaaaaatccttctgcacaatatgtgacagtatcaggacaggagtttatgatagaaataaagaactctgctgtatcttgtataccaactgattgggtaaaggttggaagcacaaaagctgtgagccgctttcactctccttttattgtagaaaattacagacatctgaatcagctccgggagcagctagtccttgactgcagtgctgaatggcttgattttctagagaaattcagtgaacattatcactccttgtgtaaagcagtgcatcacctagcaactgttgactgcattttctccctggccaaggtcgctaagcaaggagattactgcagaccaactgtacaagaagaaagaaaaattgtaataaaaaatggaaggcaccctgtgattgatgtgttgctgggagaacaggatcaatatgtcccaaataatacagatttatcagaggactcagagagagtaatgataattaccggaccaaacatgggtggaaagagctcctacataaaacaagttgcattgattaccatcatggctcagattggctcctatgttcctgcagaagaagcgacaattgggattgtggatggcattttcacaaggatgggtgctgcagacaatatatataaaggacagagtacatttatggaagaactgactgacacagcagaaataatcagaaaagcaacatcacagtccttggttatcttggatgaactaggaagagggacgagcactcatgatggaattgccattgcctatgctacacttgagtatttcatcagagatgtgaaatccttaaccctgtttgtcacccattatccgccagtttgtgaactagaaaaaaattactcacaccaggtggggaattaccacatgggattcttggtcagtgaggatgaaagcaaactggatccaggcgcagcagaacaagtccctgattttgtcaccttcctttaccaaataactagaggaattgcagcaaggagttatggattaaatgtggctaaactagcagatgttcctggagaaattttgaagaaagcagctcacaagtcaaaagagctggaaggattaataaatacgaaaagaaagagactcaagtattttgcaaagttatggacgatgcataatgcacaagacctgcagaagtggacagaggagttcaacatggaagaaacacagacttctcttcttcattaaaatgaagactacatttgtgaacaaaaaatggagaattaaaaataccaactgtacaaaataactctccagtaacagcctatctttgtgtgacatgtgagcataaaattatgaccatggtatattcctattggaaacagagaggtttttctgaagacagtctttttcaagtttctgtcttcctaacttttctacgtataaacactcttgaatagacttccactttgtaattagaaaattttatggacagtaagtccagtaaagccttaagtggcagaatataattcccaagcttttggagggtgatataaaaatttacttgatatttttatttgtttcagttcagataattggcaactgggtgaatctggcaggaatctatccattgaactaaaataattttattatgcaaccagtttatccaccaagaacataagaattttttataagtagaaagaattggccaggcatggtggctcatgcctgtaatcccagcactttgggaggccaaggtaggcagatcacctgaggtcaggagttcaagaccagcctggccaacatggcaaaaccccatctttactaaaaatataaagtacatctctactaaaaatacgaaaaaattagctgggcatggtggcgcacacctgtagtcccagctactccggaggctgaggcaggagaatctcttgaacctgggaggcggaggttgcaatgagccgagatcacgtcactgcactccagcttgggcaacagagcaagactccatctcaaaaaaaaaaaaagaaaaaagaaaagaaatagaattatcaagcttttaaaaactagagcacagaaggaataaggtcatgaaatttaaaaggttaaatattgtcataggattaagcagtttaaagattgttggatgaaattatttgtcattcattcaagtaataaatatttaatgaatacttgct

SEQ ID NO: 128412 - DNA, 3414 bp, Artificial Sequence
  derived and/or modified sequence
atgtcaaggcgaaagcctgcatctggcggactggcagcttcttcttctgcacccgcacggcaagcagtactgtcacgattctttcaatccaccggttcacttaaatccaccagctcttccactggtgctgccgatcaggtggatcccggagcagctgccgctgctgccgctgctgctgccgctgcccctccagctccaccagctcctgcttttccccctcagctacctccgcacattgctaccgagatagaccgacggaaaaagcggcctttggaaaacgatggacctgtcaaaaagaaagtcaagaaggttcagcaaaaagaggggggttcagatctggggatgagtggaaacagcgagccaaagaagtgcctacgtacccggaacgtgagcaaatcgctggaaaagttgaaagaattttgttgcgatagtgccttacctcaaagccgagtgcagacggagtctctccaggaacgttttgcagtacttcccaaatgtactgatttcgacgatatctccctactccacgcaaagaacgccgtgtcctctgaggacagcaagaggcagattaaccaaaaagacacaaccctctttgatttatcccagtttggcagttctaatacttctcacgaaaacttgcaaaagaccgcgagcaagtcggccaacaagagaagtaaatccatatatactcccctagagctgcagtatatcgagatgaagcagcagcacaaggacgccgtgttgtgtgtagaatgtggttacaaatacagattcttcggagaggatgcggaaatcgcagccagggaactgaatatatactgtcatcttgaccataatttcatgaccgcaagtattcccacccacagactgtttgttcatgtgcgacgactcgtggccaaaggttataaagtgggcgttgttaagcagactgagactgcagcacttaaagctatcggagacaataggagcagcctcttttctagaaagttaacagctctgtacaccaagtcaacactgatcggggaggatgtaaaccccctgattaaattggatgacgccgtgaacgttgacgagatcatgaccgacacctcaaccagctatctactgtgtatcagcgagaacaaagagaatgtgcgggataagaaaaagggcaacatcttcatcggaatcgtgggcgtgcagccagcaaccggcgaggtggtctttgactccttccaagacagcgcttccagaagcgaactagaaacgcggatgtcatcgctacaaccggtggagcttcttctgccttctgctctgtccgagcagacagaagccctgatacatagagcgacctcagtgtctgtccaggacgatagaataagggtcgagcggatggacaacatatatttcgagtactcccatgccttccaggcagtaacggaattttacgctaaggatacagtcgacatcaagggcagtcagatcatctcggggatcgtgaatctggagaaaccagtgatatgctcactcgcggcaattatcaagtacctaaaagagtttaacttagaaaaaatgctgagcaaacctgagaatttcaaacaattgtctagcaaaatggagttcatgacaatcaacggcacaactctcaggaatttagagatcctgcagaatcagacagatatgaaaaccaagggcagcttgctttgggtcttggaccacactaaaacctctttcggacggcgaaaattgaagaaatgggtgacccaaccactgctcaaactccgcgagattaacgcgaggctggatgccgtgtctgaagtgctgcactctgagtccagtgttttcggacagatcgagaaccacctgagaaagttgccagacattgagaggggcctgtgttctatctaccataaaaagtgtagtactcaggaattcttcctgatcgtgaagaccctctaccacctcaagtctgagttccaggcaattatcccagctgtcaattcccatatccagtctgatctcctaagaactgttattctggagataccagagctgttgtctcctgtggaacactaccttaagattctgaacgagcaggccgctaaagtgggtgataaaaccgaactgttcaaagacttgtcagactttcccctgattaaaaagaggaaagatgagattcagggtgttatcgacgagatccgaatgcacctgcaagaaatcagaaagatcctaaaaaaccctagtgcccagtatgtaactgtgtcagggcaagagtttatgatcgaaattaagaactcagcagtgagttgcatcccaaccgactgggttaaagtcggaagcacaaaagccgtctcacggtttcattccccctttattgtggagaattacagacacttaaatcaattgcgcgaacagctggtattagattgtagcgcagagtggttagatttcttggaaaagtttagtgagcattatcacagcttgtgtaaggctgttcatcatctggccacagtggattgcatattctccctcgcgaaagttgccaagcaaggtgactactgccgaccaaccgtgcaggaggagaggaagattgtgattaaaaatggcagacatccagtgatcgatgtgctcctcggggagcaggatcagtatgtgcctaacaacaccgatcttagcgaagattcagagcgagtgatgatcatcaccggtcctaatatgggcggaaaatcttcctatatcaaacaggtggccctgataactatcatggcccaaattggcagctacgtcccagcagaagaggccaccattggcatcgtcgatggtatttttacaaggatgggcgcagctgacaatatctacaaaggccagtcgacctttatggaggagttgacagatacggctgagattatccgtaaggcaacttctcagtcgctggtcatacttgacgaactaggaaggggcactagcactcatgacggcattgcaatcgcatatgcgaccctcgagtacttcatccgggatgtgaagtccctgacattgtttgtaacacattatcccccagtatgtgaactggagaagaactattcccaccaagtgggcaactaccatatggggtttcttgttagcgaagacgaaagtaaactcgacccaggcgcagccgagcaggtgcctgacttcgtaacctttctgtatcagatcacccggggtattgctgccaggtcttacggcctgaatgtggcaaaattagcagatgtgcccggagaaattctgaaaaaagccgcacacaagtcaaaggagctcgaaggcctgataaacaccaaaaggaagcgacttaaatatttcgccaagctctggacaatgcataacgcacaggaccttcagaaatggactgaagaatttaacatggaagagacccagacatctctgcttcattag

SEQ ID NO: 128413 - DNA, 3387 bp, Artificial Sequence
  derived and/or modified sequence
atgtctcggaggaagcccgctagtgggggactggccgcatcctctagtgcccctgcccgacaggccgtcctatcgagatttttccagtccactgggagcctgaaaagcacgagttcatctacaggtgccgctgatcaagtagacccaggcgctgccgctgccgctgctccaccagcgccagcttttccaccacagctgcccccacacatcgctactgaaattgataggcgtaagaaacgtcctctggaaaacgatggcccagtcaagaaaaaggttaagaaagtgcagcaaaaggaaggcggatccgacttgggcatgtcaggcaatagcgagccaaagaaatgtttgagaactcgcaacgtgtccaagtcgttagaaaaactaaaagagttctgctgcgactccgctctcccccagtcaagggttcagacagaatccctgcaagaaagattcgctgtcctacctaagtgcacagactttgatgacatctccctgttgcatgcaaaaaatgcagtgagctctgaggattccaagcgacagattaaccagaaagatacaaccctctttgacctgtcccaattcggttcctcaaacacatctcacgagaatctccagaagaccgctagcaaatcagccaataagcggagcaaatccatatacaccccactggagctgcaatacatcgaaatgaaacagcagcataaagatgccgtgctgtgtgtggagtgtggttataagtacaggtttttcggcgaagacgctgagattgccgcacgggaacttaacatttactgccacctggatcacaatttcatgacggcatctatcccaactcaccgcctattcgtgcacgtgcggaggctggtggcaaaaggatataaagtgggcgtcgttaaacagaccgaaaccgccgcactgaaggccatcggcgacaaccgctcttcactctttagtagaaagctcaccgccctgtacaccaagtcaactctgattggagaggacgtgaaccctctcatcaagctggacgacgcagtaaatgtggacgagattatgaccgacactagcactagttatctgttatgcatctccgagaacaaagaaaatgtgcgcgacaagaagaaaggcaatatctttatcggtatcgtgggagttcagccggcaacaggcgaagtggtctttgacagtttccaggactcggccagtaggtcagagctggagacccgaatgtctagcctgcagccggttgaactcctgctcccaagtgcgttgagcgaacaaaccgaggccttaattcacagagcaacctctgtgagcgtgcaggacgatcgaattcgagtggagagaatggacaacatttacttcgaatacagccacgcgtttcaagccgtgaccgagttttatgccaaggatacagtggacattaagggctcacagattatctcaggcatagtgaacttggagaaacctgtgatctgtagcctagctgccatcattaaatacctcaaggagtttaatctggagaaaatgctgagtaagcctgaaaatttcaagcagttatcttctaagatggagtttatgaccattaatggaactactctcaggaatctggagatcttgcagaaccagacagatatgaagactaagggcagtcttctatgggtgctcgaccacaccaaaaccagtttcggcaggaggaaactgaaaaagtgggtcacacagccactgcttaagctgcgagagattaatgctaggctagacgccgtgagcgaagtgctgcacagtgaatcttcagttttcggacagatcgaaaaccacctcaggaagctcccggacattgaaaggggtctttgcagtatctaccacaagaaatgcagtacccaggaattttttctgattgtgaagactctgtatcatctcaagtccgagttccaggccattattcccgctgttaatagccatatacagagtgatcttctgagaaccgtcatcctggagatcccagaactcttgtcacccgtggaacactacttgaaaatactcaacgagcaagccgcaaaagttggcgacaaaaccgagttattcaaagacctgagtgacttccctctgattaagaagaggaaagatgagattcagggagtgatcgacgagatccggatgcatttgcaggagattcgcaaaatactgaagaatcctagcgcccagtacgtgaccgtgagcggacaggagttcatgattgagatcaaaaacagcgccgttagctgcatcccaactgactgggtcaaggtgggcagcaccaaggctgtctctcgatttcattctccgttcattgtggaaaactatagacatcttaaccagcttcgcgagcaactggtgttggactgcagcgccgaatggctcgattttctggagaaatttagcgaacattaccatagcctatgcaaagccgtgcatcaccttgcaactgtggactgtatctttagcttggccaaagtggccaagcagggagattactgtcggccaacggtccaagaggaacggaaaatcgtaatcaagaacggcaggcacccggtcatcgacgtgctgctgggcgaacaagaccaatatgtgcctaataacaccgacctttcggaagactctgaacgcgtgatgattattaccggtcctaacatggggggtaaaagctcttatatcaagcaagtggccctgatcacaatcatggctcaaatcggcagttatgtcccggcagaagaagccactatcggtattgtcgacgggatttttacccgaatgggcgctgccgacaatatttataagggccagtcaacctttatggaagagctgactgataccgccgaaatcatcagaaaggctacctctcaaagcctggtgattctggacgagcttggccgagggacctctactcacgatggaattgctattgcttatgcaacgcttgagtacttcattcgggatgtgaagagccttacattgttcgtaacacactatcccccagtatgcgagctggagaaaaattatagccatcaggtggggaattaccacatggggttccttgtgtccgaagacgagtccaagctcgacccaggagcagccgaacaagttcctgacttcgtcacctttctgtaccaaatcacccggggaatcgccgcacgaagttatggtcttaatgtggcaaagttagccgatgtccctggcgaaatcctgaaaaaggctgctcataaatctaaggagctggaggggctcattaacactaagaggaaacgactcaaatacttcgccaaactgtggaccatgcataacgcacaggatctgcagaaatggacagaggagtttaatatggaggaaacgcagacatccctgctgcattag

SEQ ID NO: 128414 - protein, 362 aa, Artificial Sequence
  derived and/or modified sequence
METDAPQPGLASPDSPHDPCKMFIGGLSWQTTQEGLREYFGQFGEVKECLVMRDPLTKRSRGFGFVTFMDQAGVDKVLAQSRHELDSKTIDPKVAFPRRAQPKMVTRTKKIFVGGLSVNTTVEDVKQYFEQFGKVDDAMLMFDKTTNRHRGFGFVTFESEDIVEKVCEIHFHEINNKMVECKKAQPKEVMSPTGSARGRSRVMPYGMDAFMLGIGMLGYPGFQATTYASRSYTGLAPGYTYQFPEFRVERTPLPSAPVLPELTAIPLTAYGPMAAAAAAAAVVRGTGSHPWTMAPPPGSTPSRTGGFLGTTSPGPMAELYGAANQDSGVSSYISAASPAPSTGFGHSLGGPLIATAFTNGYH

SEQ ID NO: 128415 - DNA, 1089 bp, Artificial Sequence
  derived and/or modified sequence
atggagacggacgccccccagcccggcctggctagtccagactcccctcacgacccctgcaagatgttcattggcgggctctcctggcagaccacacaggaggggctccgcgagtactttggccaatttggggaggttaaagaatgcttggtaatgagagaccctctcaccaagaggtctcgcgggtttggatttgtaacctttatggaccaggcgggagtggataaagtgctagcgcaatcccgtcatgagctggatagtaaaactatcgacccaaaagttgctttcccccgccgcgctcagccaaaaatggtaactcgaaccaagaagatttttgtaggaggactttcagtgaacacaacggtggaggacgttaagcaatattttgaacaattcgggaaagtggatgatgcaatgcttatgttcgacaagactacgaatcgccaccgcggcttcgggtttgtcacttttgagtctgaggacattgtggaaaaagtttgcgagattcatttccacgagattaacaacaagatggtggaatgtaagaaggctcagcccaaggaggtgatgtcgcctaccgggtctgcacgtggtcgaagtcgggtgatgccctatggcatggacgccttcatgttggggattggcatgctgggctaccccggattccaagctacgacatacgcctctaggagttatacggggttggcgcccgggtatacataccagtttcctgaattccgggtcgagcggacccctctgccatctgcacctgtgttaccggaattgacagcaatccccctgaccgcctacgggcccatggccgctgctgcagccgccgccgccgtggtgcgaggaacaggctctcacccctggacaatggccccccccccaggcagcaccccatcacggacagggggtttcttaggcacaacctctccaggccctatggcagagctgtatggagcagccaaccaagattcgggcgtgtccagttatatctccgcggcttcacctgcaccgtctaccggcttcggtcattctctcggcggcccacttattgccaccgcttttaccaacggctatcactag

SEQ ID NO: 128416 - DNA, 1089 bp, Artificial Sequence
  derived and/or modified sequence
atggagacagatgccccccagcccggcctggccagcccagacagcccccatgacccctgcaagatgttcatcggcggcctgtcctggcagaccacccaggagggcctgcgggagtacttcggccagtttggagaggtgaaggagtgcctggtgatgagggaccccctgaccaagaggagccggggctttggatttgtgaccttcatggaccaggccggcgtggacaaggtgctggcccagagcagacatgagctggacagcaagaccatcgaccccaaggtggccttcccccggcgggcccagcccaagatggtgaccaggaccaagaagatctttgtgggcggcctgtctgtgaacaccaccgtggaggatgtgaagcagtactttgagcagtttgggaaggtggatgatgccatgctgatgtttgacaagaccaccaacagacaccggggcttcggctttgtgacctttgaaagtgaggacatcgtggagaaggtgtgtgagatccacttccacgagatcaacaacaagatggtggagtgcaagaaggcccagcccaaggaggtgatgagccccactggaagtgcccggggccgcagccgggtgatgccctacggcatggatgccttcatgctgggcatcggcatgctgggctacccaggcttccaggccaccacctacgccagccgcagctacacaggcctggcccctggctacacctaccagtttcctgagttccgggtggagaggacccccctgcccagcgcccctgtgctgcctgagctgacagccatccccctgacagcctacggccccatggctgctgctgctgctgctgctgctgtggtgcggggcaccggcagccacccctggaccatggcccctcctcctggcagcacccccagcaggactggaggcttcctgggcaccaccagccctggccccatggccgagctgtatggagctgccaaccaggacagcggcgtgtcctcctacatctctgctgccagccctgcccccagcacaggcttcggccacagcctgggcggccccctgattgccacagccttcaccaacggctaccactag

SEQ ID NO: 128417 - DNA, 2975 bp, Artificial Sequence
  derived and/or modified sequence
cttcgccgcgctcctcatctgccccgcgccgagcgccgccgccgccgccgccgccgccgctccgctgcccgcgccgcccgcggctcccgatggagactgacgcgccccagcccggcctcgcctccccggactcgccgcacgacccctgcaagatgttcatcgggggactcagttggcagactacgcaggaagggctgcgcgaatacttcggccagttcggggaggtgaaggagtgtctggtgatgcgggaccccctgaccaagagatccaggggtttcggcttcgtcactttcatggaccaggcgggggtggataaagtgctggcgcaatcgcggcacgagctcgactccaaaacaattgaccctaaggtggccttccctcggcgagcacagcccaagatggtgactcgaacgaagaagatctttgtgggggggctgtcggtgaacaccacggtggaggacgtgaagcaatattttgagcagtttgggaaggtggacgacgccatgctgatgtttgacaaaaccaccaaccggcaccgagggttcgggtttgtcacgtttgagagtgaggacatcgtggagaaagtgtgtgaaattcattttcatgaaatcaacaacaaaatggtggaatgtaagaaagctcagccaaaggaggtgatgtcgccaacgggctcagcccgggggaggtctcgagtcatgccctacggaatggacgccttcatgctgggcatcggcatgctgggttacccaggtttccaagccacaacctacgccagccggagttatacaggcctcgcccctggctacacctaccagttccccgaattccgtgtagagcggacccctctcccgagcgccccagtcctccccgagcttacagccattcctctcactgcctacggaccaatggcggcggcagcggcggcagcggctgtggttcgagggacaggctctcacccctggacgatggctccccctccaggttcgactcccagccgcacagggggcttcctggggaccaccagccccggccccatggccgagctctacggggcggccaaccaggactcgggggtcagcagttacatcagcgccgccagccctgcccccagcaccggcttcggccacagtcttgggggccctttgattgccacagccttcaccaatgggtaccactgaagcaggggacggtggcaggagcgccccagcctgcagctgactgaggaccacgagtgagccagcgagggggcgggagacctcagccgcagccgccgccccctcccctgcagcgactcggacccgctactgcctgcccccaactccccgggcccggcccctgccctgctgcccccaacagcgtctggctcccctactaacgtccccctcttcgcccttgcccccatccccacccgcccctctcccggccctgcttttatttattttggattagccggttgcccaccccagccctctggtccatccctccctccgtgccgcgcccccctaggaccgccccctccccaaaaggcttttggatttgtgcatagctggagtgaaggcggagggagcctgctacaggccgcagcccaacccctgttttttattcagatttcccctcctttaccctttccctttttttttttttttttttttttaaagaaaccttttttaaactatttctaggtttgtgaatgtgaagccccaggccgcagggggcaaggggccaggtgccccccaccagctgagaacaaagtgtctatctgggtgtgggcccctggccgcctccctccagccctggagaggagggcagggctgcggggaggccaggccgagcccctggaaccatcccgtcctgtatcatatgtaaatactgtgaggtgatgtgcccacccctctctaagacccctcgggggtgaggggctcccccctcccctgtttctgtcccctcagacaccgttactgtaagcttgcaggcctcagctgtggccacggcaggcccgctctctcaggccctcagggtcaaggccttggttggacctgcccactccaaaaacccagtgtgggggcaaagggcgtgggaagagcagggcttgcccagcgacactgctggacaggaattaactctccaaaggtctcccctgctccctacctaggttggggcttcatggtttctgctcagtctgtcccccttccccctcgacccccgcaatgagtgggcaccaggggacgctctggcgagggcagaccccaggggaaagcaaagggcgtctcagggaacccccacattctctcactgaagtttcccaccaggatgaccccacagccagagtcccttggcagcccctcaccccagaccccccttctaaggaaaaagagaggttcagagcgttggaccttcatgaacagtggcctggctggcgtggcagggccaaggcccacccactgccatcccccttctgtgtgtccctctcccccagttatgaggcccagggcctgagctctcttccccagcattgcccccacccggaaaccccacctttggagagttaattgtctgtgtgaggtgcttaacctatcagccctgagaacacaaagcaataatctttgttactgagatgcgcggctgttcgtgttttgggttttttttttttttaatgtttcctaataaaagagaagctgcattttattggtttttatttttaattttctacacgtttgagctgagtcctgagacacttagcttccctctccctcattcccggacccttccaccccactgggcccaaccatgggctcaggaccctggaattccgttttctgatttgctttgggattttttttttttttaagatgttacatggtgtttcgaagccagcaagttaccatcctccggtgtctcttctctccacatctgtaacttctttttccaggttttattttcagttttaaattcctaataaattatttgaaaacgtt

SEQ ID NO: 128418 - DNA, 1089 bp, Artificial Sequence
  derived and/or modified sequence
atggagaccgacgccccccagcccggcctggccagccccgacagcccacacgatccatgtaagatgttcattggcggcctgtcatggcaaaccactcaggaagggttgcgggagtatttcggccagttcggagaggtgaaagaatgtctagtgatgcgagacccactgacaaagcgaagccggggcttcgggtttgtgacatttatggaccaagccggggtagataaggtgctggcgcagtctcgccacgagctcgacagcaaaaccatcgaccctaaggtggcgtttcctcgacgcgcccagcccaagatggtgaccagaaccaaaaagatttttgtgggggggctgtctgtgaatactactgtagaagacgtgaaacagtattttgagcaatttggcaaggtggacgatgccatgctgatgtttgacaaaactacgaatcggcaccgtggatttggcttcgtgacattcgagtcagaagacatcgtggagaaagtgtgcgagattcacttccacgagatcaacaataaaatggtcgagtgcaagaaggcacagcccaaggaggtgatgtcgcctaccggatctgcgagaggccgttctagggtgatgccatatggaatggacgctttcatgctgggaatcggcatgctcggctatcctggctttcaggcgaccacgtacgcctcccggtcttacacgggccttgccccaggatacacgtaccaattcccagagtttcgagtggagcggacacctttaccaagcgctcctgtgctgcccgaactcacagctataccactcacggcctacggccctatggctgccgcagccgcagccgcagccgtggtgaggggaaccggctctcatccgtggacgatggcccctccgccgggtagcactccttctagaaccggaggtttccttggcacaacatcccccgggcctatggctgagctgtatggcgcagctaaccaggatagcggggtatcttcttacatcagcgccgccagcccagccccttcgaccggctttggacattcactgggcggaccactgattgccaccgccttcaccaatgggtaccattag

SEQ ID NO: 128419 - DNA, 1089 bp, Artificial Sequence
  derived and/or modified sequence
atggagacagacgcgccacagcccggactcgcatctcccgacagcccgcatgacccttgcaagatgtttatcggtgggctgtcctggcagaccacacaggagggtcttcgggagtattttgggcagtttggcgaggttaaagagtgtctggtgatgagagaccctctgacgaaacgcagtcgtgggttcggattcgtcacatttatggaccaggcgggagtggacaaggttttagcccagtcccgacatgagctcgattccaagaccatcgatcctaaggtggcgtttcctagacgggcacagcctaagatggttacccgcactaaaaaaatcttcgtgggcggtttaagtgtgaatacaaccgtggaggatgtcaaacagtatttcgagcaattcggcaaggtagacgacgcaatgcttatgtttgacaagactacgaaccggcacagggggttcggcttcgtgacattcgaatccgaggatattgtggagaaggtgtgtgagatccatttccatgagataaataataagatggtagaatgcaagaaggcacagccgaaagaagtgatgtctcctacaggcagtgccagagggagaagtagagtaatgccatacggaatggatgcattcatgctggggatcggcatgttaggctaccctgggttccaggcaaccacttacgcatcaagatcttatactggcctagctcccggatatacctaccaatttcccgaattccgcgtggagcgcacccccctcccctcagcgccagttctgccggagcttaccgctatccctctaacagcgtatggtcccatggccgcagcagccgctgccgctgccgtggtgcgcggaacgggctcacatccctggacaatggctcctccccctggaagcacaccttcacgaacaggaggcttcctggggacgacctcgccgggaccaatggcggagctctatggcgctgctaaccaggactcaggggtgagctcctacataagtgccgcttctccagcgcctagcacaggattcggacactctctcgggggacctctgattgccacagctttcaccaacggttatcactag

SEQ ID NO: 128420 - DNA, 1089 bp, Artificial Sequence
  derived and/or modified sequence
atggagaccgacgccccccagcccggcctggccagccccgacagcccccacgacccctgcaagatgttcatcggcggcctgagctggcagaccacccaggagggcctgagagagtacttcggccagttcggcgaggtgaaggagtgcctggtgatgagagaccccctgaccaagagaagcagaggcttcggcttcgtgaccttcatggaccaggccggcgtggacaaggtgctggcccagagcagacacgagctggacagcaagaccatcgaccccaaggtggccttccccagaagagcccagcccaagatggtgaccagaaccaagaagatcttcgtgggcggcctgagcgtgaacaccaccgtggaggacgtgaagcagtacttcgagcagttcggcaaggtggacgacgccatgctgatgttcgacaagaccaccaacagacacagaggcttcggcttcgtgaccttcgagagcgaggacatcgtggagaaggtgtgcgagatccacttccacgagatcaacaacaagatggtggagtgcaagaaggcccagcccaaggaggtgatgagccccaccggcagcgccagaggcagaagcagagtgatgccctacggcatggacgccttcatgctgggcatcggcatgctgggctaccccggcttccaggccaccacctacgccagcagaagctacaccggcctggcccccggctacacctaccagttccccgagttcagagtggagagaacccccctgcccagcgcccccgtgctgcccgagctgaccgccatccccctgaccgcctacggccccatggccgccgccgccgccgccgccgccgtggtgagaggcaccggcagccacccctggaccatggcccccccccccggcagcacccccagcagaaccggcggcttcctgggcaccaccagccccggccccatggccgagctgtacggcgccgccaaccaggacagcggcgtgagcagctacatcagcgccgccagccccgcccccagcaccggcttcggccacagcctgggcggccccctgatcgccaccgccttcaccaacggctaccactag

SEQ ID NO: 128421 - protein, 114 aa, Artificial Sequence
  derived and/or modified sequence
MNVLLGSVVIFATFVTLCNASCYFIPNEGVPGDSTRKCMDLKGNKHPINSEWQTDNCETCTCYETEISCCTLVSTPVGYDKDNCQRIFKKEDCKYIVVEKKDPKKTCSVSEWII

SEQ ID NO: 128422 - DNA, 345 bp, Artificial Sequence
  derived and/or modified sequence
atgaacgtgctgctgggcagcgtggtgatcttcgccaccttcgtgaccctgtgcaacgccagctgctacttcatccccaacgagggcgtgcccggcgacagcaccagaaagtgcatggacctgaagggcaacaagcaccccatcaacagcgagtggcagaccgacaactgcgagacctgcacctgctacgagaccgagatcagctgctgcaccctggtgagcacccccgtgggctacgacaaggacaactgccagagaatcttcaagaaggaggactgcaagtacatcgtggtggagaagaaggaccccaagaagacctgcagcgtgagcgagtggatcatctag

SEQ ID NO: 128423 - DNA, 345 bp, Artificial Sequence
  derived and/or modified sequence
atgaatgtgctcttaggaagcgttgtgatctttgcgactttcgtgaccctctgcaatgccagttgctatttcatcccaaacgaaggagtgcccggtgactccacccgcaagtgcatggatttgaaaggcaacaaacatcccattaacagcgaatggcagaccgataattgtgagacatgtacatgttacgagactgaaattagctgctgtaccctggtgagtacaccagtggggtatgataaagataactgccaaaggatctttaaaaaggaggattgcaaatatattgtggttgagaagaaggatccaaagaagacctgtagcgtctctgagtggattatatag

SEQ ID NO: 128424 - DNA, 345 bp, Artificial Sequence
  derived and/or modified sequence
atgaatgtgctgctgggctctgtggtgatctttgccacctttgtgaccctgtgcaatgccagctgctacttcatccccaatgaaggagtgcctggggacagcaccaggaagtgcatggacctgaagggcaacaagcaccccatcaacagcgagtggcagacagacaactgtgagacctgcacctgctatgaaacagagatcagctgctgcaccctggtgtccacccctgtgggctatgacaaggacaactgccagaggatcttcaagaaggaggactgcaagtacatcgtggtggagaagaaggaccccaagaagacctgcagcgtgtctgagtggatcatctag

SEQ ID NO: 128425 - DNA, 549 bp, Artificial Sequence
  derived and/or modified sequence
tcgaatgcgtggttgccctctccagtataaaagtttgatgcagctttgcctggatgtacctgtctataaggagtcctgcttatcacaatgaatgttctcctgggcagcgttgtgatctttgccaccttcgtgactttatgcaatgcatcatgctatttcatacctaatgagggagttccaggagattcaaccaggaaatgcatggatctcaaaggaaacaaacacccaataaactcggagtggcagactgacaactgtgagacatgcacttgctacgaaacagaaatttcatgttgcacccttgtttctacacctgtgggttatgacaaagacaactgccaaagaatcttcaagaaggaggactgcaagtatatcgtggtggagaagaaggacccaaaaaagacctgttctgtcagtgaatggataatctaatgtgcttctagtaggcacagggctcccaggccaggcctcattctcctctggcctctaatagtcaatgattgtgtagccatgcctatcagtaaaaagatttttgagcaaacacttgaa

SEQ ID NO: 128426 - DNA, 345 bp, Artificial Sequence
  derived and/or modified sequence
atgaacgtgctgctgggcagcgtggtgatcttcgccaccttcgtgactctgtgcaatgcatcatgttatttcatccccaacgaaggggtgcctggcgatagcacgcgcaaatgtatggatctcaagggaaataaacaccccatcaactccgagtggcagaccgataattgcgaaacatgcacgtgctacgagacagaaatctcttgctgcacactcgttagcactccagtcggatacgacaaggacaattgtcagcggatctttaaaaaggaggactgcaaatacatagtcgtggagaagaaggacccgaagaagacgtgctccgtgagcgaatggattatctag

SEQ ID NO: 128427 - DNA, 345 bp, Artificial Sequence
  derived and/or modified sequence
atgaatgtacttctgggttccgtggttattttcgccacgtttgtaaccctttgcaatgcaagctgctatttcatccctaacgagggagtcccgggagactcaacccgcaaatgtatggatctgaaaggaaacaaacaccctattaattccgaatggcagactgacaactgcgagacgtgtacatgttacgaaacagagatctcttgctgtacactggtgagtaccccagtggggtacgacaaagataattgtcagcgtatttttaagaaagaggattgtaagtacatcgtggtggaaaagaaggatcctaagaaaacctgctcagtgtcagaatggataatttag

SEQ ID NO: 128428 - protein, 577 aa, Artificial Sequence
  derived and/or modified sequence
MPKTISVRVTTMDAELEFAIQPNTTGKQLFDQVVKTIGLREVWFFGLQYQDTKGFSTWLKLNKKVTAQDVRKESPLLFKFRAKFYPEDVSEELIQDITQRLFFLQVKEGILNDDIYCPPETAVLLASYAVQSKYGDFNKEVHKSGYLAGDKLLPQRVLEQHKLNKDQWEERIQVWHEEHRGMLREDAVLEYLKIAQDLEMYGVNYFSIKNKKGSELWLGVDALGLNIYEQNDRLTPKIGFPWSEIRNISFNDKKFVIKPIDKKAPDFVFYAPRLRINKRILALCMGNHELYMRRRKPDTIEVQQMKAQAREEKHQKQMERAMLENEKKKREMAEKEKEKIEREKEELMERLKQIEEQTKKAQQELEEQTRRALELEQERKRAQSEAEKLAKERQEAEEAKEALLQASRDQKKTQEQLALEMAELTARISQLEMARQKKESEAVEWQQKAQMVQEDLEKTRAELKTAMSTPHVAEPAENEQDEQDENGAEASADLRADAMAKDRSEEERTTEAEKNERVQKHLKALTSELANARDESKKTANDMIHAENMRLGRDKYKTLRQIRQGNTKQRIDEFESM

SEQ ID NO: 128429 - DNA, 1734 bp, Artificial Sequence
  derived and/or modified sequence
atgcccaagaccatcagcgtgagagtgaccaccatggacgccgagctggagttcgccatccagcccaacaccaccggcaagcagctgttcgaccaggtggtgaagaccatcggcctgagagaggtgtggttcttcggcctgcagtaccaggacaccaagggcttcagcacctggctgaagctgaacaagaaggtgaccgcccaggacgtgagaaaggagagccccctgctgttcaagttcagagccaagttctaccccgaggacgtgagcgaggagctgatccaggacatcacccagagactgttcttcctgcaggtgaaggagggcatcctgaacgacgacatctactgcccccccgagaccgccgtgctgctggccagctacgccgtgcagagcaagtacggcgacttcaacaaggaggtgcacaagagcggctacctggccggcgacaagctgctgccccagagagtgctggagcagcacaagctgaacaaggaccagtgggaggagagaatccaggtgtggcacgaggagcacagaggcatgctgagagaggacgccgtgctggagtacctgaagatcgcccaggacctggagatgtacggcgtgaactacttcagcatcaagaacaagaagggcagcgagctgtggctgggcgtggacgccctgggcctgaacatctacgagcagaacgacagactgacccccaagatcggcttcccctggagcgagatcagaaacatcagcttcaacgacaagaagttcgtgatcaagcccatcgacaagaaggcccccgacttcgtgttctacgcccccagactgagaatcaacaagagaatcctggccctgtgcatgggcaaccacgagctgtacatgagaagaagaaagcccgacaccatcgaggtgcagcagatgaaggcccaggccagagaggagaagcaccagaagcagatggagagagccatgctggagaacgagaagaagaagagagagatggccgagaaggagaaggagaagatcgagagagagaaggaggagctgatggagagactgaagcagatcgaggagcagaccaagaaggcccagcaggagctggaggagcagaccagaagagccctggagctggagcaggagagaaagagagcccagagcgaggccgagaagctggccaaggagagacaggaggccgaggaggccaaggaggccctgctgcaggccagcagagaccagaagaagacccaggagcagctggccctggagatggccgagctgaccgccagaatcagccagctggagatggccagacagaagaaggagagcgaggccgtggagtggcagcagaaggcccagatggtgcaggaggacctggagaagaccagagccgagctgaagaccgccatgagcaccccccacgtggccgagcccgccgagaacgagcaggacgagcaggacgagaacggcgccgaggccagcgccgacctgagagccgacgccatggccaaggacagaagcgaggaggagagaaccaccgaggccgagaagaacgagagagtgcagaagcacctgaaggccctgaccagcgagctggccaacgccagagacgagagcaagaagaccgccaacgacatgatccacgccgagaacatgagactgggcagagacaagtacaagaccctgagacagatcagacagggcaacaccaagcagagaatcgacgagttcgagagcatgtag

SEQ ID NO: 128430 - DNA, 1734 bp, Artificial Sequence
  derived and/or modified sequence
atgcctaaaacaattagtgttagagtgactactatggatgccgaactagaatttgctatacaacccaacacaacaggaaaacagctctttgaccaggtggttaaaaccatcggcttaagggaagtctggttcttcggtttgcaataccaggacacaaaaggcttttctacctggctgaaactcaacaagaaagtgacagctcaggacgttcgcaaggagtcaccgctgctgtttaagtttcgggccaagttctatcccgaagatgtgtccgaagagcttatccaagacatcacccagcggctgtttttcctccaagtgaaagagggtatcctgaacgacgacatctattgtccccctgagacagccgtgctgctggcctcctacgccgtccagtcgaagtatggagattttaataaagaggtgcacaaatcgggataccttgccggcgataagctcctacctcagagggtgctcgaacagcataaactgaacaaggaccagtgggaagagcggatacaggtgtggcacgaagaacacagaggcatgctccgggaggatgctgttctggagtatctgaaaatcgcccaagacctcgagatgtatggggtgaattatttctcaatcaagaataagaagggatcagagctgtggttaggagtcgacgcactcggattgaacatatacgagcagaacgaccgacttacgcccaagattgggttcccttggagtgaaatcagaaatatctcgttcaacgataagaaattcgtgatcaagcccattgacaagaaagccccggatttcgtattttatgccccccgcctgcgaatcaataagaggattcttgccctatgcatgggaaatcacgaattatacatgcggagaaggaaacccgataccattgaggtacagcaaatgaaggcccaagcgagagaggaaaaacaccagaagcaaatggagagagcaatgttggagaatgaaaagaaaaaaagggaaatggcggagaaagagaaagagaagatcgagcgggagaaagaagagctgatggagcgtttgaaacagatcgaagaacagacaaaaaaggcacagcaggaactggaggagcagacccgccgagccttggagctcgagcaggagagaaagagggcccaaagtgaggctgagaaattggcaaaggaacgtcaggaggcagaggaagcgaaggaggctctgctacaggcatcacgcgaccagaagaagacccaggagcaactggctctggagatggctgagctgacagcccggatctctcagctggaaatggcccgacaaaaaaaagagtccgaggcagtcgaatggcagcagaaagcacaaatggtacaggaggatctggagaaaacccgcgcagagttgaaaaccgcaatgtctactccccacgttgctgagccagccgagaatgaacaggatgaacaggacgagaatggggcagaggcaagcgctgacctgcgagccgatgccatggccaaggataggtctgaagaggaacgcacaaccgaagctgaaaagaatgagagagtgcagaagcatctgaaagccctcacctcagagctggctaatgccagggacgagtctaagaagaccgctaatgacatgatccatgccgagaacatgcgtctcggacgcgataaatacaagactcttcgtcagatcagacagggtaatactaaacaacgcatcgacgagttcgagtctatgtag

SEQ ID NO: 128431 - DNA, 1734 bp, Artificial Sequence
  derived and/or modified sequence
atgcccaagaccatctctgtgcgggtgaccaccatggatgctgagctggagtttgccatccagcccaacaccaccgggaagcagctgtttgaccaggtggtgaagaccatcggcctgcgggaggtgtggttcttcggcctgcagtaccaggacaccaagggcttcagcacctggctgaagctgaacaagaaggtgacagcccaggatgtgaggaaggagagccccctgctcttcaagttccgggccaagttctacccagaagatgtgtctgaggagctgatccaggacatcacccagaggctcttcttcctgcaggtgaaggagggcatcctgaatgatgacatctactgccccccagagacagctgtgctgctggccagctatgctgtgcagagcaagtacggggacttcaacaaggaggtgcacaagagcggctacctggccggggacaagctgctgccccagagggtgctggagcagcacaagctgaacaaggaccagtgggaggagcgcatccaggtgtggcatgaggagcaccggggcatgctgagagaagatgctgtgctggagtacctgaagatcgcccaggacctggagatgtatggagtgaactacttcagcatcaagaacaagaagggcagcgagctgtggctgggcgtggatgccctgggcctgaacatctatgagcagaatgaccggctgacccccaagattggcttcccctggagcgagatccggaacatctccttcaatgacaagaagtttgtgatcaagcccatcgacaagaaggccccagactttgtgttctacgccccccggctgcgcatcaacaagaggatcctggccctgtgcatgggcaaccacgagctgtacatgagaagaaggaagccagacaccatcgaggtgcagcagatgaaggcccaggcccgggaggagaagcaccagaagcagatggagcgggccatgctggagaatgagaagaagaagcgggagatggccgagaaggagaaggagaagattgaaagagagaaggaggagctgatggagcggctgaagcagatcgaggagcagaccaagaaggcccagcaggagctggaggagcagacccggcgggccctggagctggagcaggagaggaagagggcccagagcgaggccgagaagctggccaaggagcggcaggaggccgaggaggccaaggaggccctgctgcaggccagccgggaccagaagaagacccaggagcagctggccctggagatggccgagctgacagcccgcatcagccagctggagatggcccggcagaagaaggagagcgaggccgtggagtggcagcagaaggcccagatggtgcaggaggacctggagaagaccagggctgagctgaagacagccatgagcacccctcatgtggccgagccagcagaaaatgagcaggatgagcaggatgaaaatggagctgaggccagcgctgacctgcgggcagatgccatggccaaggacagaagtgaggaggagaggaccacagaggccgagaagaatgaaagagtgcagaagcacctgaaggccctgaccagcgagctggccaatgccagagatgagagcaagaagacagccaatgacatgattcatgctgagaacatgaggctgggccgggacaagtacaagaccctgcggcagatccggcagggcaacaccaagcagagaattgatgaatttgagagcatgtag

SEQ ID NO: 128432 - DNA, 1734 bp, Artificial Sequence
  derived and/or modified sequence
atgcccaagaccatcagcgtgcgggtgaccaccatggacgccgagctggagtttgccattcaacctaatacaactggcaagcagctatttgaccaggtggtgaaaacaattgggttacgagaagtatggttcttcggccttcagtaccaggacaccaaggggttcagtacatggcttaagctaaacaagaaagttaccgctcaggacgtgaggaaggagtcaccactgttgttcaagttccgcgctaaattctatcccgaagatgtgagcgaagagttgatccaagacattactcagcgtctgttcttcctccaggtcaaggagggtattctcaacgatgatatatactgtccgccggagactgccgtgttgctagcttcctacgctgttcagagcaagtatggcgattttaataaagaagtccataaaagtgggtatcttgctggggataaactattacctcagagagttctggagcagcacaaactgaataaagatcaatgggaggaacggatccaagtgtggcatgaggagcacaggggaatgctgagagaagacgccgtgctggaataccttaaaatcgcccaggatttggaaatgtacggagtgaattacttctcaattaaaaacaaaaaaggctctgaattatggctgggcgtggatgccttgggactgaacatctacgagcaaaatgatagactcaccccaaaaatcggcttcccctggtctgagatccgcaatatctcattcaatgacaaaaaattcgtcataaagcccattgataaaaaagctccagatttcgttttctacgcaccccgtctgcggatcaacaagcggatcctcgccctgtgtatgggaaatcatgagctgtacatgcgcaggagaaagcccgacacgatagaagtgcagcaaatgaaggcccaagctagagaggaaaaacaccagaaacagatggaacgcgccatgctggagaatgagaagaagaaacgcgagatggcagaaaaagagaaagagaaaattgaacgagagaaagaggaactaatggaaagactgaaacaaatcgaggagcaaacaaaaaaagcacagcaggaattagaggaacagaccaggcgggccctggaattggagcaggagcgcaagcgggctcagtccgaggccgaaaagctggcaaaggaacgacaagaagccgaagaagccaaagaggccctgctccaggcaagccgggatcagaagaagacgcaggaacaattggcccttgaaatggcagaactgaccgcgaggatttcacagctggagatggcaagacagaaaaaggagagcgaagccgtcgaatggcagcaaaaggcccagatggtccaagaagatctggaaaagacacgggcagagctgaaaacggcgatgtccacaccccatgtcgctgaacctgccgagaatgaacaggacgaacaggacgagaatggggctgaggctagcgcagatctcagagccgacgccatggccaaggaccggagcgaagaagagcgaacgacggaggccgagaagaatgaacgtgtccaaaagcatttaaaggctctaacctccgagctggcaaacgcacgagatgagtctaagaaaactgccaacgacatgatacacgccgagaacatgcggcttggccgggataagtacaaaacactgcggcaaatcagacagggcaacaccaagcagaggattgacgagttcgagtctatgtag

SEQ ID NO: 128433 - DNA, 3942 bp, Artificial Sequence
  derived and/or modified sequence
gggtttgtgaagtcgtggcccgttagcaggaagcctaacagtcgccccgacgctagtgagggacccaatctgagtccccggccagccgaatccaagccgtgtgtactgcgtgctcagcactgcccgacagtcctagctaaacttcgccaactccgctgcctttgccgccaccatgcccaaaacgatcagtgtgcgtgtgaccaccatggatgcagagctggagtttgccatccagcccaacaccaccgggaagcagctatttgaccaggtggtgaaaactattggcttgagggaagtttggttctttggtctgcagtaccaggacactaaaggtttctccacctggctgaaactcaataagaaggtgactgcccaggatgtgcggaaggaaagccccctgctctttaagttccgtgccaagttctaccctgaggatgtgtccgaggaattgattcaggacatcactcagcgcctgttctttctgcaagtgaaagagggcattctcaatgatgatatttactgcccgcctgagaccgctgtgctgctggcctcgtatgctgtccagtctaagtatggcgacttcaataaggaagtgcataagtctggctacctggccggagacaagttgctcccgcagagagtcctggaacagcacaaactcaacaaggaccagtgggaggagcggatccaggtgtggcatgaggaacaccgtggcatgctcagggaggatgctgtcctggaatatctgaagattgctcaagatctggagatgtatggtgtgaactacttcagcatcaagaacaagaaaggctcagagctgtggctgggggtggatgccctgggtctcaacatctatgagcagaatgacagactaactcccaagataggcttcccctggagtgaaatcaggaacatctctttcaatgataagaaatttgtcatcaagcccattgacaaaaaagccccggacttcgtcttctatgctccccggctgcggattaacaagcggatcttggccttgtgcatggggaaccatgaactatacatgcgccgtcgcaagcctgataccattgaggtgcagcagatgaaggcacaggcccgggaggagaagcaccagaagcagatggagcgtgctatgctggaaaatgagaagaagaagcgtgaaatggcagagaaggagaaagagaagattgaacgggagaaggaggagctgatggagaggctgaagcagatcgaggaacagactaagaaggctcagcaagaactggaagaacagacccgtagggctctggaacttgagcaggaacggaagcgtgcccagagcgaggctgaaaagctggccaaggagcgtcaagaagctgaagaggccaaggaggccttgctgcaggcctcccgggaccagaaaaagactcaggaacagctggccttggaaatggcagagctgacagctcgaatctcccagctggagatggcccgacagaagaaggagagtgaggctgtggagtggcagcagaaggcccagatggtacaggaagacttggagaagacccgtgctgagctgaagactgccatgagtacacctcatgtggcagagcctgctgagaatgagcaggatgagcaggatgagaatggggcagaggctagtgctgacctacgggctgatgctatggccaaggaccgcagtgaggaggaacgtaccactgaggcagagaagaatgagcgtgtgcagaagcacctgaaggccctcacttcggagctggccaatgccagagatgagtccaagaagactgccaatgacatgatccatgctgagaacatgcgactgggccgagacaaatacaagaccctgcgccagatccggcagggcaacaccaagcagcgcattgacgaatttgagtctatgtaatgggcacccagcctctagggacccctcctccctttttccttgtccccacactcctacacctaactcacctaactcatactgtgctggagccactaactagagcagccctggagtcatgccaagcatttaatgtagccatgggaccaaacctagccccttagcccccacccacttccctgggcaaatgaatggctcactatggtgccaatggaacctcctttctcttctctgttccattgaatctgtatggctagaatatcctacttctccagcctagaggtactttccacttgattttgcaaatgcccttacacttactgttgtcctatgggagtcaagtgtggagtaggttggaagctagctcccctcctctcccctaccactgtcttcttcagggtcctgagatttacacggttggagtgttatgcggtctagggaatgagacaggacctaggatatcttctccaggatgtcaactgacctaaaatttgccctcccatcccgtttagagttatttaggctttgtaacgattgggggataaaaagatgttcagtcatttttgtttctacctcccagatcggatctgttgcaaactcagcctcaataagccttgtcgttgactttagggactcaatttctccccagggtggatgggggaaatggtgccttcaagaccttcaccaaacatactagaagggcattggccattctattgtggcaaggctgagtagaagatcctaccccaattccttgtaggagtataggccggtctaaagtgagctctatgggcagatctaccccttacttattattccagatctgcagtcacttcgtgggatctgcccctccctgcttcaatacccaaatcctctccagctataacagtagggatgagtacccaaaagctcagccagccccatcaggactcttgtgaaaagagaggatatgttcacacctagcgtcagtattttccctgctaggggttttaggtctcttcccctctcagagctacttgggccatagctcctgctccacagccatcccagccttggcatctagagcttgatgccagtaggctcaactagggagtgagtgcaaaaagctgagtatggtgagagaagcctgtgccctgatccaagtttactcaaccctctcaggtgaccaaaatccccttctcatcactcccctccaaagaggtgactgggccctgcctctgtttgacaaacctctaacccaggtcttgacaccagctgttctgtcccttggagctgtaaaccagagagctgctggggattctggcctagtcccttccacacccccaccccttgctctcaacccaggagcatccacctccttctctgtctcatgtgtgctcttcttctttctacagtattatgtactctactgatatctaaatattgatttctgccttccttgctaatgcaccattagaagatattagtcttggggcaggatgattttggcctcattactttaccacccccacacctggaaagcatatactatattacaaaatgacattttgccaaaattattaatataagaagctttcagtattagtgatgtcatctgtcactataggtcatacaatccattcttaaagtacttgttatttgtttttattattactgtttgtcttctccccagggttcagtcctcaaggggccatcctgtcccaccatgcagtgcccctagcttagagcctccctcaattccccctggccaccaccccccactctgtgcctgaccttgaggagtcttgtgtgcattgctgtgaattagctcacttggtgatatgtcctatattggctaaattgaaacctggaattgtggggcaatctattaatagctgccttaaagtcagtaacttacccttagggaggctgggggaaaaggttagattttgtattcaggggttttttgtgtactttttgggttttttaaaaattgtttttggaggggtttatgctcaatccatgttctatttcagtgccaataaaatttaggaagactt

SEQ ID NO: 128434 - DNA, 1734 bp, Artificial Sequence
  derived and/or modified sequence
atgcccaaaacgatttccgtgagggtaactacgatggatgcggaactcgagttcgctatacagcctaatactaccggaaaacagctcttcgaccaagttgtcaagactattgggctccgggaagtctggttcttcggtctgcagtaccaagatacgaagggcttctcaacctggctcaagctgaataaaaaagtgacagcgcaggatgttagaaaagagtcacccctgctgtttaagttccgagcaaaattttaccctgaggacgtcagtgaagaattgattcaagatatcacacagagactcttttttttgcaggtgaaggagggcatcctgaatgatgacatctattgcccaccagagaccgcggtcctgctggcctcatacgcagtccagagcaaatatggggattttaacaaagaggtgcataagtcaggatatttagctggggacaaactgctaccccaacgtgtgctggagcagcataagctcaacaaagaccagtgggaggagcggatccaggtttggcatgaggagcaccgaggaatgttgagggaggatgcagtcctcgaatatctgaagattgcccaagatcttgaaatgtacggggtgaattacttttcaatcaaaaacaaaaaggggagtgaactttggcttggagtggacgctctgggactgaatatctacgagcagaacgatcgacttacccccaagatcggcttcccatggtcagagatccggaatatttcctttaacgataaaaagtttgttatcaagcctatcgataaaaaggcacctgatttcgtcttctatgccccacggctgagaattaacaaaaggatactggcactgtgtatgggcaaccatgagctgtacatgcgccgtagaaaacctgacaccatcgaagttcagcagatgaaggctcaggcacgcgaggaaaaacaccagaaacaaatggaaagggctatgctggagaacgagaaaaagaagagggagatggccgagaaagaaaaggagaagatagagcgggagaaggaagaactgatggagcgcttgaaacagatagaggagcaaaccaagaaagcccaacaggagttagaagaacaaacacggagagccctcgagctggaacaggagagaaaaagagcccagtctgaggccgagaaattggcaaaggaaagacaggaggctgaggaagccaaggaagcgctgctgcaggcgagcagggatcagaaaaagacccaagaacagctagcactggagatggccgagttgaccgctcgcatttcccagctggagatggcaaggcagaagaaagagagcgaggctgtggagtggcagcagaaagcccagatggttcaggaagacctcgagaaaaccagagccgaattgaagaccgcaatgtccactccccatgtagcagaacccgctgaaaacgaacaggacgaacaggacgagaacggggctgaggctagcgctgacctccgtgcagacgccatggcaaaggaccgctcagaagaagagaggaccacagaagccgaaaagaatgagcgggtgcaaaagcatctaaaagcactgacgtctgaactggccaacgcccgagacgagtcaaagaagacagcaaatgacatgattcacgccgaaaatatgcggctgggccgtgataaatacaaaactctccgccagatccggcaggggaacactaagcagcgtattgatgagttcgaatccatgtag

SEQ ID NO: 128435 - protein, 358 aa, Artificial Sequence
  derived and/or modified sequence
MEQWDHFHNQQEDTDSCSESVKFDARSMTALLPPNPKNSPSLQEKLKSFKAALIALYLLVFAVLIPLIGIVAAQLLKWETKNCSVSSTNANDITQSLTGKGNDSEEEMRFQEVFMEHMSNMEKRIQHILDMEANLMDTEHFQNFSMTTDQRFNDILLQLSTLFSSVQGHGNAIDEISKSLISLNTTLLDLQLNIENLNGKIQENTFKQQEEISKLEERVYNVSAEIMAMKEEQVHLEQEIKGEVKVLNNITNDLRLKDWEHSQTLRNITLIQGPPGPPGEKGDRGPTGESGPRGFPGPIGPPGLKGDRGAIGFPGSRGLPGYAGRPGNSGPKGQKGEKGSGNTLRPVQLTDHIRAGPS

SEQ ID NO: 128436 - protein, 132 aa, Artificial Sequence [sequence omitted]

SEQ ID NO: 128437 - DNA, 1077 bp, Artificial Sequence
  derived and/or modified sequence
atggagcaatgggaccactttcacaaccaacaggaggatacggatagttgtagtgagtcggtgaaatttgacgcacggagtatgacggctcttctgcctcccaatcctaagaactcccctagtctccaggagaagctgaaaagcttcaaagccgctcttatcgccctttaccttctcgtttttgccgtccttatcccccttattgggattgtagccgctcagctcctgaaatgggaaacaaagaactgcagcgtgtccagcaccaatgcaaacgatatcacgcagagcctcaccggcaagggcaatgactccgaggaagaaatgcgtttccaggaggtctttatggagcacatgagtaacatggaaaaaaggatccagcacatccttgatatggaggcgaacttaatggacactgagcatttccagaatttttctatgactacagatcaacgatttaacgacattctgctgcagctgagcacacttttctcatccgtgcaggggcacggcaatgccatagatgagatctccaagtctctgatctccctcaacacgacactgctggacctgcagttgaatatagaaaacctgaatggcaagatccaggagaatacctttaaacagcaggaggaaatttccaagcttgaagagcgggtctataacgtgagcgccgagattatggcaatgaaagaggaacaggtgcacctcgaacaggaaatcaagggggaggtgaaagtgttgaataatattacaaatgacctcaggttgaaggactgggagcacagccagaccttgaggaacatcactctcattcagggccctcctggacctccgggagaaaaaggggaccggggacctacaggggagtccggtcctcgcggattcccagggccgataggccctccggggctgaagggagaccgcggggctattggttttccaggatctcgcgggttgccaggctacgcggggcgccccggcaactccggtcccaaaggccagaagggcgagaagggttcaggcaacaccttacgtcctgtccagctgacagaccacatccgcgcgggccccagttag

SEQ ID NO: 128438 - DNA, 195 bp, Artificial Sequence
  derived and/or modified sequence
atggagcaatgggatcacttccataaccaacaggaggacaccgattcttgctccgagagcgttaaattcgatgcccgctcaatgacggccctactgccgccaaatccaaaaaatagccctagcttacaggaaaaactcaaatcatttaaagccgcgttgattgctctttatctgctcgtgttcgcagtcttgtag

SEQ ID NO: 128439 - DNA, 399 bp, Artificial Sequence
  derived and/or modified sequence
atggcaatgaaagaagagcaggtgcatctcgaacaggaaattaaaggcgaagtcaaggttctgaacaatataacaaatgacctgcggctcaaggactgggagcattctcaaacgctgcgaaacattactctgatccagggccccccaggcccccccggggaaaagggagataggggtcctaccggtgagtcaggacctagaggtttccctggtcccataggaccaccaggattgaaaggggataggggggccattggatttcccggctccagagggctgcctggatacgctggaaggcctggaaacagcggcccgaaagggcagaagggtgaaaaagggagcggcaataccctgcggcccgtgcagctgacagatcacattcgtgccggcccaagttag

SEQ ID NO: 128440 - DNA, 1077 bp, Artificial Sequence
  derived and/or modified sequence
atggagcagtgggaccacttccacaaccagcaggaggacacagacagctgcagcgagagcgtgaagtttgatgcccgctccatgacagccctgctgccccccaaccccaagaacagccccagcctgcaggagaagctgaagagcttcaaggccgccctgattgccctgtacctgctggtgtttgctgtgctgatccccctcatcggcatcgtggccgcccagctgctgaagtgggagaccaagaactgcagcgtgagcagcaccaatgccaatgacatcacccagagcctgactggaaaaggaaatgacagcgaggaggagatgaggttccaggaggtgttcatggagcacatgagcaacatggagaagaggatccagcacatcctggacatggaggccaacctgatggacacagagcacttccagaacttctccatgaccacagaccagcgcttcaatgacatcctgctgcagctgagcaccctcttcagctctgtgcagggccatggaaatgccattgatgagatcagcaagagcctcatcagcctgaacaccaccctgctggacctgcagctgaacatcgagaacctgaatggcaagatccaggagaacaccttcaagcagcaggaggagatcagcaagctggaggagcgggtgtacaacgtgtctgctgagatcatggccatgaaggaggagcaggtgcacctggagcaggagatcaagggggaggtgaaggtgctgaacaacatcaccaatgacctgcggctgaaggactgggagcacagccagaccctgaggaacatcaccctcatccagggccccccaggccccccaggagagaagggggaccggggccccactggagagagcggcccccggggcttccctggccccatcggccccccaggcctgaagggggacagaggagccatcggcttccctggcagccggggcctgcccggctacgccggccggcccggcaacagcggccccaagggccagaagggggagaagggcagcggcaacaccctgcggcctgtgcagctgacagaccacatccgggccggccccagctag

SEQ ID NO: 128441 - DNA, 195 bp, Artificial Sequence
  derived and/or modified sequence
atggagcagtgggaccacttccacaaccagcaggaggacacagacagctgcagcgagagcgtgaagtttgatgcccgctccatgacagccctgctgccccccaaccccaagaacagccccagcctgcaggagaagctgaagagcttcaaggccgccctgattgccctgtacctgctggtgtttgctgtgctgtag

SEQ ID NO: 128442 - DNA, 399 bp, Artificial Sequence
  derived and/or modified sequence
atggccatgaaggaggagcaggtgcacctggagcaggagatcaagggggaggtgaaggtgctgaacaacatcaccaatgacctgcggctgaaggactgggagcacagccagaccctgaggaacatcaccctcatccagggccccccaggccccccaggagagaagggggaccggggccccactggagagagcggcccccggggcttccctggccccatcggccccccaggcctgaagggggacagaggagccatcggcttccctggcagccggggcctgcccggctacgccggccggcccggcaacagcggccccaagggccagaagggggagaagggcagcggcaacaccctgcggcctgtgcagctgacagaccacatccgggccggccccagctag

SEQ ID NO: 128443 - DNA, 2826 bp, Artificial Sequence
  derived and/or modified sequence
taggtttcaattgtaaagagagagaagtggataaatcagtgctgctttctttaggacgaaagaagtatggagcagtgggatcactttcacaatcaacaggaggacactgatagctgctccgaatctgtgaaatttgatgctcgctcaatgacagctttgcttcctccgaatcctaaaaacagcccttcccttcaagagaaactgaagtccttcaaagctgcactgattgccctttacctcctcgtgtttgcagttctcatccctctcattggaatagtggcagctcaactcctgaagtgggaaacgaagaattgctcagttagttcaactaatgcaaatgatataactcaaagtctcacgggaaaaggaaatgacagcgaagaggaaatgagatttcaagaagtctttatggaacacatgagcaacatggagaagagaatccagcatattttagacatggaagccaacctcatggacacagagcatttccaaaatttcagcatgacaactgatcaaagatttaatgacattcttctgcagctaagtaccttgttttcctcagtccagggacatgggaatgcaatagatgaaatctccaagtccttaataagtttgaataccacattgcttgatttgcagctcaacatagaaaatctgaatggcaaaatccaagagaataccttcaaacaacaagaggaaatcagtaaattagaggagcgtgtttacaatgtatcagcagaaattatggctatgaaagaagaacaagtgcatttggaacaggaaataaaaggagaagtgaaagtactgaataacatcactaatgatctcagactgaaagattgggaacattctcagaccttgagaaatatcactttaattcaaggtcctcctggacccccgggtgaaaaaggagatcgaggtcccactggagaaagtggtccacgaggatttccaggtccaataggtcctccgggtcttaaaggtgatcggggagcaattggctttcctggaagtcgaggactcccaggatatgccggaaggccaggaaattctggaccaaaaggccagaaaggggaaaaggggagtggaaacacattaagaccagtacaactcactgatcatattagggcagggccctcttaagatcaggtgggttgggcgggacatcctctgctaccatctcattaaaaggcccttcacctctggacaagtcatctgcacaactgacttccaagatccttttgtgactcctccaaatgactttggttcccgtgttgtacctgacttccacatggccttctctcctggtccctggtgctgtttgggcctctgctcccatgctcatacctcttcttactccaattactccaccatcacctctctcccctatcacccccagcctggacacctctcatgcacggactggagggctgctccaaccagtcctcagttctctgccacccattgacctagagtcttgaacccaatttaatttattgggttctaggagaactgctgtgttctcaccctaacttggaagagtgatgtttcagtcaagcaaagcgattcctaccatacaatataacacttgtgtgaggctctgtcctaaatatctcaattaccaatatgtggtttggtagtatttctcgccatgctttgctcatgcgcaatgagactacaactagggtgtaaattttaagtatcccatctaaaactcatacaatgataggaaaaatccatttgtttttcatttgatttttactgaggaatcagctcaatcttcaatgaatactggtctctttccaaagcatttttgatcaaagtaaagactgagtcaagggctttttttttttctttttcttgttttaagagacagagccttgttctattgcacaggctggactacacgcattcacctagagtctagaacacaatttaatttattgggttctaggagaactgtcatgagtattgataatatgagagttctttatattcaaacattattctcaaccagagatagggatgtcatagaagaaaatccattcattcaatcattaattcacatgtccattatgtacctccatgagctggacataacagctaataagagataattgtctctggttttacagagctaattgtccctaagagatgtagacaaatgaacaagcaattacaatacatctaagctatactgggggaggaacagggctggataggtatgcagaggagataaaaaaattttaattccttagaatattttttaaaaattgattcttattttaccttctcatcttcttattttccaaattacagcatatatatatatatatatatatatatatatatatatatatatatatatattttttttttttttttttttttttttttaagttttgaagtgtagtcgagcttgggcaatttatccaacccatttaaaccaaaaataaaacttttcatgtattacctggtcatttcaaacaaaaatattttgatcatgaaaaagaataccaatattcttttgttctaaaaatctcttatgggattacatgttatatttttggtttctctctactgatcaacagactacattttcacaactcttctttcctttacgttttaacacacagacccaagattcatactattaagattctagtagaactctagatggtatgcctctgtgtatctcagcatttttattcccactcttgtataatgaacatgttaacacctacctcacagggttgttgtgaggatcaagtaagatattgtgtgtgtgaagatgctctgtgaaatcataaagtcctttaaagatgt

SEQ ID NO: 128444 - DNA, 353 bp, Artificial Sequence
  derived and/or modified sequence
ctcagggttatagaacagccgccttcagctattctcccccagggctctgcagaaccttcccacctttcagcaggctggagtgcagtggcatgatcgtgactcactgcagccttccactcctgggctcaagcaatcctactgcctcaggctcccagaagtatggagcagtgggatcactttcacaatcaacaggaggacactgatagctgctccgaatctgtgaaatttgatgctcgctcaatgacagctttgcttcctccgaatcctaaaaacagcccttcccttcaagagaaactgaagtccttcaaagctgcactgattgccctttacctcctcgtgtttgcagttctcat

SEQ ID NO: 128445 - DNA, 955 bp, Artificial Sequence
  derived and/or modified sequence
aattgtaaagagagagaagtggataaatcagtgctgctttctttaggacgaaagaagtatggagcagtgggatcactttcacaatcaacaggaggacactgatagctgctccgaatctgtgaaatttgatgctcgctcaatgacagctttgcttcctccgagaaatcagtaaattagaggagcgtgtttacaatgtatcagcagaaattatggctatgaaagaagaacaagtgcatttggaacaggaaataaaaggagaagtgaaagtactgaataacatcactaatgatctcagactgaaagattgggaacattctcagaccttgagaaatatcactttaattcaaggtcctcctggacccccgggtgaaaaaggagatcgaggtcccactggagaaagtggtccacgaggatttccaggtccaataggtcctccgggtcttaaaggtgatcggggagcaattggctttcctggaagtcgaggactcccaggatatgccggaaggccaggaaattctggaccaaaaggccagaaaggggaaaaggggagtggaaacacattaagaccagtacaactcactgatcatattagggcagggccctcttaagatcaggtgggttgggcgggacatcctctgctaccatctcattaaaaggcccttcacctctggacaagtcatctgcacaactgacttccaagatccttttgtgactcctccaaatgactttggttcccgtgttgtacctgacttccacatggccttctctcctggtccctggtgctgtttgggcctctgctcccatgctcatacctcttcttactccaattactccaccatcacctctctcccctatcacccccagcctggacacctctcatgcacggactggagggctgctccaaccagtcctcagttctctgccacccattgacctagagtcttgaacccaattt

SEQ ID NO: 128446 - DNA, 1077 bp, Artificial Sequence
  derived and/or modified sequence
atggagcagtgggaccacttccacaaccagcaggaggacaccgactcttgcagcgagagtgtgaaattcgatgctaggtctatgacggccctactgcctcccaaccctaaaaacagtccttcactgcaggagaagctcaaaagctttaaagcagcacttatcgccctttacctcttggttttcgcggtgctcataccactgataggaatcgtagccgcccagttgttgaaatgggaaacaaaaaattgctcagtgtcctccaccaatgctaacgatatcactcagtctctgaccggcaaagggaacgacagcgaagaggagatgcgtttccaggaggtgttcatggagcacatgtcaaacatggaaaagcgcattcagcatatcctggatatggaagccaatttgatggatacggagcacttccagaacttttcaatgactaccgaccagcgcttcaatgacatacttcttcagttgtctaccctgttttcttcagttcagggccacggcaacgctattgacgagatatccaagagcttgatttcactcaataccactctgctcgacctgcaattgaacattgagaatttgaatggcaaaatccaagaaaatacatttaagcagcaagaagagatcagtaaactggaggagagggtgtataacgtcagcgcagagattatggctatgaaagaagagcaggtgcatttagaacaggaaatcaagggagaagtcaaagtgctcaacaatattaccaacgatctgaggctgaaggactgggagcacagccagactctgaggaatatcaccctgattcagggtcccccggggccaccaggcgaaaaaggagaccggggccctaccggcgaatctggcccaaggggattcccaggtccaatcggtcctcccgggcttaagggagacagaggagcaattgggtttccagggtcgcgtggattgccgggttatgccggacggccaggaaatagcggaccaaagggacagaaaggcgaaaagggctccggaaatactttacgccccgtccaacttactgaccacatacgggctggaccgtcttag

SEQ ID NO: 128447 - DNA, 195 bp, Artificial Sequence
  derived and/or modified sequence
atggagcagtgggaccacttccacaaccagcaggaggacaccgacagctgtagtgaatccgttaaatttgatgctcggtcaatgacagccctgctgcctcctaacccaaaaaattctccatcactgcaggagaagctcaagtcctttaaggcggcattgatcgcactctacctgctcgtgttcgccgtgttatag

SEQ ID NO: 128448 - DNA, 399 bp, Artificial Sequence
  derived and/or modified sequence
atggccatgaaggaggagcaggtgcacctggagcaggagatcaagggggaagttaaagttctgaacaacatcaccaacgacttgagactgaaagactgggaacatagccagactctccgcaacatcactctgatccagggcccccccgggcctcctggagagaaaggggatcgcgggccaactggtgaatccggcccaagagggtttccaggacccattgggcctcctggactcaaaggcgaccgtggagctatcggatttcccggaagccggggtctgccaggatatgccggacgccctggaaattcgggacccaaggggcaaaagggtgaaaaaggctccggaaacacactcagaccagtccagttgaccgatcatattagagccgggccttcttag

SEQ ID NO: 128449 - DNA, 1077 bp, Artificial Sequence
  derived and/or modified sequence
atggaacagtgggaccatttccacaaccagcaagaggacacggactcctgcagcgagtctgttaagttcgacgcccgatcaatgacggcactcctgccccctaacccaaaaaactctccttccctgcaggagaagctaaagtccttcaaagcagccctgatcgcactgtacctgttggtttttgcagtgctcatccctctcatcggcattgtggcagcacaattgctcaagtgggagactaagaattgtagtgtgtcctccacaaacgccaacgacattacccagtccctaacgggaaagggaaatgacagtgaagaggagatgcgcttccaggaggtttttatggagcacatgagtaatatggaaaaacggattcaacatattctggatatggaagctaatctcatggataccgaacacttccaaaacttttctatgaccaccgaccaacgcttcaatgacatccttctgcagctgtcaacactgttcagtagcgtccagggccatggaaatgctatcgatgaaatctcaaagtcgcttattagtctgaataccaccctcttagacctgcagctgaatatagagaacctgaacggcaaaatccaggaaaacacatttaaacaacaggaagagatcagtaaactggaagagagagtctacaacgtttcggcggagataatggctatgaaagaagagcaggtgcacttggagcaagaaattaagggcgaggtgaaagtgctcaataatatcacaaatgatctgcgcctgaaagactgggagcactcccagactctgagaaacatcaccctgatccaggggcctcccggaccaccaggagaaaaaggagatcggggtcccaccggtgaatccggtcccagaggcttcccaggccctatcggcccaccaggtctcaagggtgataggggcgctatcggtttcccgggttctagggggttgcccggatacgcagggagacccggtaatagcgggccaaaaggccagaagggagagaagggctcaggaaacacactaaggccagtgcagctgaccgaccacatcagagccggacccagttag

SEQ ID NO: 128450 - DNA, 195 bp, Artificial Sequence
  derived and/or modified sequence
atggagcagtgggaccactttcataatcagcaagaggacacagattcttgcagcgaatcggtcaaattcgatgcgcgatcaatgaccgctctgctcccaccaaatccaaagaactcaccttcactgcaggagaagctgaaatcattcaaggcggctctcattgcgctgtaccttctcgtgttcgcggtcctctag

SEQ ID NO: 128451 - DNA, 399 bp, Artificial Sequence
  derived and/or modified sequence
atggctatgaaagaagaacaggtccatcttgagcaggagattaagggcgaggtcaaggtgctgaataatattactaacgatctgcgacttaaagattgggaacacagccagactttgaggaatatcacactgatccaaggcccaccagggcctcctggagaaaagggcgatcgcggtccaacaggtgagagtgggcctagagggtttccgggacccattggtccccctggactgaaaggcgatcgcggagcaatcgggtttcctggttccaggggactgccgggttacgctgggaggcctggcaactcagggccaaagggccagaaaggagagaaggggtcagggaacacgctgagaccagtacaactcaccgaccacattagagctggtccctcatag

SEQ ID NO: 128452 - DNA, 1077 bp, Artificial Sequence
  derived and/or modified sequence
atggaacagtgggatcacttccataatcagcaggaggatacagacagctgctctgaaagtgtgaaattcgacgcgaggagcatgaccgccctgttgcctccaaaccccaagaattcgccatcattacaggaaaaactcaaatcttttaaggcggcccttatagccttgtatctcctcgtgttcgcagtcctcatccctttaattggtattgtcgccgcgcagctcctgaagtgggagaccaaaaattgctcagtgtcttcaacaaacgcaaatgacatcactcagagcctgacaggcaaagggaacgactcagaggaggagatgcgcttccaggaagtatttatggagcatatgtctaatatggagaaaagaatccagcatatcctggacatggaggccaatctgatggacaccgagcatttccagaatttctcaatgaccactgatcagagatttaacgatattctcctacaactgtccactctcttctcttccgtccaaggtcatggcaatgccattgatgagatatccaagtctttgatcagtcttaacaccaccctgctcgatctgcaactcaatattgagaatctgaacggcaagatccaggagaatacctttaagcagcaagaggaaatttctaagctcgaagaacgcgtatataacgtttcggccgagataatggccatgaaggaggagcaggttcaccttgagcaggagatcaaaggagaagtcaaagtcctgaataacatcacaaatgatctaaggctgaaggattgggagcacagccagacactcaggaatattaccctcatccagggtcctcctggtccacccggagagaaaggagaccggggaccaaccggtgaaagcggcccgcggggatttcccgggccgataggcccacccggactaaagggcgatcggggtgccattgggtttccaggctcacggggacttcccgggtatgctggacggcctggaaattctgggcccaaagggcaaaaaggagaaaagggctccggaaatactcttagaccggttcagcttactgaccatatcagagctggccccagttag

SEQ ID NO: 128453 - DNA, 195 bp, Artificial Sequence
  derived and/or modified sequence
atggaacaatgggaccactttcacaatcaacaggaagacaccgacagctgctcagaatcagtgaagtttgacgcacgcagcatgacagccctactgcccccgaaccctaaaaattccccctcattacaagaaaagctcaaaagttttaaagcagctcttattgctctgtacctgttggtatttgccgtgttatag

SEQ ID NO: 128454 - DNA, 399 bp, Artificial Sequence
  derived and/or modified sequence
atggctatgaaggaagaacaggttcaccttgaacaggaaatcaagggcgaagtgaaggttctgaacaatatcactaacgatctccggctcaaagattgggaacactcccagaccctgcgcaacatcacattgattcagggccccccaggtcctcccggagagaagggcgacaggggcccaaccggtgagagtggacctcgcggatttccaggacccattggtcctccgggattgaagggagatagaggtgcaattggtttcccagggagccgcgggctgcctggatacgcaggaagacctgggaattccggcccgaaaggacagaaaggagaaaagggaagcggaaatacactccgtcctgtacaactgacagaccatatccgcgctggtccctcctag

SEQ ID NO: 128455 - DNA, 1077 bp, Artificial Sequence
  derived and/or modified sequence
atggagcagtgggaccatttccacaaccaacaagaagacactgactcctgttccgagtccgtgaagttcgacgcacgctcaatgaccgccttgctaccgcccaacccaaaaaatagcccttcgctccaggagaagctgaaatctttcaaagctgctctgatcgctctgtacctgctagtttttgccgttctgatccctctgattggcatcgttgctgcacagctcctaaagtgggaaaccaaaaactgttccgtgagctcaactaacgccaatgatatcacccaaagcctcactggaaaaggaaatgattctgaggaggaaatgcgctttcaagaggtctttatggaacatatgtctaatatggagaaacgcattcagcatatcttggacatggaagcgaacctgatggatacagagcactttcaaaacttttcgatgacaaccgaccagagatttaacgacatcctgttgcagctgtctacactattcagttctgtccagggccacggcaatgccattgacgaaatctccaagagcctgattagtcttaacactaccctgcttgatctgcaattgaacattgaaaatctgaacggcaagattcaagagaatacgttcaagcagcaggaagagattagcaaattagaggagcgcgtgtacaatgtgagcgccgaaattatggcaatgaaggaagagcaagtgcatcttgaacaggaaatcaaaggagaagtgaaggtcctgaacaacatcacgaatgatctgcgcctgaaagattgggagcactcacaaacactacgtaatatcacccttatacaaggccctcccggccccccgggggagaagggcgacagaggccctactggcgagtcaggcccacgcgggtttccaggcccgattgggccaccaggcttaaaaggcgatcgaggtgcgattggcttccccggcagcagaggactgccgggatacgcaggcagacctggaaactccggcccgaagggacagaagggtgaaaaaggatccggaaacactctgcgacctgtgcaattaacagaccacatcagagccggcccctcttag

SEQ ID NO: 128456 - DNA, 399 bp, Artificial Sequence
  derived and/or modified sequence
atggcgatgaaggaggaacaagtgcatttggaacaagaaattaaaggggaagttaaagttttaaataatatcaccaatgatctacgcttgaaggattgggagcacagtcagactctgcgtaacattactctcattcagggccccccaggaccgccaggggagaagggcgatagaggtcccaccggcgagtctggtccccgcggtttccccggcccaattggacccccagggttgaaaggagaccgtggagccatcgggtttcctggaagcagaggattgcctggatatgctggcagaccaggcaattcaggacccaaggggcagaagggggaaaaaggatctggaaacaccctccgcccagtgcaactgaccgatcacatccgagcaggacccagttag

SEQ ID NO: 128457 - DNA, 1077 bp, Artificial Sequence
  derived and/or modified sequence
atggagcagtgggaccacttccacaaccagcaggaggacaccgacagctgcagcgagagcgtgaagttcgacgccagaagcatgaccgccctgctgccccccaaccccaagaacagccccagcctgcaggagaagctgaagagcttcaaggccgccctgatcgccctgtacctgctggtgttcgccgtgctgatccccctgatcggcatcgtggccgcccagctgctgaagtgggagaccaagaactgcagcgtgagcagcaccaacgccaacgacatcacccagagcctgaccggcaagggcaacgacagcgaggaggagatgagattccaggaggtgttcatggagcacatgagcaacatggagaagagaatccagcacatcctggacatggaggccaacctgatggacaccgagcacttccagaacttcagcatgaccaccgaccagagattcaacgacatcctgctgcagctgagcaccctgttcagcagcgtgcagggccacggcaacgccatcgacgagatcagcaagagcctgatcagcctgaacaccaccctgctggacctgcagctgaacatcgagaacctgaacggcaagatccaggagaacaccttcaagcagcaggaggagatcagcaagctggaggagagagtgtacaacgtgagcgccgagatcatggccatgaaggaggagcaggtgcacctggagcaggagatcaagggcgaggtgaaggtgctgaacaacatcaccaacgacctgagactgaaggactgggagcacagccagaccctgagaaacatcaccctgatccagggcccccccggcccccccggcgagaagggcgacagaggccccaccggcgagagcggccccagaggcttccccggccccatcggcccccccggcctgaagggcgacagaggcgccatcggcttccccggcagcagaggcctgcccggctacgccggcagacccggcaacagcggccccaagggccagaagggcgagaagggcagcggcaacaccctgagacccgtgcagctgaccgaccacatcagagccggccccagctag

SEQ ID NO: 128458 - DNA, 195 bp, Artificial Sequence
  derived and/or modified sequence
atggagcagtgggaccacttccacaaccagcaggaggacaccgacagctgcagcgagagcgtgaagttcgacgccagaagcatgaccgccctgctgccccccaaccccaagaacagccccagcctgcaggagaagctgaagagcttcaaggccgccctgatcgccctgtacctgctggtgttcgccgtgctgtag

SEQ ID NO: 128459 - DNA, 399 bp, Artificial Sequence
  derived and/or modified sequence
atggccatgaaggaggagcaggtgcacctggagcaggagatcaagggcgaggtgaaggtgctgaacaacatcaccaacgacctgagactgaaggactgggagcacagccagaccctgagaaacatcaccctgatccagggcccccccggcccccccggcgagaagggcgacagaggccccaccggcgagagcggccccagaggcttccccggccccatcggcccccccggcctgaagggcgacagaggcgccatcggcttccccggcagcagaggcctgcccggctacgccggcagacccggcaacagcggccccaagggccagaagggcgagaagggcagcggcaacaccctgagacccgtgcagctgaccgaccacatcagagccggccccagctag

SEQ ID NO: 128460 - RNA, 195 nt, Artificial Sequence
  derived and/or modified sequence
auggaacaaugggaccacuuucacaaucaacaggaagacaccgacagcugcucagaaucagugaaguuugacgcacgcagcaugacagcccuacugcccccgaacccuaaaaauucccccucauuacaagaaaagcucaaaaguuuuaaagcagcucuuauugcucuguaccuguugguauuugccguguuauag

SEQ ID NO: 128461 - protein, 954 aa, Artificial Sequence
  derived and/or modified sequence
MEEEEGAVAKEWGTTPAGPVWTAVFDYEAAGDEELTLRRGDRVQVLSQDCAVSGDEGWWTGQLPSGRVGVFPSNYVAPGAPAAPAGLQLPQEIPFHELQLEEIIGVGGFGKVYRALWRGEEVAVKAARLDPEKDPAVTAEQVCQEARLFGALQHPNIIALRGACLNPPHLCLVMEYARGGALSRVLAGRRVPPHVLVNWAVQVARGMNYLHNDAPVPIIHRDLKSINILILEAIENHNLADTVLKITDFGLAREWHKTTKMSAAGTYAWMAPEVIRLSLFSKSSDVWSFGVLLWELLTGEVPYREIDALAVAYGVAMNKLTLPIPSTCPEPFARLLEECWDPDPHGRPDFGSILKRLEVIEQSALFQMPLESFHSLQEDWKLEIQHMFDDLRTKEKELRSREEELLRAAQEQRFQEEQLRRREQELAEREMDIVERELHLLMCQLSQEKPRVRKRKGNFKRSRLLKLREGGSHISLPSGFEHKITVQASPTLDKRKGSDGASPPASPSIIPRLRAIRLTPVDCGGSSSGSSSGGSGTWSRGGPPKKEELVGGKKKGRTWGPSSTLQKERVGGEERLKGLGEGSKQWSSSAPNLGKSPKHTPIAPGFASLNEMEEFAEAEDGGSSVPPSPYSTPSYLSVPLPAEPSPGARAPWEPTPSAPPARWGHGARRRCDLALLGCATLLGAVGLGADVAEARAADGEEQRRWLDGLFFPRAGRFPRGLSPPARPHGRREDVGPGLGLAPSATLVSLSSVSDCNSTRSLLRSDSDEAAPAAPSPPPSPPAPTPTPSPSTNPLVDLELESFKKDPRQSLTPTHVTAACAVSRGHRRTPSDGALGQRGPPEPAGHGPGPRDLLDFPRLPDPQALFPARRRPPEFPGRPTTLTFAPRPRPAASRPRLDPWKLVSFGRTLTISPPSRPDTPESPGPPSVQPTLLDMDMEGQNQDSTVPLCGAHGSH

SEQ ID NO: 128462 - DNA, 2865 bp, Artificial Sequence
  derived and/or modified sequence
atggaagaggaagaaggtgcggttgcaaaggagtggggtacgactcctgccggacccgtgtggaccgctgtcttcgactacgaggcagcaggcgacgaggagttgacacttagacggggagatcgggtacaggtgctctcccaggattgcgcagtgtccggagatgagggatggtggacaggccagctgcccagtggaagagtgggagtctttccatcgaattatgtggcaccgggcgctcccgctgctcccgcagggctgcaacttccccaagaaataccctttcacgagctgcagttagaggaaataatcggcgtaggcggctttggcaaggtgtacagggctttgtggagaggagaagaggttgccgttaaggctgcacggcttgatcccgagaaagaccctgctgtcaccgcggaacaggtgtgccaggaggcacgtctgttcggagcactacagcaccctaacattatagctctaaggggagcttgtctaaaccctccccatctttgcctggtgatggagtatgcacgcggcggcgcactcagccgcgtgcttgccggtcgacgcgtgcctccccacgtcctggtgaactgggccgtccaggttgctcgcggtatgaattatctacacaatgacgccccagtccctatcatccacagggatcttaagagcataaacatcctcattcttgaggctattgagaatcataatctcgctgacaccgtgttgaagatcacggactttggcctggcaagggagtggcataaaactacaaagatgtcagctgccggaacctacgcctggatggctcctgaggtgatccgtctcagcttgttttccaaatcaagcgatgtctggtcgttcggggtgctgctgtgggagctgttgaccggggaagtcccctaccgggagatcgacgcgttagccgtagcgtacggcgtcgccatgaacaagcttaccctacccattccttcaacctgtccagagcctttcgctcgactccttgaagaatgctgggacccagacccacacgggagacccgattttggatccattcttaaaaggcttgaagtcatagagcaatccgcccttttccagatgcccctcgaatctttccactcgctccaagaagattggaagttggaaatccaacacatgttcgacgacctgcgaactaaggagaaagaactacgctccagagaggaggagctgctcagagctgctcaggaacagagattccaagaagagcagctgcgacgccgggagcaggaactagctgaacgcgagatggacatcgtggagcgagagctccatctgttgatgtgtcagctgtcacaggaaaaaccccgagtcagaaaacggaaaggaaattttaagaggagtcgcttgctcaaactgcgagaaggagggtcgcacattagtctgcctagcggctttgagcataaaatcaccgtgcaagcctctccaacactggacaagaggaagggatctgatggggcctctcccccggccagcccttccattatccctagactgcgcgctatacgcctgacccccgtggattgtggaggctcaagttcaggctcatccagtggtggttccgggacgtggtcccgaggcggcccaccaaagaaagaggagcttgtgggtgggaaaaaaaagggccgcacctggggccccagctccactctgcagaaagaacgggtgggcggcgaggaacgccttaagggtcttggcgagggctccaaacagtggtcctcatcggccccgaaccttggaaaatcgcctaagcacacgcccattgcacctggatttgcgtctctgaatgagatggaggaatttgctgaagcagaggatggtggaagtagcgtccccccctctccgtactctaccccatcctacctctctgtgccactccccgctgaaccaagtccgggagctcgcgcaccatgggagcctacaccgagcgcaccccccgcacgctgggggcacggcgccagaaggcggtgcgatctggcccttttgggatgcgccacactcttgggcgctgtgggattgggcgctgacgtggccgaggcgcgcgctgcagacggtgaagaacagcgaagatggctagacgggctctttttccctagagccggacggttcccacgaggactctcaccccccgccagaccccatggacgacgggaagatgttggcccagggttgggcctggcaccgagtgccacattggtgtcactatcttctgtgagcgactgcaacagcacaaggagcctattaagatcagatagcgacgaggcagccccagccgctccttccccccccccatcccccccagcccccacccccacacccagcccgtccaccaacccactcgtagacttagaactcgaatcatttaaaaaagacccgagacaatcacttacaccgactcacgtaacagccgcctgcgctgtcagtaggggccaccggagaacaccttcagacggcgcgctcggtcaacgcgggccaccagagcccgctggccacgggccggggccacgcgatctcctcgactttccgagactgcctgatccccaagcactctttcctgccaggcgacggccacccgagtttccaggccgccctaccacgcttaccttcgctcctaggccgaggcccgccgccagcagacctcggctggatccttggaagctggtatcgtttgggcggaccctaactatttcccctccctcccggccagatacacccgagtcacccggcccaccaagtgtccagccgacgcttttggatatggatatggaaggacagaaccaggactctaccgtgccactctgcggcgctcacggaagccactag

SEQ ID NO: 128463 - DNA, 2865 bp, Artificial Sequence
  derived and/or modified sequence
atggaggaggaggagggcgctgtggccaaggagtggggcaccaccccagctggccctgtgtggacagctgtgtttgattatgaagctgctggagatgaggagctgaccctgcggcggggggacagagtgcaggtgctgagccaggactgtgctgtgtctggagatgagggctggtggacaggccagctgcccagcggccgggtgggcgtcttccccagcaactacgtggcccctggggccccagctgccccagctggcctgcagctgccccaggagatccccttccacgagctgcagctggaggagatcatcggcgtgggcggctttgggaaggtgtaccgggccctgtggagaggagaggaggtggccgtgaaggccgcccggctggaccctgagaaggaccctgctgtgacagctgagcaggtgtgccaggaggcccggctgtttggagccctgcagcaccccaacatcatcgccctgcggggggcctgcctgaaccccccccacctgtgcctggtgatggagtatgcccggggcggggccctgagccgggtgctggccggcagaagagtgcccccccacgtgctggtgaactgggccgtgcaggtggcccggggcatgaactacctgcacaatgatgcccctgtgcccatcatccaccgggacctgaagagcatcaacatcctgatcctggaggccatcgagaaccacaacctggccgacacagtgctgaagatcacagactttggcctggcccgggagtggcacaagaccaccaagatgtctgctgctggcacctacgcctggatggcccctgaggtgatccggctgagcctcttcagcaagagcagtgatgtgtggagctttggagtgctgctgtgggagctgctgaccggggaggtgccctaccgggagattgatgccctggccgtggcctatggagtggccatgaacaagctgaccctgcccatccccagcacctgcccagagccctttgcccggctgctggaggagtgctgggaccctgacccccacggccgcccagactttggcagcatcctgaagaggctggaggtgattgagcagagcgccctcttccagatgcccctggagagcttccacagcctgcaggaggactggaagctggagatccagcacatgtttgatgacctgcggaccaaggagaaggagctgcggagccgggaggaggagctgctgcgggccgcccaggagcagcgcttccaggaggagcagctgcggcggcgggagcaggagctggccgagcgggagatggacatcgtggagcgggagctgcacctgctgatgtgccagctgagccaggagaagccccgggtgaggaagaggaagggcaacttcaagaggagccggctgctgaagctgcgggagggcggcagccacatcagcctgcccagcggctttgagcacaagatcaccgtgcaggccagccccaccctggacaagaggaagggcagtgatggagccagccccccagccagccccagcatcatcccccggctgcgggccatccggctgacccctgtggactgtggcggcagcagcagcggcagcagcagcggcggcagcggcacctggagcagaggaggcccccccaagaaggaggagctggtgggcggcaagaagaagggccgcacctggggccccagcagcaccctgcagaaggagcgggtgggcggggaggagcggctgaagggcctgggggagggcagcaagcagtggagcagcagcgcccccaacctgggcaagagccccaagcacacccccatcgcccctggctttgccagcctgaatgagatggaggagtttgctgaggctgaagatggcggcagctctgtgccccccagcccctacagcacccccagctacctgtctgtgcccctgcctgctgagcccagccctggggcccgggccccctgggagcccaccccatctgcccccccagcccgctggggccatggagccaggagaagatgtgacctggccctgctgggctgtgccaccctgctgggcgctgtgggcctgggcgcagatgtggccgaggcccgggctgctgatggagaggagcagaggcgctggctggatggcctcttcttcccccgggccggccgcttcccccggggcctgagccccccagcccggccccacggccggcgggaggatgtgggccctggcctgggcctggcccccagcgccaccctggtgtccctgagctctgtgtctgactgcaacagcaccaggagcctgctgcggagtgacagtgatgaagctgccccagctgcccccagccccccacccagccccccagcccccacccccacccccagccccagcaccaaccccctggtggacctggagctggagagcttcaagaaggacccccggcagagcctgacccccacccacgtgacagctgcctgtgctgtgtcccggggccacaggaggacccccagtgatggagccctgggccagaggggccccccagagcctgctggccacggccctggcccccgggacctgctggacttcccccggctgcctgacccccaggccctcttccctgccaggagaagacctcctgagttccctggccggcccaccaccctgacctttgccccccggcccaggcctgctgccagccggccccggctggacccctggaagctggtgtcctttggccgcaccctgaccatcagcccccccagcaggccagacaccccagagagccctggcccccccagcgtgcagcccaccctgctggacatggacatggagggccagaaccaggacagcacagtgcccctgtgtggggcccacggcagccactag

SEQ ID NO: 128464 - DNA, 3435 bp, Artificial Sequence
  derived and/or modified sequence
cgcgcggccaggccctcttagccctctgccgtttggggggcacgggtgaacctgccgccccactcccaccccgccccgccccgcccgtacagccaaatcggaagggacgagcctgccctttgaaagggttttttttcttgctcctgcggagggcgccccagccatggccctcaggagctccctagaccccgcagggactgccctccatcccggccgccggggcccgccctctgcatcccgcgggcagcctgtgtgaagcggcctcccgcagcccccggcccctcccccatggaggaggaggagggggcggtggccaaggagtggggcacgacccccgcggggcccgtctggaccgcggtgttcgactacgaggcggcgggcgacgaggagctgaccctgcggaggggcgatcgcgtccaggtgctttcccaagactgtgcggtgtccggcgacgagggctggtggaccgggcagctccccagcggccgcgtgggcgtcttccccagcaactacgtggcccccggcgcccccgctgcacccgcgggcctccagctgccccaggagatccccttccacgagctgcagctagaggagatcatcggtgtggggggctttggcaaggtctatcgggccctgtggcgtggcgaggaggtggcagtcaaggccgcccggctggaccctgagaaggacccggcagtgacagcggagcaggtgtgccaggaagcccggctctttggagccctgcagcaccccaacataattgcccttaggggcgcctgcctcaaccccccacacctctgcctagtgatggagtatgcccggggtggtgcactgagcagggtgctggcaggtcgccgggtgccacctcacgtgctggtcaactgggctgtgcaggtggcccggggcatgaactacctacacaatgatgcccctgtgcccatcatccaccgggacctcaagtccatcaacatcctgatcctggaggccatcgagaaccacaacctcgcagacacggtgctcaagatcacggacttcggcctcgcccgcgagtggcacaagaccaccaagatgagcgctgcggggacctacgcctggatggcgccggaggttatccgtctctccctcttctccaaaagcagtgatgtctggagcttcggggtgctgctgtgggagctgctgacgggggaggtcccctaccgtgagatcgacgccttggccgtggcgtatggcgtggctatgaataagctgacgctgcccattccctccacgtgccccgagccctttgcccgcctcctggaggaatgctgggacccagacccccacgggcggccagatttcggtagcatcttgaagcggcttgaagtcatcgaacagtcagccctgttccagatgccactggagtccttccactcgctgcaggaagactggaagctggagattcagcacatgtttgatgaccttcggaccaaggagaaggagcttcggagccgtgaggaggagctgctgcgggcggcacaggagcagcgcttccaggaggagcagctgcggcggcgggagcaggagctggcagaacgtgagatggacatcgtggaacgggagctgcacctgctcatgtgccagctgagccaggagaagccccgggtccgcaagcgcaagggcaacttcaagcgcagccgcctgctcaagctgcgggaaggcggcagccacatcagcctgccctctggctttgagcataagatcacagtccaggcctctccaactctggataagcggaaaggatccgatggggccagcccccctgcaagccccagcatcatcccccggctgagggccattcgcctgactcccgtggactgtggtggcagcagcagtggcagcagcagtggaggaagtgggacatggagccgcggtgggcccccaaagaaggaagaactggtcgggggcaagaagaagggacgaacgtgggggcccagctccaccctgcagaaggagcgggtgggaggagaggagaggctgaaggggctgggggaaggaagcaaacagtggtcatcaagtgcccccaacctgggcaagtcccccaaacacacacccatcgcccctggctttgccagcctcaatgagatggaggagttcgcggaggcagaggatggaggcagcagcgtgcccccttccccctactcgaccccgtcctacctctcagtgccactgcctgccgagccctccccgggggcgcgggcgccgtgggagccgacgccgtccgcgccccccgctcggtggggacacggcgcccggcggcgctgcgacctggcgctgctaggctgcgccacgctgctgggggctgtgggcctgggcgccgacgtggccgaggcgcgcgcggccgacggtgaggagcagcggcgctggctcgacggcctcttctttccccgcgccggccgcttcccgcggggcctcagcccacccgcgcgtccccacggccgccgcgaagacgtgggccccggcctgggcctggcgccctcggccaccctcgtgtcgctgtcgtccgtgtccgactgcaactccacgcgttcactgctgcgctctgacagtgacgaggccgcaccggccgcgccctccccaccaccctccccgcccgcgcccacacccacgccctcgcccagcaccaaccccctggtggacctggagctggagagcttcaagaaggacccccgccagtcgctcacgcccacccacgtcacggctgcatgcgctgtgagccgcgggcaccggcggacgccatcggacggggcgctggggcagcgggggccgcccgagcccgcgggccatggccctggccctcgtgaccttctggacttcccccgcctgcccgacccccaggccctgttcccagcccgccgccggccccctgagttcccaggccgccccaccaccctgacctttgccccgagacctcggccggctgccagtcgcccccgcttggacccctggaaactggtctccttcggccggacactcaccatctcgcctcccagcaggccagacactccggagagccctgggccccccagcgtgcagcccacactgctggacatggacatggaggggcagaaccaagacagcacagtgcccctgtgcggggcccacggctcccactaaggcctgcccaccaccgcccgcctgggcagccatgaatgtagcgccccaggccctgccccagcccgccatgccacaaggtgggggaggccctgggcaggatgttcactctatttattggggaaggagggaggggggggacacttaacttattcctttgtaccccagggggtggagccctgtgcccaccctgcactggggggagggtgggcagggatactcagggacagggcatcatgggggatttggcacaaaatggagcattaaaggtaacccctgccccct

SEQ ID NO: 128465 - DNA, 2865 bp, Artificial Sequence
  derived and/or modified sequence
atggaggaggaggagggcgccgtggccaaggagtggggcaccacccccgctggtccagtttggacagccgttttcgattatgaggctgccggggatgaggagctcactttgaggcgcggagatcgcgttcaggtgctgtcccaggattgcgccgtctccggcgatgaagggtggtggaccggacagctcccatccggtcgggtgggagtgtttccctctaactatgtggcaccgggagctcctgccgcacctgctggcttgcagctgccccaggagataccatttcacgagctacagctcgaagaaatcattggcgtggggggctttggtaaggtgtacagggctctctggagaggggaagaagttgccgtaaaggctgcaagactcgaccctgagaaggaccccgcagttacggccgaacaagtctgtcaggaagcgcgcttatttggcgctcttcagcatccaaatatcatcgccctacggggggcatgcctgaatcctccgcatctgtgtttggttatggagtacgcccgaggaggggccctgtctcgggtccttgcgggaagaagggtgcctccgcacgttcttgtgaattgggcggtgcaagtcgctcgaggcatgaattatctccacaatgatgctcccgtacctattattcaccgagatctcaagtccatcaacatacttattcttgaagcgatcgaaaaccataatctcgccgacacagtgttgaagatcacggatttcgggctggcccgagagtggcataaaacaaccaagatgagcgcggctgggacatatgcctggatggctccagaggtcatcagactgtcgctgtttagtaagagtagtgatgtgtggagtttcggagtactgctctgggaattgctgacaggagaagtgccatatagagagatcgacgcacttgcagtggcttacggagtggctatgaataagctcacgttgccgatccctagtacttgtccggagcctttcgccaggttattggaggagtgttgggacccggacccacacggcaggccagattttggctctatcttgaaaaggctcgaagttattgagcagtcagccctctttcagatgcccctggagtcttttcatagtctccaggaggactggaaactggaaatccaacatatgttcgacgatctaaggactaaagagaaggagctgagatcacgcgaagaagaactcctgagggcggcgcaggagcaaagatttcaagaggagcagcttcgtcgacgtgaacaagagctggctgagcgggaaatggacattgtggagcgggagttacacctgctgatgtgtcagcttagtcaggaaaagccaagagttcggaagcgtaaaggtaacttcaaaaggagccggttacttaagcttagggagggtggaagtcatatttccctgccttctggcttcgagcacaagatcacagttcaggcgtcccctacgttggacaaacgaaaggggtctgatggtgccagtcctcccgcatctccgtcaattatcccgcggctgagagccatacggctcacccccgttgactgcggagggtcgagctctggctcaagcagtggcgggtcaggtacttggagtagagggggcccccctaagaaggaagaactggtgggtggaaagaagaaggggcggacctggggccccagtagtaccttacaaaaagaaagggtcgggggggaagagcggctgaaaggcctgggggagggttccaagcaatggtcttcctctgcccctaatctcggtaaaagtcctaaacatacccccatagcccccgggtttgcaagcttaaatgagatggaggagttcgctgaagccgaggatgggggttcatccgtgccgcccagcccatactcgacaccaagctacctaagtgtgcctttgccagcagagcctagtcctggagctagggcgccatgggaaccaactccctccgcgccccccgcccggtggggccatggggcacggaggaggtgtgaccttgctctgctgggctgtgcaacattactaggcgctgtgggtctgggtgcagacgtggcagaggctcgcgccgctgatggggaggagcaacgtaggtggttagacgggctgttttttccccgggcgggacggttcccccgtggactgagtcccccagctagaccccacgggcgccgggaggacgtcggcccaggtctgggcctggcccccagtgcaaccttggtgagcttgagcagcgtgtccgattgcaattcaaccaggtcattgcttcgcagcgacagcgacgaagcagccccagccgccccctcaccaccgccatctccgcctgctccaacaccaactccatctccatcaactaatccactggtcgacctggagctcgaatcgtttaaaaaagaccccaggcagtcgctgacccccactcatgtgactgctgcgtgcgctgtcagcagaggccatcgaaggacccctagtgatggagccctggggcagcgcggtccccctgaaccggccggacatggcccagggcctcgcgatcttctagattttcctcgcctgcccgacccacaggctctcttcccagcccggcggagaccacctgagttccccggcagaccaacaaccctgactttcgcgccccgtcccaggcccgcggcttcccgtcccagacttgacccttggaaattagttagttttggtcgcactttgacgatcagccctcccagtaggccagacacaccggagtcccccggtccaccttccgtgcagccgaccctcctggacatggacatggaaggccagaatcaggattcaactgtgcctttatgtggcgcgcacggcagccactag

SEQ ID NO: 128466 - DNA, 2865 bp, Artificial Sequence
  derived and/or modified sequence
atggaggaagaggagggtgcggtagctaaggaatggggtacaacgccagctggcccagtgtggactgccgtattcgactatgaagccgcaggagatgaggagttgaccctgcgacgcggagacagggtgcaggttctttcacaagactgcgccgtgtcaggggacgaggggtggtggaccggtcaattgcctagcgggcgagtcggagtgttcccttctaattacgtcgcccctggcgctccggctgccccagcaggtcttcaactgccccaggaaattccctttcacgagctgcagctagaagagataatcggagtaggcggattcggcaaggtctatcgggcactctggcgcggagaggaggtcgccgtgaaggctgccagactggatcctgagaaggaccctgccgtgacagcagaacaagtgtgccaggaagccagattgtttggggcactgcaacacccaaatatcattgcgctgaggggcgcttgtctaaatccaccacacctgtgccttgtgatggagtacgcaaggggcggagctctctcgagagttctggcaggacgacgggtgcctccgcatgttctcgtaaactgggcagtgcaggtcgcacggggtatgaactacctgcacaacgacgccccagtccccatcattcaccgggacctcaaatctatcaacattctcattctggaagccatcgagaaccataacctcgcagatactgtgctgaagattactgactttgggctagccagggaatggcacaagacaaccaaaatgagcgccgcaggcacctacgcctggatggccccagaggttataaggcttagcttatttagcaagtcatcggacgtttggtctttcggagtgttactctgggaacttctgaccggggaagtcccctacagagagattgatgctctggctgttgcctacggggtggcgatgaataagctgactctgccaataccttccacctgcccggagccctttgcaagacttctggaagagtgctgggacccggatccgcacggtagacctgattttggcagcattctgaagaggctcgaagtgatcgagcagtccgccctctttcagatgcccctggagtccttccactcactgcaggaagactggaaactggaaattcaacacatgtttgacgatcttcgtaccaaggaaaaggaacttaggagccgggaagaggaactgctgagggccgctcaggaacaaagatttcaggaggaacagctgagacggagagaacaggagctggctgaacgcgagatggacattgtagagcgggaactgcacttactgatgtgccaattgtctcaggaaaaaccgagagtacggaaacgcaaggggaacttcaagcgaagccgactgctcaaacttcgggagggcggaagtcacatctctcttccatctgggtttgagcataagataaccgtgcaggctagccctacgctcgataagcgaaagggaagcgatggggcttcaccccctgcaagcccatccataatcccacggctgcgcgctattcgtctaacccctgtcgattgcggaggctcttccagtggtagctcatccgggggttcaggcacttggtccagggggggaccacctaagaaggaggagcttgttggcggtaagaagaagggaaggacctggggaccctcttctactcttcaaaaggagagagtgggcggagaagaacggttgaaggggctgggagaagggtcaaaacagtggtcctcctcggcaccgaacctagggaaatctcccaagcacaccccgattgcgcctggattcgcttccttgaacgaaatggaggagtttgccgaggcagaggacggtgggagctccgtgcctccctctccttacagcaccccctcttacctctccgtgccactgccagcggaaccctccccgggtgctcgggctccctgggagcctacgccctcagcaccacctgccagatggggccacggtgcacgtaggcgttgtgatctcgccctcctagggtgtgcaactctgcttggagcggttgggctcggcgctgacgtagctgaggccagagcagccgatggtgaggagcaacgaagatggttggacggcttgttcttcccaagggctggcagattcccgcgaggcctgagtccccctgctagaccccacggcagaagggaagatgtcggtcccggactaggcctggctccgtccgcaaccctcgtatctttgagtagtgtgagtgattgcaatagcactaggtctcttctaagaagtgactcagatgaagctgcacccgcagctccgtccccacctccctcaccaccagcaccaacgcctacaccttcgccaagtaccaaccctttggtggatctcgagttagaaagtttcaagaaggatcctcgacaaagcctgacccctacacatgtaaccgcagcctgtgccgtcagtcgcggtcacagaaggacgccatctgatggggctctcgggcagcgcggaccaccagaacccgcaggacacggtcctggcccacgggacctgctagactttcccagactgcccgatccccaggccctgttcccagctcgtagacgcccacccgaattcccaggacgacccacaacacttactttcgcccctagacctaggccggctgccagccgtccacgattagacccatggaaactggtatcattcggtagaaccctcacgatctctcctccatctcgccctgatacgcctgagtcccccggacccccttccgtacaacctacgcttttagacatggacatggaaggccagaatcaggattctaccgtgccgttgtgcggagcccatggctcccactag

SEQ ID NO: 128467 - DNA, 2865 bp, Artificial Sequence
  derived and/or modified sequence
atggaggaggaggagggcgccgtggccaaggagtggggcaccacccccgccggccccgtgtggaccgccgtgttcgactacgaggccgccggcgacgaggagctgaccctgagaagaggcgacagagtgcaggtgctgagccaggactgcgccgtgagcggcgacgagggctggtggaccggccagctgcccagcggcagagtgggcgtgttccccagcaactacgtggcccccggcgcccccgccgcccccgccggcctgcagctgccccaggagatccccttccacgagctgcagctggaggagatcatcggcgtgggcggcttcggcaaggtgtacagagccctgtggagaggcgaggaggtggccgtgaaggccgccagactggaccccgagaaggaccccgccgtgaccgccgagcaggtgtgccaggaggccagactgttcggcgccctgcagcaccccaacatcatcgccctgagaggcgcctgcctgaaccccccccacctgtgcctggtgatggagtacgccagaggcggcgccctgagcagagtgctggccggcagaagagtgcccccccacgtgctggtgaactgggccgtgcaggtggccagaggcatgaactacctgcacaacgacgcccccgtgcccatcatccacagagacctgaagagcatcaacatcctgatcctggaggccatcgagaaccacaacctggccgacaccgtgctgaagatcaccgacttcggcctggccagagagtggcacaagaccaccaagatgagcgccgccggcacctacgcctggatggcccccgaggtgatcagactgagcctgttcagcaagagcagcgacgtgtggagcttcggcgtgctgctgtgggagctgctgaccggcgaggtgccctacagagagatcgacgccctggccgtggcctacggcgtggccatgaacaagctgaccctgcccatccccagcacctgccccgagcccttcgccagactgctggaggagtgctgggaccccgacccccacggcagacccgacttcggcagcatcctgaagagactggaggtgatcgagcagagcgccctgttccagatgcccctggagagcttccacagcctgcaggaggactggaagctggagatccagcacatgttcgacgacctgagaaccaaggagaaggagctgagaagcagagaggaggagctgctgagagccgcccaggagcagagattccaggaggagcagctgagaagaagagagcaggagctggccgagagagagatggacatcgtggagagagagctgcacctgctgatgtgccagctgagccaggagaagcccagagtgagaaagagaaagggcaacttcaagagaagcagactgctgaagctgagagagggcggcagccacatcagcctgcccagcggcttcgagcacaagatcaccgtgcaggccagccccaccctggacaagagaaagggcagcgacggcgccagcccccccgccagccccagcatcatccccagactgagagccatcagactgacccccgtggactgcggcggcagcagcagcggcagcagcagcggcggcagcggcacctggagcagaggcggcccccccaagaaggaggagctggtgggcggcaagaagaagggcagaacctggggccccagcagcaccctgcagaaggagagagtgggcggcgaggagagactgaagggcctgggcgagggcagcaagcagtggagcagcagcgcccccaacctgggcaagagccccaagcacacccccatcgcccccggcttcgccagcctgaacgagatggaggagttcgccgaggccgaggacggcggcagcagcgtgccccccagcccctacagcacccccagctacctgagcgtgcccctgcccgccgagcccagccccggcgccagagccccctgggagcccacccccagcgccccccccgccagatggggccacggcgccagaagaagatgcgacctggccctgctgggctgcgccaccctgctgggcgccgtgggcctgggcgccgacgtggccgaggccagagccgccgacggcgaggagcagagaagatggctggacggcctgttcttccccagagccggcagattccccagaggcctgagcccccccgccagaccccacggcagaagagaggacgtgggccccggcctgggcctggcccccagcgccaccctggtgagcctgagcagcgtgagcgactgcaacagcaccagaagcctgctgagaagcgacagcgacgaggccgcccccgccgcccccagccccccccccagcccccccgcccccacccccacccccagccccagcaccaaccccctggtggacctggagctggagagcttcaagaaggaccccagacagagcctgacccccacccacgtgaccgccgcctgcgccgtgagcagaggccacagaagaacccccagcgacggcgccctgggccagagaggcccccccgagcccgccggccacggccccggccccagagacctgctggacttccccagactgcccgacccccaggccctgttccccgccagaagaagaccccccgagttccccggcagacccaccaccctgaccttcgcccccagacccagacccgccgccagcagacccagactggacccctggaagctggtgagcttcggcagaaccctgaccatcagcccccccagcagacccgacacccccgagagccccggcccccccagcgtgcagcccaccctgctggacatggacatggagggccagaaccaggacagcaccgtgcccctgtgcggcgcccacggcagccactag

SEQ ID NO: 128468 - protein, 1400 aa, Artificial Sequence
  derived and/or modified sequence
MELLPPLPQSFLLLLLLPAKPAAGEDWQCPRTPYAASRDFDVKYVVPSFSAGGLVQAMVTYEGDRNESAVFVAIRNRLHVLGPDLKSVQSLATGPAGDPGCQTCAACGPGPHGPPGDTDTKVLVLDPALPALVSCGSSLQGRCFLHDLEPQGTAVHLAAPACLFSAHHNRPDDCPDCVASPLGTRVTVVEQGQASYFYVASSLDAAVAASFSPRSVSIRRLKADASGFAPGFVALSVLPKHLVSYSIEYVHSFHTGAFVYFLTVQPASVTDDPSALHTRLARLSATEPELGDYRELVLDCRFAPKRRRRGAPEGGQPYPVLRVAHSAPVGAQLATELSIAEGQEVLFGVFVTGKDGGPGVGPNSVVCAFPIDLLDTLIDEGVERCCESPVHPGLRRGLDFFQSPSFCPNPPGLEALSPNTSCRHFPLLVSSSFSRVDLFNGLLGPVQVTALYVTRLDNVTVAHMGTMDGRILQVELVRSLNYLLYVSNFSLGDSGQPVQRDVSRLGDHLLFASGDQVFQVPIQGPGCRHFLTCGRCLRAWHFMGCGWCGNMCGQQKECPGSWQQDHCPPKLTEFHPHSGPLRGSTRLTLCGSNFYLHPSGLVPEGTHQVTVGQSPCRPLPKDSSKLRPVPRKDFVEEFECELEPLGTQAVGPTNVSLTVTNMPPGKHFRVDGTSVLRGFSFMEPVLIAVQPLFGPRAGGTCLTLEGQSLSVGTSRAVLVNGTECLLARVSEGQLLCATPPGATVASVPLSLQVGGAQVPGSWTFQYREDPVVLSISPNCGYINSHITICGQHLTSAWHLVLSFHDGLRAVESRCERQLPEQQLCRLPEYVVRDPQGWVAGNLSARGDGAAGFTLPGFRFLPPPHPPSANLVPLKPEEHAIKFEYIGLGAVADCVGINVTVGGESCQHEFRGDMVVCPLPPSLQLGQDGAPLQVCVDGECHILGRVVRPGPDGVPQSTLLGILLPLLLLVAALATALVFSYWWRRKQLVLPPNLNDLASLDQTAGATPLPILYSGSDYRSGLALPAIDGLDSTTCVHGASFSDSEDESCVPLLRKESIQLRDLDSALLAEVKDVLIPHERVVTHSDRVIGKGHFGVVYHGEYIDQAQNRIQCAIKSLSRITEMQQVEAFLREGLLMRGLNHPNVLALIGIMLPPEGLPHVLLPYMCHGDLLQFIRSPQRNPTVKDLISFGLQVARSMEYLAEQKFVHRDLAARNCMLDESFTVKVADFGLARDILDREYYSVQQHRHARLPVKWMALESLQTYRFTTKSDVWSFGVLLWELLTRGAPPYRHIDPFDLTHFLAQGRRLPQPEYCPDSLYQVMQQCWEADPAVRPTFRVLVGEVEQIVSALLGDHYVQLPATYMNLGPSTSHEMNVRPEQPQFSPMPGNVRRPRPLSEPPRPT

SEQ ID NO: 128469 - DNA, 4203 bp, Artificial Sequence
  derived and/or modified sequence
atggaactgctcccgccactgcctcagagttttttgctcctactgctgctaccggcgaaacccgctgccggagaggactggcaatgcccaaggacgccatacgctgcgagccgggacttcgatgtgaagtacgtagtgcctagttttagtgctggcggcctcgtccaggcaatggttacctacgagggggacaggaatgaaagcgctgttttcgtggccatcaggaatagacttcatgtgctcggccctgacctgaaaagtgtacaatccctggccactggccccgccggcgatcctgggtgtcagacgtgtgccgcctgtgggcctgggccccatggccctccaggcgacacagatactaaggtacttgttttagaccccgccctgcctgcattagtctcctgcggttcttccctgcaggggagatgcttcctgcacgatttggagccacagggaaccgcagttcatctggcagctcccgcctgcctgttttctgcccaccacaataggcccgacgactgtccagactgtgtcgcctcccccctcgggacccgtgtgaccgtggtggagcaggggcaagcttcttacttctatgtcgcttcctccctcgatgccgccgtggcagcaagcttctcaccgcgcagcgttagcatccggagattgaaggccgacgcatccggattcgctcccgggtttgttgccctctctgtgctgcccaagcacttagtctcctactctatcgaatacgtgcactccttccataccggtgctttcgtgtatttcctgacggtccagcctgcgtctgtaacagatgacccgtctgcccttcatacacgactcgcaaggttatcagccacagagcccgagcttggcgattatcgagagttggtgctagattgcagattcgcacctaaaaggcgcagacggggcgcgcccgaagggggtcagccataccccgtcttgcgtgtggctcacagcgctccggttggcgcgcagttggctactgagctttctatcgccgaggggcaagaagtcctcttcggagtcttcgttactggaaaagacggtggaccaggggtcggcccaaattccgtggtgtgcgcattcccaatagaccttttggacacattgatagacgagggggttgagaggtgctgcgagtcacccgttcacccaggtcttcggcgaggactggatttttttcagtcccctagcttttgcccaaaccccccaggactggaggcgctctcccccaatacctcctgtcgacacttccccttgctggtaagttcatcttttagtcgtgtggacctcttcaacggacttctgggcccagttcaggtgacagctctatacgtaacgcggttggacaacgtaacagttgcccacatgggcacgatggacggtcggattctgcaggtcgaactcgtgcggtccctgaactacctgttgtatgtgagcaacttttccctgggcgatagtggtcagcctgtccagagggatgtttctcggctcggggaccacttgctgttcgcttcaggtgatcaggtctttcaggtgccgatccaggggccagggtgccggcactttctgacctgtggtaggtgtctccgggcctggcactttatgggctgcggatggtgcggcaatatgtgcggacagcagaaagagtgcccaggcagctggcagcaggatcactgccctcctaaattaacagagttccaccctcatagcgggcctctgagaggttctacaaggctgactttgtgcggttctaacttctacctgcacccttctggactggtgcccgaaggaactcatcaggtgacagtcgggcagagcccgtgcagacccttaccaaaggatagctccaaattgcgaccagtgccgaggaaggattttgtggaagaattcgagtgcgagcttgagccgctgggcactcaagccgtgggcccaacaaatgtttctctcaccgttaccaatatgccacccgggaagcacttccgcgtcgatgggaccagtgtgctgagagggttctctttcatggaacctgtattaatcgcagtgcaacccctgttcggtccgagggctggagggacatgtctgacactggaggggcagtccctgagcgtggggacaagtagagctgtgctagtcaacggcacagaatgcctgctcgcgcgggtgagcgaaggccagcttttgtgcgctactccccctggcgcgaccgtcgcaagtgtgcccctttctctccaggttggtggcgctcaggtgcctgggagctggacgtttcagtaccgcgaggaccctgtggtgctgagtatctctcccaactgcggatatataaactctcatatcacgatttgcggacagcacctgacttcggcgtggcacctagttctgtctttccatgacgggctgagggccgttgaaagcagatgtgagaggcagctgccagagcagcagctgtgtagattaccggagtacgtggtccgggatcctcagggctgggtggcgggcaatcttagcgctcgcggggatggcgcggcaggctttaccctgcctggattccgttttctccctcctccacaccctccctctgcaaacctcgtgcctctgaaacccgaggagcatgctataaaattcgagtacataggtctgggagccgtcgcagattgcgtgggtattaacgtcaccgttggtggtgagagttgccagcatgaatttcgcggcgatatggtggtctgccccttgccgcccagtctccagcttggccaggatggcgcgccactgcaagtgtgtgtggatggagaatgccatatactcggacgagtagtccgcccgggacccgatggagttccgcagagcacactgttgggtattctgctgcccctgctcttgctggtcgccgcactggccacagctctggttttctcatattggtggaggaggaagcagttggttctcccacccaacctgaatgatctggcctctctggatcagactgctggcgctactccattgccgattctttacagcggctcagactatcgatctggcctggctttgcctgccatagacggtttggatagcacaacgtgcgtccacggtgcctcattttcagactcggaagatgagagctgtgtcccattgttacggaaagagtctatccaactgcgcgaccttgacagcgcgctcctggctgaggtcaaggacgtcctaatccctcacgaacgcgtggtcacccactcagatagggtcattggcaaagggcattttggcgtcgtctatcatggagagtatatcgatcaggcccagaatcgaatccaatgtgcaattaagagtttgtcaagaatcactgagatgcagcaagtggaagcatttctaagggaggggctcctcatgcggggcctgaatcacccaaatgtgttagctctgatcgggattatgcttcccccggaggggctgccacatgtcttgctgccatacatgtgtcatggcgacctcctgcagttcatccgttcccctcagcggaatcccacagtcaaggatctaatcagttttggactacaggtagcaaggagcatggagtatctggctgagcagaaatttgtgcaccgggatcttgcagctcggaattgtatgctcgacgagtcttttaccgtgaaagtagctgacttcgggctggctcgagacatcctggatcgcgaatactattcagtgcagcagcacaggcatgcacgtttgcctgtgaaatggatggcccttgagtccctccagacctatcggtttacaacaaagagcgacgtgtggtccttcggcgttctgttgtgggagctcctcacaaggggcgctccaccttacaggcacatcgatcccttcgatctgacccattttctggcacagggacggcgtctcccccagccggagtactgtccagactccctctatcaggtgatgcaacagtgctgggaggcagacccagctgttaggcccactttccgggtcctcgtgggggaggtcgaacaaatagtgagcgcgctgctgggagaccactacgtgcaattgcctgcaacatatatgaatctcgggccctcgacctcccatgaaatgaatgtacggcccgagcagccccaattttctccaatgcccggtaacgtgcggaggcccagacccctctccgaaccaccccgacctacttag

SEQ ID NO: 128470 - DNA, 4203 bp, Artificial Sequence
  derived and/or modified sequence
atggagctgctgccccccctgccccagagcttcctgctgctgctgctgctgcctgccaagccagctgctggggaggactggcagtgccccaggaccccctatgctgccagccgggactttgatgtgaagtatgtggtgcccagcttctctgctgggggcctggtgcaggccatggtgacctatgaaggagacagaaatgaatctgctgtgtttgtggccatccggaaccggctgcacgtgctgggccctgacctgaagtctgtgcagagcctggccactggacctgctggggaccccggctgccagacctgtgccgcctgtggccctggcccccacggccccccaggggacacagacaccaaggtgctggtgctggaccctgccctgcctgccctggtgtcctgtggcagcagcctgcagggccgctgcttcctgcatgacctggagccccagggcacagctgtgcacctggccgccccagcctgcctcttcagcgcccaccacaacagaccagatgactgcccagactgtgtggccagccccctgggcaccagggtgacagtggtggagcagggccaggccagctacttctacgtggccagcagcctggatgctgctgtggccgccagcttcagccccaggtctgtgtccatccggcggctgaaggcagatgccagcggctttgcccctggctttgtggccctgtctgtgctgcccaagcacctggtgtcctacagcattgaatatgtgcacagcttccacactggagcctttgtgtacttcctgactgtgcagcctgcctctgtgacagatgaccccagcgccctgcacacccggctggcccggctgagcgccacagagcctgagctgggggactaccgggagctggtgctggactgccgctttgcccccaagagaagaagaagaggagcccctgagggcggccagccctaccctgtgctgcgggtggcccacagcgcccctgtgggcgcccagctggccacagagctgagcattgctgagggccaggaggtgctgtttggagtgtttgtgacaggcaaggatggcggccctggggtgggccccaacagcgtggtgtgtgccttccccatcgacctgctggacaccctgattgatgaaggagtggagcgctgctgtgagagccctgtgcaccctggcctgcggcggggcctggacttcttccagagccccagcttctgccccaaccccccaggcctggaggccctgagccccaacaccagctgccgccacttccccctgctggtgagcagcagcttcagccgggtggacctcttcaacggcctgctgggccctgtgcaggtgacagccctgtatgtgacccggctggacaacgtgacagtggcccacatgggcaccatggatggccgcatcctgcaggtggagctggtgcgcagcctgaactacctgctgtatgtgagcaacttcagcctgggggacagcggccagcctgtgcagagagatgtgtcccggctgggggaccacctgctgtttgccagcggggaccaggtgttccaggtgcccatccagggccctggctgccgccacttcctgacctgtggccgctgcctgcgggcctggcacttcatgggctgcggctggtgtggcaacatgtgtggccagcagaaggaatgtcctggctcctggcagcaggaccactgcccccccaagctgacagagttccacccccacagcggccccctgcggggcagcacccggctgaccctgtgtggcagcaacttctacctgcaccccagcggcctggtgcctgagggcacccaccaggtgacagtgggccagagcccctgccggcccctgcccaaggacagcagcaagctgcggcctgtgcccaggaaggactttgtggaggagtttgaatgtgagctggagcccctgggcacccaggccgtgggccccaccaacgtgtccctgactgtgaccaacatgcctcctgggaagcacttccgggtggatggcacctctgtgctgcggggcttctccttcatggagcctgtgctgattgctgtgcagcccctgtttggccccagggctgggggcacctgcctgaccctggagggccagagcctgtctgtgggcaccagcagagctgtgctggtgaatggaacagaatgtctgctggcccgggtgtctgagggccagctgctgtgtgccaccccacctggggccaccgtggcctctgtgcccctgagcctgcaggtgggcggggcccaggtgcccggctcctggaccttccagtaccgggaggaccctgtggtgctgagcatcagccccaactgtggctacatcaacagccacatcaccatctgtggccagcacctgaccagcgcctggcacctggtgctgtccttccatgatggcctgcgggctgtggagagccgctgtgagcggcagctgcctgagcagcagctgtgccgcctgcctgaatatgtggtgcgggacccccagggctgggtggccggcaacctgagcgcccggggagatggagctgctggcttcaccctgcccggcttccgcttcctgcccccaccccaccccccatctgccaacctggtgcccctgaagccagaggagcacgccatcaagtttgagtacatcggcctgggcgctgtggccgactgtgtgggcatcaacgtgacagtgggcggggagagctgccagcacgagttccggggggacatggtggtgtgccccctgccccccagcctgcagctgggccaggatggagcccccctgcaggtgtgtgtggatggagagtgccacatcctgggccgggtggtgcggcccggcccagatggagtgccccagagcaccctgctgggcatcctgctgcccctgctgctgctggtggccgccctggccacagccctggtgttctcctactggtggaggaggaagcagctggtgctgccccccaacctgaatgacctggccagcctggaccagacagctggggccacccccctgcccatcctgtacagcggcagtgactacagaagtggcctggccctgcctgccattgatggcctggacagcaccacctgtgtgcacggggccagcttcagtgacagtgaagatgagagctgtgtgcccctgctgaggaaggagagcatccagctgcgggacctggacagcgccctgctggccgaggtgaaggatgtgctgatcccccatgagcgggtggtgacccacagcgacagagtcatcggcaagggccactttggagtggtgtaccacggggagtacatcgaccaggcccagaaccgcatccagtgtgccatcaagagcctgagccgcatcacagagatgcagcaggtggaggccttcctgcgggagggcctgctgatgaggggcctgaaccaccccaacgtgctggccctgattggcatcatgctgcccccagagggcctgccccacgtgctgctgccctacatgtgccacggggacctgctgcagttcatccgcagcccccagaggaaccccaccgtgaaggacctgatcagctttggcctgcaggtggcccgctccatggagtacctggccgagcagaagtttgtgcaccgggacctggccgccaggaactgcatgctggatgagagcttcaccgtgaaggtggccgactttggcctggcccgggacatcctggaccgggagtactacagcgtgcagcagcacagacatgcccggctgcctgtgaagtggatggccctggagagcctgcagacctaccgcttcaccaccaagagtgatgtgtggagctttggagtgctgctgtgggagctgctgaccaggggggccccaccctaccgccacatcgacccctttgacctgacccacttcctggcccagggccggcggctgccccagcctgagtactgcccagacagcctgtaccaggtgatgcagcagtgctgggaggccgaccctgctgtgcggcccaccttccgggtgctggtgggggaggtggagcagatcgtgtctgccctgctgggggaccactacgtgcagctgcctgccacctacatgaacctgggccccagcaccagccatgagatgaatgtgcggcctgagcagccccagttcagccccatgcctggaaatgtgcggcggccccggcccctgtctgagcccccccggcccacctag

SEQ ID NO: 128471 - DNA, 4536 bp, Artificial Sequence
  derived and/or modified sequence
ggatcctctagggtcccagctcgcctcgatggagctcctcccgccgctgcctcagtccttcctgttgctgctgctgttgcctgccaagcccgcggcgggcgaggactggcagtgcccgcgcaccccctacgcggcctctcgcgactttgacgtgaagtacgtggtgcccagcttctccgccggaggcctggtacaggccatggtgacctacgagggcgacagaaatgagagtgctgtgtttgtagccatacgcaatcgcctgcatgtgcttgggcctgacctgaagtctgtccagagcctggccacgggccctgctggagaccctggctgccagacgtgtgcagcctgtggcccaggaccccacggccctcccggtgacacagacacaaaggtgctggtgctggatcccgcgctgcctgcgctggtcagttgtggctccagcctgcagggccgctgcttcctgcatgacctagagccccaagggacagccgtgcatctggcagcgccagcctgcctcttctcagcccaccataaccggcccgatgactgccccgactgtgtggccagcccattgggcacccgtgtaactgtggttgagcaaggccaggcctcctatttctacgtggcatcctcactggacgcagccgtggctgccagcttcagcccacgctcagtgtctatcaggcgtctcaaggctgacgcctcgggattcgcaccgggctttgtggcgttgtcagtgctgcccaagcatcttgtctcctacagtattgaatacgtgcacagcttccacacgggagccttcgtatacttcctgactgtacagccggccagcgtgacagatgatcctagtgccctgcacacacgcctggcacggcttagcgccactgagccagagttgggtgactatcgggagctggtcctcgactgcagatttgctccaaaacgcaggcgccggggggccccagaaggcggacagccctaccctgtgctgcgggtggcccactccgctccagtgggtgcccaacttgccactgagctgagcatcgccgagggccaggaagtactatttggggtctttgtgactggcaaggatggtggtcctggcgtgggccccaactctgtcgtctgtgccttccccattgacctgctggacacactaattgatgagggtgtggagcgctgttgtgaatccccagtccatccaggcctccggcgaggcctcgacttcttccagtcgcccagtttttgccccaacccgcctggcctggaagccctcagccccaacaccagctgccgccacttccctctgctggtcagtagcagcttctcacgtgtggacctattcaatgggctgttgggaccagtacaggtcactgcattgtatgtgacacgccttgacaacgtcacagtggcacacatgggcacaatggatgggcgtatcctgcaggtggagctggtcaggtcactaaactacttgctgtatgtgtccaacttctcactgggtgacagtgggcagcccgtgcagcgggatgtcagtcgtcttggggaccacctactctttgcctctggggaccaggttttccaggtacctatccaaggccctggctgccgccacttcctgacctgtgggcgttgcctaagggcatggcatttcatgggctgtggctggtgtgggaacatgtgcggccagcagaaggagtgtcctggctcctggcaacaggaccactgcccacctaagcttactgagttccacccccacagtggacctctaaggggcagtacaaggctgaccctgtgtggctccaacttctaccttcacccttctggtctggtgcctgagggaacccatcaggtcactgtgggccaaagtccctgccggccactgcccaaggacagctcaaaactcagaccagtgccccggaaagactttgtagaggagtttgagtgtgaactggagcccttgggcacccaggcagtggggcctaccaacgtcagcctcaccgtgactaacatgccaccgggcaagcacttccgggtagacggcacctccgtgctgagaggcttctctttcatggagccagtgctgatagcagtgcaacccctctttggcccacgggcaggaggcacctgtctcactcttgaaggccagagtctgtctgtaggcaccagccgggctgtgctggtcaatgggactgagtgtctgctagcacgggtcagtgaggggcagcttttatgtgccacaccccctggggccacggtggccagtgtcccccttagcctgcaggtggggggtgcccaggtacctggttcctggaccttccagtacagagaagaccctgtcgtgctaagcatcagccccaactgtggctacatcaactcccacatcaccatctgtggccagcatctaacttcagcatggcacttagtgctgtcattccatgacgggcttagggcagtggaaagcaggtgtgagaggcagcttccagagcagcagctgtgccgccttcctgaatatgtggtccgagacccccagggatgggtggcagggaatctgagtgcccgaggggatggagctgctggctttacactgcctggctttcgcttcctacccccaccccatccacccagtgccaacctagttccactgaagcctgaggagcatgccattaagtttgagtatattgggctgggcgctgtggctgactgtgtgggtatcaacgtgaccgtgggtggtgagagctgccagcacgagttccggggggacatggttgtctgccccctgcccccatccctgcagcttggccaggatggtgccccattgcaggtctgcgtagatggtgaatgtcatatcctgggtagagtggtgcggccagggccagatggggtcccacagagcacgctccttggtatcctgctgcctttgctgctgcttgtggctgcactggcgactgcactggtcttcagctactggtggcggaggaagcagctagttcttcctcccaacctgaatgacctggcatccctggaccagactgctggagccacacccctgcctattctgtactcgggctctgactacagaagtggccttgcactccctgccattgatggtctggattccaccacttgtgtccatggagcatccttctccgatagtgaagatgaatcctgtgtgccactgctgcggaaagagtccatccagctaagggacctggactctgcgctcttggctgaggtcaaggatgtgctgattccccatgagcgggtggtcacccacagtgaccgagtcattggcaaaggccactttggagttgtctaccacggagaatacatagaccaggcccagaatcgaatccaatgtgccatcaagtcactaagtcgcatcacagagatgcagcaggtggaggccttcctgcgagaggggctgctcatgcgtggcctgaaccacccgaatgtgctggctctcattggtatcatgttgccacctgagggcctgccccatgtgctgctgccctatatgtgccacggtgacctgctccagttcatccgctcacctcagcggaaccccaccgtgaaggacctcatcagctttggcctgcaggtagcccgcagcatggagtacctggcagagcagaagtttgtgcacagggacctggctgcgcggaactgcatgctggacgagtcattcacagtcaaggtggctgactttggtttggcccgcgacatcctggacagggagtactatagtgttcaacagcatcgccacgctcgcctacctgtgaagtggatggcgctggagagcctgcagacctatagatttaccaccaagtctgatgtgtggtcatttggtgtgctgctgtgggaactgctgacacggggtgccccaccataccgccacattgacccttttgaccttacccacttcctggcccagggtcggcgcctgccccagcctgagtattgccctgattctctgtaccaagtgatgcagcaatgctgggaggcagacccagcagtgcgacccaccttcagagtactagtgggggaggtggagcagatagtgtctgcactgcttggggaccattatgtgcagctgccagcaacctacatgaacttgggccccagcacctcgcatgagatgaatgtgcgtccagaacagccgcagttctcacccatgccagggaatgtacgccggccccggccactctcagagcctcctcggcccacttgacttagttcttgggctggacctgcttagctgccttgagctaaccccaagctgcctctgggccatgccaggccagagggcagtggccctccaccttgttcctgccctttaactttcagaggcaataggtaaatggggcccattaggtccctcactccacagagtgagccagtgagggcagtcctgcaacatgtatttatggagtgcctgctgtggaccctgtcttctgggcacagtggactcagcagtgaccacaccaacactgacccttgaaccaataaaggaacaaatgactattaaagcacaaa

SEQ ID NO: 128472 - DNA, 4203 bp, Artificial Sequence
  derived and/or modified sequence
atggagctgctgccccccctgccccagagcttcctgctgctgctgctactaccagccaaaccggctgccggagaggattggcagtgtccaagaacaccctacgccgcgagcagggactttgacgtgaagtatgtggtccccagtttcagcgctggtggtcttgtccaggccatggttacatatgagggtgatcgcaacgagtctgctgtttttgtagctattcgcaatcgcctccatgtgcttggtccggatctgaagagtgtccagtctctggcaacgggccccgccggcgaccctggatgccagacctgcgcagcttgcggccctggtcctcacggcccacctggagataccgatactaaagtactcgtgttagatcccgccttgcctgctctggtcagctgtggcagttctctgcaggggagatgcttcctgcacgatttagaacctcaggggaccgccgtccatctggcggctcctgcatgtctgttctctgcccaccataaccgccctgacgattgcccagattgcgtcgcatcccctctcggtacgcgggtgactgttgtggaacaggggcaggccagctacttctacgtcgcctcatcccttgacgctgcagtggccgcctcattttcccccaggtccgtctccatcagacggcttaaagccgacgcatcaggatttgcccctggttttgtggctctgtccgtgctgcccaagcacctcgtgtcctacagcattgagtacgtacactcctttcataccggtgcttttgtatactttctgactgttcagccggcctctgtgaccgacgatccaagcgccctgcacacccgccttgccagactgtcagctactgagcctgagctgggcgactaccgagagctggtcttagattgccgcttcgcccccaagcggaggcggcgaggcgctcccgaagggggccagccttaccccgtcctccgcgtcgctcattctgcccctgtgggggctcagctagcaacagagctctcaatcgccgagggccaggaggtgctgttcggcgtcttcgtgaccgggaaggacgggggacctggggtagggcccaattccgtggtgtgcgcgttccctatagatctcctggacacactgatcgacgagggggtcgagcgctgctgcgaaagtccagtccacccaggactacgccgaggactggatttttttcagagcccttcattctgtcccaatcctcccggcctcgaagctctctcacccaatacaagttgccgtcatttccctctgctggtcagctctagcttctcccgggtggatctgttcaacgggctgctagggcccgttcaagtcacagccctctatgttacgcgtttagataacgtgacggtggctcacatgggaaccatggacggacgcatcctgcaggtggagctggtgcggtccttgaattacctcctgtatgtctctaacttcagcctcggggactcagggcaaccggtccaacgagacgtgtcccgcttgggggaccatttgttgtttgcctctggggatcaggtgttccaagtgcctatccagggaccaggttgtaggcacttccttacctgcgggcggtgtctgagggcctggcacttcatgggctgtgggtggtgtggaaacatgtgcggccagcaaaaggaatgccccgggtcttggcagcaggatcattgccctcctaaactcactgaatttcatcctcattccggcccactgcggggctctacacgattaaccctgtgtggcagcaacttctatttgcatccctcgggcctggtcccagagggcactcatcaagtgactgtcggacagtccccttgtcgaccattacccaaggacagttccaagttgagacctgtgcctcggaaggactttgtggaggagttcgagtgcgaactcgagccactaggcacccaggccgtcgggccgactaatgtatccctgacagtgactaatatgccaccaggaaagcattttagggtggatggcacctctgttctgagaggcttttctttcatggaacccgtactcattgcagtgcagccattgttcgggccccgggcgggcggaacgtgcctgactcttgaggggcagagcctgagcgtggggacgagtcgcgccgttcttgtgaacgggactgagtgccttcttgccagggtgagtgaaggtcagttgctttgtgccaccccaccaggcgcaaccgtggcgtctgtgccactcagtctgcaggtcggaggagcccaggtgccaggaagttggacattccagtatagggaggatccagttgtcctctccataagccccaactgcggatacattaattctcatattactatttgcggtcaacacctgacaagcgcctggcacttggtgctgtccttccatgacggcctgagagccgtcgagtcccgttgtgagcgtcagctgcctgaacaacagttgtgccgtttgccagaatacgtcgttcgggacccgcagggctgggtcgccggtaacctgtccgcccgcggcgacggagccgcagggttcacattaccaggctttagatttctccctccaccccacccaccgtccgccaacctcgtgcccctcaaacccgaggagcacgccataaagtttgaatatattggcttgggagctgtcgccgattgcgtagggataaacgtaaccgttggaggggagagctgccagcatgagttccgtggagacatggtggtctgtcctttacctccttccttgcagcttgggcaggacggggcgcccctgcaggtttgtgtggatggcgaatgtcacatccttggtcgagtagtacgccctggccctgacggggtgcctcagtcaactctgctcgggattttactccctctgttgcttttggtggctgctctggcgacggccttggtgttttcttactggtggagacgcaagcaactggtgctcccgcctaatcttaatgacctcgctagtttagaccaaaccgcaggggcaacacctctgcccattctgtacagcggctccgactatcgatccgggctggctctgcccgccatcgacggcttggactctactacctgcgtccacggagccagcttcagtgattctgaggacgagtcatgtgtgcccttgctgcgcaaagagtctatccagctgcgcgacctggattccgccctgttagccgaggtgaaagacgttctcatccctcacgagagggtggtgactcattccgacagagtgatcggtaaaggccacttcggagtggtgtatcatggagaatatatagaccaggctcagaataggattcaatgcgccataaagagcctaagcaggattacagagatgcagcaagtggaagctttcctgcgtgaaggcctgttgatgaggggactgaatcatccaaacgtcctggccctcattggtattatgctgcctcctgaaggattacctcacgtgctcctgccgtacatgtgccacggagacctgttgcagttcatacggtccccccagaggaacccaacggtcaaagatttgattagctttggcctacaggtggctagatccatggagtacctcgccgagcagaagtttgtgcatcgagaccttgctgctcgtaattgtatgcttgatgagagttttacagtgaaggtggcagacttcgggctagcacgggacatcctggatcgagagtactactccgtacaacaacaccgtcacgctaggctccccgtcaagtggatggcactggaaagcttgcagacttatcgctttaccactaagtctgatgtatggtccttcggcgtgctgctgtgggaactgctaacgagaggggcccctccgtatcgccacattgatccttttgacctgactcactttttggcgcagggcagacggctgccgcagcccgaatattgtcccgacagcttgtatcaggttatgcagcaatgttgggaagcagaccctgccgtgcgacccacgttcagggtgcttgtgggcgaggtcgaacagatcgtgtccgctctcctgggcgaccactacgtgcagctacccgccacctacatgaacctgggcccaagcacctcccacgaaatgaacgtgaggccagagcagccacagttctcacccatgcctggtaacgtccgcagacctagacctctctctgaaccaccacgacctacgtag

SEQ ID NO: 128473 - DNA, 4203 bp, Artificial Sequence
  derived and/or modified sequence
atggagctgctcccccctctgccacagagtttcctgctactccttcttctgcccgctaaacctgctgctggggaggattggcagtgcccacggacaccatatgctgcttctagagactttgacgtgaaatacgtggttccctcattttctgctggtggactggtacaggccatggtgacatatgagggagatcgtaacgagagtgccgtgtttgtcgccatcagaaacagactccacgtgcttgggcctgatctcaaaagcgtgcagagcctcgctaccggtcccgcaggagatccaggctgtcaaacctgtgctgcttgtggtcccggaccccatggcccaccgggtgacacagacaccaaggttctcgtgctggatccagccctgcctgccttagtgtcctgtggaagcagccttcagggacggtgcttccttcatgacctcgagccacagggcaccgctgtgcaccttgctgcacctgcttgcctgttttcggctcatcataacagacctgacgattgtcctgactgcgtggccagcccgctggggactagagtgaccgtcgtggagcaagggcaagccagttatttttatgtcgcatctagcctcgacgcagccgtggctgcaagctttagtcccaggagtgtctccattaggagactgaaagccgacgcctctggattcgctccaggtttcgtcgctctctcagttctcccaaaacacctagtttcatattcaatagagtatgtgcatagctttcacacaggcgcttttgtctatttcctcacggtgcagccggcttccgtgacagatgaccctagtgccctgcacacgagactggccagactgtctgctaccgaacctgaattgggagactatcgcgagctcgtcctggattgtcggtttgctccaaagaggagacgtcgtggcgctcctgaggggggtcagccttatcctgtgctacgtgtggcccactccgcccctgttggagcacagcttgccaccgagctgagcatcgctgaaggccaagaggtgcttttcggggttttcgttacaggaaaggacggtgggcctggtgtggggcctaattccgtcgtgtgcgccttcccgattgatttgttagacaccctgatcgatgaaggagtcgagcgatgctgcgagtccccagtccatccagggcttcgaagaggactggacttcttccagtctcccagtttctgccccaacccccctggcttggaggcgttatcacctaatacttcctgccgtcactttccactgctcgtctcctcctctttctcccgagtggacctgttcaatggcctcctgggccctgtgcaggtaaccgccctttatgtgacccgattggacaacgttactgtggcacatatgggcactatggatgggagaatcctgcaggtcgaattagtccggtccctcaactaccttttgtatgtgtccaatttttccctcggagattctggacaaccagttcagcgggacgtgtctaggcttggggaccatctacttttcgctagcggcgatcaggtgttccaggtgcccatccaagggcctggttgccgccattttttaacatgcggcaggtgtcttcgcgcatggcattttatgggatgtgggtggtgcggcaacatgtgcggtcagcagaaggagtgccccggaagctggcaacaggatcactgccccccaaagctcacagagttccaccctcacagcgggccactgcggggatctacccggctcactttatgcggctcgaatttttatttgcatcccagcggactcgtacctgaaggcacacatcaggtgactgtggggcagtccccatgcagacctttgcctaaagactccagtaagttgcggcctgtgccgcgtaaggactttgttgaggaattcgagtgcgaactggagcccctgggtacccaggccgtaggcccaactaacgtgtctttaaccgtgaccaatatgccacccggaaagcactttcgagttgatggtacctctgttcttcggggattctccttcatggagcctgtgttaatcgctgtgcagccactgtttgggcctcgtgccggtggaacctgcctcaccctcgaagggcagagccttagcgtggggacctctcgggcagtgctagttaacggcactgaatgtttacttgcacgggtcagtgaaggtcagcttctctgtgccactcccccaggtgcgacagtggcctcagttcccttaagcttgcaggtggggggtgcccaggtgcccggatcctggacattccagtatcgtgaagatcctgtagtcctctccatcagcccgaattgtggatacataaatagccatatcacgatttgcggacagcacctaactagcgcatggcacttggtgctttcctttcacgatgggctaagagccgttgagagccgctgtgaacgccaactgcccgagcagcaactgtgtaggctgcccgaatacgtagtgcgcgatccgcagggatgggtcgccggaaatctgtctgctcggggagacggggctgctgggtttaccctccctggatttagatttttgccgccacctcatccaccatccgcaaacctggtgcctcttaagcccgaggaacacgctatcaagtttgagtatattgggcttggtgcagtcgccgattgtgtgggaatcaatgtgacagtaggcggagagtcatgccagcacgagttccgtggcgatatggtggtttgccctctgcccccatcattgcagttagggcaggatggggcacccctccaggtgtgcgtggacggggaatgtcatatcctgggcagagtggtaaggcccggaccagatggcgttccacagtccaccctgctcggcatcctcctgcctctgctgcttctggtcgccgcactggccactgcactggtgttttcatattggtggcgccgaaaacagttagtcttgcctccaaatctaaacgaccttgcaagtttggaccagactgctggggcaacaccgctgccaattttgtactccgggtccgattaccgcagcggcctggctctgcccgctatagacggccttgatagcactacatgtgtgcatggggcttcattcagcgacagcgaggacgaaagttgcgtgccactgcttcgcaaggagtcaattcagctgagggacttggactcagctctcttagcagaagtgaaagatgttttaattccccacgagagggtagtgacacattcggaccgggtgatcggaaaaggccacttcggcgtggtgtaccacggggaatatatcgaccaggcccagaataggatccaatgtgcgatcaagagtctgagtcgaattactgaaatgcagcaagtggaggccttcctgcgagagggattgctcatgcggggactgaatcatcctaacgtcttggccctgatcggaatcatgcttcctcctgaaggtctcccacatgtgctgctcccatacatgtgtcacggtgacctgcttcagtttatccgcagcccccagcggaatcccaccgtaaaggacctcatttcttttggtctgcaggtggcacgttcgatggaatacctggcggagcagaaattcgtccacagagacctggccgctcgcaattgtatgctagacgaatccttcacagtgaaggttgctgactttgggctggctcgcgatattttagacagagagtattactccgtgcagcagcaccgccatgccaggttacctgtgaagtggatggctttggagagcttacagacatatcgcttcacaacaaagagtgacgtttggtcctttggcgtcctactgtgggagttacttactagaggggctcccccatatcggcatatcgatccattcgacctgacacactttctagcccagggcagaaggctaccccagcccgaatactgtcccgatagcctataccaggtgatgcagcagtgctgggaagcagacccagccgtgcgtcccaccttccgcgtgcttgtcggtgaggttgaacaaattgtctcagccctcctgggggatcactatgtccagctccccgctacatacatgaacctgggacccagcacatcacatgaaatgaatgtccgccctgaacagcctcagttttccccaatgcctggcaacgtgcgcagacctcggccactgagcgagccaccacgacccacctag

SEQ ID NO: 128474 - DNA, 4203 bp, Artificial Sequence
  derived and/or modified sequence
atggagctgctgccccccctgccccagagcttcctgctgctgctgctgctgcccgccaagcccgccgccggcgaggactggcagtgccccagaaccccctacgccgccagcagagacttcgacgtgaagtacgtggtgcccagcttcagcgccggcggcctggtgcaggccatggtgacctacgagggcgacagaaacgagagcgccgtgttcgtggccatcagaaacagactgcacgtgctgggccccgacctgaagagcgtgcagagcctggccaccggccccgccggcgaccccggctgccagacctgcgccgcctgcggccccggcccccacggcccccccggcgacaccgacaccaaggtgctggtgctggaccccgccctgcccgccctggtgagctgcggcagcagcctgcagggcagatgcttcctgcacgacctggagccccagggcaccgccgtgcacctggccgcccccgcctgcctgttcagcgcccaccacaacagacccgacgactgccccgactgcgtggccagccccctgggcaccagagtgaccgtggtggagcagggccaggccagctacttctacgtggccagcagcctggacgccgccgtggccgccagcttcagccccagaagcgtgagcatcagaagactgaaggccgacgccagcggcttcgcccccggcttcgtggccctgagcgtgctgcccaagcacctggtgagctacagcatcgagtacgtgcacagcttccacaccggcgccttcgtgtacttcctgaccgtgcagcccgccagcgtgaccgacgaccccagcgccctgcacaccagactggccagactgagcgccaccgagcccgagctgggcgactacagagagctggtgctggactgcagattcgcccccaagagaagaagaagaggcgcccccgagggcggccagccctaccccgtgctgagagtggcccacagcgcccccgtgggcgcccagctggccaccgagctgagcatcgccgagggccaggaggtgctgttcggcgtgttcgtgaccggcaaggacggcggccccggcgtgggccccaacagcgtggtgtgcgccttccccatcgacctgctggacaccctgatcgacgagggcgtggagagatgctgcgagagccccgtgcaccccggcctgagaagaggcctggacttcttccagagccccagcttctgccccaacccccccggcctggaggccctgagccccaacaccagctgcagacacttccccctgctggtgagcagcagcttcagcagagtggacctgttcaacggcctgctgggccccgtgcaggtgaccgccctgtacgtgaccagactggacaacgtgaccgtggcccacatgggcaccatggacggcagaatcctgcaggtggagctggtgagaagcctgaactacctgctgtacgtgagcaacttcagcctgggcgacagcggccagcccgtgcagagagacgtgagcagactgggcgaccacctgctgttcgccagcggcgaccaggtgttccaggtgcccatccagggccccggctgcagacacttcctgacctgcggcagatgcctgagagcctggcacttcatgggctgcggctggtgcggcaacatgtgcggccagcagaaggagtgccccggcagctggcagcaggaccactgcccccccaagctgaccgagttccacccccacagcggccccctgagaggcagcaccagactgaccctgtgcggcagcaacttctacctgcaccccagcggcctggtgcccgagggcacccaccaggtgaccgtgggccagagcccctgcagacccctgcccaaggacagcagcaagctgagacccgtgcccagaaaggacttcgtggaggagttcgagtgcgagctggagcccctgggcacccaggccgtgggccccaccaacgtgagcctgaccgtgaccaacatgccccccggcaagcacttcagagtggacggcaccagcgtgctgagaggcttcagcttcatggagcccgtgctgatcgccgtgcagcccctgttcggccccagagccggcggcacctgcctgaccctggagggccagagcctgagcgtgggcaccagcagagccgtgctggtgaacggcaccgagtgcctgctggccagagtgagcgagggccagctgctgtgcgccaccccccccggcgccaccgtggccagcgtgcccctgagcctgcaggtgggcggcgcccaggtgcccggcagctggaccttccagtacagagaggaccccgtggtgctgagcatcagccccaactgcggctacatcaacagccacatcaccatctgcggccagcacctgaccagcgcctggcacctggtgctgagcttccacgacggcctgagagccgtggagagcagatgcgagagacagctgcccgagcagcagctgtgcagactgcccgagtacgtggtgagagacccccagggctgggtggccggcaacctgagcgccagaggcgacggcgccgccggcttcaccctgcccggcttcagattcctgccccccccccacccccccagcgccaacctggtgcccctgaagcccgaggagcacgccatcaagttcgagtacatcggcctgggcgccgtggccgactgcgtgggcatcaacgtgaccgtgggcggcgagagctgccagcacgagttcagaggcgacatggtggtgtgccccctgccccccagcctgcagctgggccaggacggcgcccccctgcaggtgtgcgtggacggcgagtgccacatcctgggcagagtggtgagacccggccccgacggcgtgccccagagcaccctgctgggcatcctgctgcccctgctgctgctggtggccgccctggccaccgccctggtgttcagctactggtggagaagaaagcagctggtgctgccccccaacctgaacgacctggccagcctggaccagaccgccggcgccacccccctgcccatcctgtacagcggcagcgactacagaagcggcctggccctgcccgccatcgacggcctggacagcaccacctgcgtgcacggcgccagcttcagcgacagcgaggacgagagctgcgtgcccctgctgagaaaggagagcatccagctgagagacctggacagcgccctgctggccgaggtgaaggacgtgctgatcccccacgagagagtggtgacccacagcgacagagtgatcggcaagggccacttcggcgtggtgtaccacggcgagtacatcgaccaggcccagaacagaatccagtgcgccatcaagagcctgagcagaatcaccgagatgcagcaggtggaggccttcctgagagagggcctgctgatgagaggcctgaaccaccccaacgtgctggccctgatcggcatcatgctgccccccgagggcctgccccacgtgctgctgccctacatgtgccacggcgacctgctgcagttcatcagaagcccccagagaaaccccaccgtgaaggacctgatcagcttcggcctgcaggtggccagaagcatggagtacctggccgagcagaagttcgtgcacagagacctggccgccagaaactgcatgctggacgagagcttcaccgtgaaggtggccgacttcggcctggccagagacatcctggacagagagtactacagcgtgcagcagcacagacacgccagactgcccgtgaagtggatggccctggagagcctgcagacctacagattcaccaccaagagcgacgtgtggagcttcggcgtgctgctgtgggagctgctgaccagaggcgcccccccctacagacacatcgaccccttcgacctgacccacttcctggcccagggcagaagactgccccagcccgagtactgccccgacagcctgtaccaggtgatgcagcagtgctgggaggccgaccccgccgtgagacccaccttcagagtgctggtgggcgaggtggagcagatcgtgagcgccctgctgggcgaccactacgtgcagctgcccgccacctacatgaacctgggccccagcaccagccacgagatgaacgtgagacccgagcagccccagttcagccccatgcccggcaacgtgagaagacccagacccctgagcgagccccccagacccacctag

SEQ ID NO: 128475 - protein, 303 aa, Artificial Sequence
  derived and/or modified sequence
MAPAADMTSLPLGVKVEDSAFGKPAGGGAGQAPSAAAATAAAMGADEEGAKPKVSPSLLPFSVEALMADHRKPGAKESALAPSEGVQAAGGSAQPLGVPPGSLGAPDAPSSPRPLGHFSVGGLLKLPEDALVKAESPEKPERTPWMQSPRFSPPPARRLSPPACTLRKHKTNRKPRTPFTTAQLLALERKFRQKQYLSIAERAEFSSSLSLTETQVKIWFQNRRAKAKRLQEAELEKLKMAAKPMLPPAAFGLSFPLGGPAAVAAAAGASLYGASGPFQRAALPVAPVGLYTAHVGYSMYHLT

SEQ ID NO: 128476 - DNA, 912 bp, Artificial Sequence
  derived and/or modified sequence
atggcgcccgccgcagatatgaccagtctgcccctcggcgtgaaagtggaagatagtgcctttgggaagcctgcgggaggtggtgcaggccaggccccctctgcagccgcggccaccgccgccgccatgggagccgacgaggagggagctaaacccaaagtgtccccatcccttctgcccttttcagttgaggccctgatggcggaccatcgcaagcccggggcaaaagaatccgcccttgccccctcagagggcgttcaggcagctggtggctctgctcagccactgggcgtgcctcctggcagcctcggagctccagacgcgccatcaagtccccgcccactgggtcacttttcagttggaggcctccttaagttgcccgaagacgccttagtaaaggctgagagtcccgagaaaccggaacggacgccttggatgcaatcaccgcgcttcagcccaccaccagcaagacgtctctcaccacctgcctgtaccctgcggaagcacaagaccaaccggaagccaagaaccccctttacaaccgctcagctccttgcattggaacggaagttcagacagaaacaatatcttagcattgcagagagggccgaatttagttctagcctgtcattgaccgaaacccaggttaagatctggttccagaacagacgcgccaaggctaaacggttgcaagaagctgaattggagaagctgaaaatggccgctaagcctatgcttccaccggcggccttcggcctgtcttttccactaggggggcccgctgctgtcgctgctgcagcaggggccagcctctatggagcctcaggcccattccagcgagccgccctgcccgtggcccccgtagggttatataccgcacacgtaggctactccatgtatcacctaacgtag

SEQ ID NO: 128477 - DNA, 912 bp, Artificial Sequence
  derived and/or modified sequence
atggccccagctgctgacatgaccagcctgcccctgggcgtgaaggtggaggacagcgccttcggcaagccagctgggggcggggccggccaggcccccagcgctgctgctgccacagctgctgccatgggcgcagatgaggagggcgccaagcccaaggtgagccccagcctgctgcccttctctgtggaggccctgatggctgaccacaggaagccaggggccaaggagagcgccctggcccccagcgagggcgtgcaggccgccggcggcagcgcccagcccctgggcgtgcccccaggcagcctgggcgccccagatgcccccagcagcccccggcccctgggccacttctctgtgggcggcctgctgaagctgcctgaagatgccctggtgaaggccgagagccctgagaagccagagaggaccccctggatgcagagcccccgcttcagccccccaccagcccggcggctgagccccccagcctgcaccctgaggaagcacaagaccaacaggaagcccaggacccccttcaccacagcccagctgctggccctggagaggaagttccggcagaagcagtacctgagcattgctgagagagctgagttcagcagcagcctgagcctgacagagacccaggtgaagatctggttccagaacagaagagccaaggccaagaggctgcaggaggccgagctggagaagctgaagatggccgccaagcccatgctgcccccagctgccttcggcctgtccttccccctgggcggccctgctgctgtggccgctgctgctggggccagcctgtatggagccagcggccccttccagagagctgccctgcctgtggcccctgtgggcctgtacacagcccacgtgggctacagcatgtaccacctgacctag

SEQ ID NO: 128478 - DNA, 1939 bp, Artificial Sequence
  derived and/or modified sequence
gggcccggagccggcgagtgctcccgggaactctgcctgcgcggcggcagcgaccggaggccaggcccagcacgccggagctggcctgctggggaggggcgggaggcgcgcgcgggagggtccgcccggccagggccccgggcgctcgcagaggccggccgcgctcccagcccgcccggagcccatgcccggcggctggccagtgctgcggcagaagggggggcccggctctgcatggccccggctgctgacatgacttctttgccactcggtgtcaaagtggaggactccgccttcggcaagccggcggggggaggcgcgggccaggcccccagcgccgccgcggccacggcagccgccatgggcgcggacgaggagggggccaagcccaaagtgtccccttcgctcctgcccttcagcgtggaggcgctcatggccgaccacaggaagccgggggccaaggagagcgccctggcgccctccgagggcgtgcaggcggcgggtggctcggcgcagccactgggcgtcccgccggggtcgctgggagccccggacgcgccctcttcgccgcggccgctcggccatttctcggtggggggactcctcaagctgccagaagatgcgctcgtcaaagccgagagccccgagaagcccgagaggaccccgtggatgcagagcccccgcttctccccgccgccggccaggcggctgagccccccagcctgcaccctccgcaaacacaagacgaaccgtaagccgcggacgcccttcaccaccgcgcagctgctggcgctggagcgcaagttccgccagaagcagtacctgtccatcgccgagcgcgcggagttctccagctcgctcagcctcactgagacgcaggtgaagatatggttccagaaccgccgcgccaaggcaaagagactacaagaggcagagctggagaagctgaagatggccgccaagcccatgctgccaccggctgccttcggcctctccttccctctcggcggccccgcagctgtagcggccgcggcgggtgcctcgctctacggtgcctctggccccttccagcgcgccgcgctgcctgtggcgcccgtgggactctacacggcccatgtgggctacagcatgtaccacctgacatagagggtcccaggtcgcccacctgtgggccagccgattcctccagccctggtgctgtacccccgacgtgctcccctgctcggcaccgccagccgccttccctttaaccctcacactgctccagtttcacctctttgctccctgagttcactctccgaagtctgatccctgccaaaaagtggctggaagagtcccttagtactcttctagcatttagatctacactctcgagttaaagatggggaaactgagggcagagaggttaacagatttatctaaggtccccagcagaattgacagttgaacagagctagaggccatgtctcctgcatagcttttccctgtcctgacaccaggcaagaaaagcgcagagaaatcggtgtctgacgattttggaaatgagaacaatctcaaaaaaaaaaaaaaaaaaaaaaaaaaaaaaaaaaaagaaaagagaaaaaaaagactagccagccaggaagatgaatcctagcttcttccattggaaaatttaagacaagttcaacaacaaaacatttgctctggggggcagggaaaacacagatgtgttgcaaaggtaggttgaagggacctctctcttaccagtaccagaaacacaattgtaaaattaaaaaaaaaaaaaaactctttctatttaacagtacatttgtgtggctctcaaacatccctttggaagggattgtgtgtactatgtaatatactgtatatttgaaattttattatcatttatattatagctatatttgttaaataaattaattttaagctacaaaaa

SEQ ID NO: 128479 - DNA, 912 bp, Artificial Sequence
  derived and/or modified sequence
atggcccccgccgccgacatgaccagcctgcccctgggcgtgaaggtcgaggatagtgccttcggaaagccagccggaggtggggcgggacaagcaccttccgccgctgctgctactgctgccgccatgggcgcagatgaggaaggtgctaagcccaaggttagcccaagccttctgcccttctccgttgaggcgctgatggcagatcaccggaaaccaggggcgaaggaaagcgccctggccccgtctgaaggtgtgcaagctgcaggcgggtctgctcagccactcggtgtccccccagggtccctgggcgctccagatgcgccatcctccccacggcccctgggacatttttccgtgggcggcctactcaagttaccagaggatgcactggtcaaggccgaatcgcccgaaaaacccgagcggacaccctggatgcaatcccctcgattttccccccctcctgccagacgcctgtcacccccggcttgcactctacgcaagcacaaaactaatcgaaaaccccgaacaccctttactacggcgcagcttctcgctctggagcggaagtttcgacagaagcagtatctgtccattgctgagcgagctgagtttagttcatcactaagtctaaccgaaacccaggtcaagatttggttccagaatagacgcgccaaggcaaagaggctacaggaggcagaactggaaaaactgaaaatggctgcgaaacctatgctgccacccgccgcattcggtctatccttcccacttggaggccctgccgcagtcgccgccgcagcaggcgcgtctttatacggggcaagtggccctttccagcgcgccgcgctgcccgtcgctcccgtggggctctacacggcccacgtgggctattcaatgtatcatctgacttag

SEQ ID NO: 128480 - DNA, 912 bp, Artificial Sequence
  derived and/or modified sequence
atggccccagccgcagatatgacatcccttccgctcggcgtgaaggtggaggatagtgctttcggcaaacccgcagggggaggcgcagggcaggcaccttccgctgcagccgctacagccgcagctatgggggctgatgaggaaggggctaagcctaaggttagtccctcactacttcccttctctgttgaagccctgatggccgatcacagaaagcctggtgctaaagagtccgctttggccccatctgaaggcgtgcaggcagctgggggtagcgcccagccgctgggagtgccaccaggcagcctcggcgctcccgacgcgccaagctcacccagacctcttggccacttctctgtcggaggattactgaaactgcctgaagacgctctcgttaaggctgagagcccagaaaagccagagagaacaccctggatgcagagtccccgattctccccgcctccagccagaagactgtctcctcctgcgtgcacactcaggaaacacaaaacaaatcgtaagcctcgaaccccattcacaaccgcgcagttgctggccttggaacgcaaattccgtcagaaacaatacctctccattgcagagcgtgccgagttttcctcctccctgtcccttactgagacacaagtgaaaatatggtttcagaatcggagagccaaggcaaagaggctccaagaggcggaactggaaaagctgaagatggccgctaagcctatgttaccgcctgcagcctttggtctcagcttcccattgggtggccctgcagccgtggccgcagccgctggcgcaagtctatacggggcttcggggcctttccaaagagcggcactcccagtggcgcctgtgggcttgtacactgcccacgtgggatacagcatgtatcacttaacatag

SEQ ID NO: 128481 - DNA, 912 bp, Artificial Sequence
  derived and/or modified sequence
atggcccccgccgccgacatgaccagcctgcccctgggcgtgaaggtggaggacagcgccttcggcaagcccgccggcggcggcgccggccaggcccccagcgccgccgccgccaccgccgccgccatgggcgccgacgaggagggcgccaagcccaaggtgagccccagcctgctgcccttcagcgtggaggccctgatggccgaccacagaaagcccggcgccaaggagagcgccctggcccccagcgagggcgtgcaggccgccggcggcagcgcccagcccctgggcgtgccccccggcagcctgggcgcccccgacgcccccagcagccccagacccctgggccacttcagcgtgggcggcctgctgaagctgcccgaggacgccctggtgaaggccgagagccccgagaagcccgagagaaccccctggatgcagagccccagattcagccccccccccgccagaagactgagcccccccgcctgcaccctgagaaagcacaagaccaacagaaagcccagaacccccttcaccaccgcccagctgctggccctggagagaaagttcagacagaagcagtacctgagcatcgccgagagagccgagttcagcagcagcctgagcctgaccgagacccaggtgaagatctggttccagaacagaagagccaaggccaagagactgcaggaggccgagctggagaagctgaagatggccgccaagcccatgctgccccccgccgccttcggcctgagcttccccctgggcggccccgccgccgtggccgccgccgccggcgccagcctgtacggcgccagcggccccttccagagagccgccctgcccgtggcccccgtgggcctgtacaccgcccacgtgggctacagcatgtaccacctgacctag

SEQ ID NO: 128482 - protein, 267 aa, Artificial Sequence
  derived and/or modified sequence
MASPSKGNDLFSPDEEGPAVVAGPGPGPGGAEGAAEERRVKVSSLPFSVEALMSDKKPPKEASPLPAESASAGATLRPLLLSGHGAREAHSPGPLVKPFETASVKSENSEDGAAWMQEPGRYSPPPRHMSPTTCTLRKHKTNRKPRTPFTTSQLLALERKFRQKQYLSIAERAEFSSSLNLTETQVKIWFQNRRAKAKRLQEAELEKLKMAAKPMLPSSFSLPFPISSPLQAASIYGASYPFHRPVLPIPPVGLYATPVGYGMYHLS

SEQ ID NO: 128483 - DNA, 116 bp, Artificial Sequence
  derived and/or modified sequence
accacgtcccagctcctcgctctggaggcaagttgctccagaaacagtacctctccattgcagagggtgcggacttctccagctctccgaacctcacggagactcaggtcaaaatc

SEQ ID NO: 128484 - DNA, 804 bp, Artificial Sequence
  derived and/or modified sequence
atggcgagcccctccaaaggtaatgacttgttctctccagacgaggagggacccgctgtggtcgccgggccaggccctggccccggcggcgccgaaggcgctgccgaagaaaggcgcgtcaaagtgagtagcctgccgttcagcgtggaggccctgatgtctgataagaagccccccaaagaggcttcccccctcccggcagaaagcgccagtgcgggtgccaccctaaggcctctactgttgtcaggtcacggtgcaagagaagctcattcaccaggtccactcgtgaaaccattcgagaccgcgagcgtgaaaagtgaaaatagtgaggacggagccgcttggatgcaggaacctggcaggtactctcccccaccccggcacatgtctccaaccacttgtacgcttcgaaagcataagaccaataggaaaccaagaacaccttttacaacatcacaactgctggccctcgagagaaagttccgacaaaagcagtacctaagcattgccgaacgagctgagttcagttcttcgcttaacctgacggagacccaagtcaagatctggttccagaacaggagagcaaaagccaaacgtctgcaggaggctgagttggagaaattgaagatggctgctaagccaatgctgccctcctcattcagcctgcccttccctatctcttctcccctgcaagctgctagcatatatggcgcctcctaccctttccaccgacctgttttgccaatcccccctgtggggttgtatgccacgcccgtgggttacggcatgtaccacctctcttag

SEQ ID NO: 128485 - DNA, 804 bp, Artificial Sequence
  derived and/or modified sequence
atggccagccccagcaaaggaaatgacctcttctccccagatgaggagggccctgctgtggtggccggccctggccctggccctgggggcgctgagggcgctgctgaggagcggcgggtgaaggtgagcagcctgcccttctctgtggaggccctgatgtctgacaagaagccacccaaggaggccagccccctgcctgctgagagcgccagcgctggggccaccctgcggcccctgctgctgagcggccacggggcccgggaggcccacagccctggccccctggtgaagccctttgaaacagcctctgtgaagtcagaaaattctgaagatggagctgcctggatgcaggagcccggccgctacagccccccacccaggcacatgagccccaccacctgcaccctgaggaagcacaagaccaacaggaagcccaggacccccttcaccaccagccagctgctggccctggagaggaagttccggcagaagcagtacctgagcattgctgagagagctgagttcagcagcagcctgaacctgacagagacccaggtgaagatctggttccagaacagaagagccaaggccaagaggctgcaggaggccgagctggagaagctgaagatggccgccaagcccatgctgcccagcagcttcagcctgcccttccccatcagcagccccctgcaggccgccagcatctacggggccagctaccccttccacaggcctgtgctgcccatcccccctgtgggcctgtatgccacccctgtgggctacggcatgtaccacctgtcctag

SEQ ID NO: 128486 - DNA, 2489 bp, Artificial Sequence
  derived and/or modified sequence
cttcccctcggaggaaaggctcagctcccagcgcgcccctcccgtctccgcagcaaaaaagtttgagtcgccgctgccgggttgccagcggagtcgcgcgtcgggagctacgtagggcagagaagtcatggcttctccgtccaaaggcaatgacttgttttcgcccgacgaggagggcccagcagtggtggccggaccaggcccggggcctgggggcgccgagggggccgcggaggagcgccgcgtcaaggtctccagcctgcccttcagcgtggaggcgctcatgtccgacaagaagccgcccaaggaggcgtccccgctgccggccgaaagcgcctcggccggggccaccctgcggccactgctgctgtcggggcacggcgctcgggaagcgcacagccccgggccgctggtgaagcccttcgagaccgcctcggtcaagtcggaaaattcagaagatggagcggcgtggatgcaggaacccggccgatattcgccgccgccaagacatatgagccctaccacctgcaccctgaggaaacacaagaccaatcggaagccgcgcacgccctttaccacatcccagctcctcgccctggagcgcaagttccgtcagaaacagtacctctccattgcagagcgtgcagagttctccagctctctgaacctcacagagacccaggtcaaaatctggttccagaaccgaagggccaaggcgaaaagactgcaggaggcagaactggaaaagctgaaaatggctgcaaaacctatgctgccctccagcttcagtctccctttccccatcagctcgcccctgcaggcagcgtccatatatggagcatcctacccgttccatagacctgtgcttcccatcccgcctgtgggactctatgccacgccagtgggatatggcatgtaccacctgtcctaaggaagaccagatcaatagactccatgatggatgcttgtttcaaagggtttcctctccctctccacgaaggcagtaccagccagtactcctgctctgctaaccctgcgtgcaccaccctaagcggctaggctgacagggccacacgacatagctgaaatttgttctgtaggcggaggcaccaagccctgttttcttggtgtaatcttccagatgcccccttttcctttcacaaagattggctctgatggtttttatgtataaatatatatatataataaaatataatacatttttatacagcagacgtaaaaattcaaattattttaaaaggcaaaatttatatacatatgtgctttttttctatatctcaccttcccaaaagacactgtgtaagtccatttgttgtattttcttaaagagggagacaaattatttgcaaaatgtgctaaagtcaatgatttttacgggattattgacttctgcttatggaaaacaaagaaacagacacaatgcacacagaaaatattagatatggagagattattcaaagtgaaggggacacatcatatttctgcattttacttgcattaaaagaaacctctttatatactacagttgttcctatctctcccccgccccccaccgccccaccacacacatatttttaaagtttttccttttttaagaatatttttgtaagaccaatacctgggatgagaagaatcctgagactgcctggaggtgaggtagaaaattagaaatacttcctaattcttctcaaggctgttggtaactttatttcagataattggagagtaaaatgttaaaacctgttgagaggaattgatggtttctgagaaatactaggtacattcatcctcacagattgcaaaggtgatttgggtgggggtttagtaattttctgcttaaaaaatgagtatcttgtaaccattacctatatgctaaatattcttgaacaattagtagatccagaaagaaaaaaaaatatgctttctctgtgtgtgtacctgttgtatgtcctaaacttattagaaaattttatatacttttttacatgttggggggcagaaggtaaagccatgttttgacttggtgaaaatgggattgtcaaacagcccattaagttccctggtatttcaccttcctgtccatctgtcccctccctccggtatacctttatccctttgaaagggtgcttgtacaatttgatatattttattgaagagttatctcttattctgaattaaattaagcatttgttttattgcagtaaagtttgtccaaactcacaattattttaagaggtgttctctgttcttagctgggcttagctcgaaagtgctacccacatgagggggaagctggtcttttttaatattttaatgtaagtcaaccaagagttgtggccagattcagccatgttggggtgattggtggtggtggggagtgaactgaaactactgaaatactttgaaatgtttcctctggcagcttgttacttatggaaaagaggtggaattgctgcgaggagtttttc

SEQ ID NO: 128487 - DNA, 804 bp, Artificial Sequence
  derived and/or modified sequence
atggccagccccagcaagggcaacgacctgttcagccccgacgaggagggaccagcagttgtggcgggacccggccctggaccagggggtgctgagggtgccgctgaagaaagacgggtcaaggtgtcgagccttccatttagcgtcgaagcccttatgagtgacaagaagccccctaaagaggcgtcgccactgccggccgagtcagcgtccgcgggcgctactctgaggccattgctgctgtctgggcacggggctcgggaagcccactcacccgggccactcgtgaagccgttcgagacagcctccgtgaaaagcgaaaatagcgaagacggagctgcttggatgcaggagccaggaagatactccccaccccctaggcatatgagtcccaccacttgcactctgcggaaacataagaccaatcgcaagccacgaactccgtttacaacatcacagttgttagctctcgaaaggaagttccgccaaaagcagtacctgagcatagccgagagagctgagttcagttcttccctaaaccttaccgagacacaggtgaagatatggttccagaatcgccgtgccaaagcaaagaggctgcaggaagcagaattggagaaacttaagatggctgcaaaacctatgctgcccagcagctttagcctgccctttcccatctcttcgccactccaggcggcctcaatctatggtgcatcatatccctttcaccgccccgtgctcccaatccccccagtggggctgtatgctactccggtagggtacggcatgtatcacctgagctag

SEQ ID NO: 128488 - DNA, 804 bp, Artificial Sequence
  derived and/or modified sequence
atggccagtcctagcaaaggtaacgacctgttttccccggacgaggaaggaccagcagttgtcgctggacctggaccgggtcccggaggtgctgaaggggctgccgaggaaagaagagttaaggtatcgagcctgcctttttcagtggaagccctgatgtccgacaaaaagccacctaaagaagcctcgcctctgcccgcagaaagcgcctcagccggagctacactgagacctctgttactcagcggccacggcgcaagggaagcacacagtcccggacctctggtgaagcccttcgagactgcaagcgtgaaaagtgaaaatagtgaagatggtgctgcgtggatgcaggaacctggcagatattcccctcctccgaggcacatgtctcctaccacctgtacgctccgcaagcacaagacgaatcgaaaacctcgcaccccattcacaacgtctcagctcctggcactggaaagaaaattccggcagaaacagtatctgagcattgctgagcgggctgaattttccagctcattgaatctcaccgagactcaggtgaagatatggttccagaaccggagggcaaaggcaaagcggcttcaggaggctgagctcgagaaactcaaaatggccgcaaagcccatgctgccaagctcttttagcctcccctttcctatctcatcccctctgcaggccgcaagtatttatggagccagttaccctttccatcggccagtgctgcccatccctccagtggggctgtatgctacaccagtaggctacggtatgtaccatttgtcatag

SEQ ID NO: 128489 - DNA, 804 bp, Artificial Sequence
  derived and/or modified sequence
atggccagccccagcaagggcaacgacctgttcagccccgacgaggagggccccgccgtggtggccggccccggccccggccccggcggcgccgagggcgccgccgaggagagaagagtgaaggtgagcagcctgcccttcagcgtggaggccctgatgagcgacaagaagccccccaaggaggccagccccctgcccgccgagagcgccagcgccggcgccaccctgagacccctgctgctgagcggccacggcgccagagaggcccacagccccggccccctggtgaagcccttcgagaccgccagcgtgaagagcgagaacagcgaggacggcgccgcctggatgcaggagcccggcagatacagccccccccccagacacatgagccccaccacctgcaccctgagaaagcacaagaccaacagaaagcccagaacccccttcaccaccagccagctgctggccctggagagaaagttcagacagaagcagtacctgagcatcgccgagagagccgagttcagcagcagcctgaacctgaccgagacccaggtgaagatctggttccagaacagaagagccaaggccaagagactgcaggaggccgagctggagaagctgaagatggccgccaagcccatgctgcccagcagcttcagcctgcccttccccatcagcagccccctgcaggccgccagcatctacggcgccagctaccccttccacagacccgtgctgcccatcccccccgtgggcctgtacgccacccccgtgggctacggcatgtaccacctgagctag

SEQ ID NO: 128490 - protein, 283 aa, Artificial Sequence
  derived and/or modified sequence
MASGTTTTAVKIGIIGGTGLDDPEILEGRTEKYVDTPFGKPSDALILGKIKNVDCVLLARHGRQHTIMPSKVNYQANIWALKEEGCTHVIVTTACGSLREEIQPGDIVIIDQFIDRTTMRPQSFYDGSHSCARGVCHIPMAEPFCPKTREVLIETAKKLGLRCHSKGTMVTIEGPRFSSRAESFMFRTWGADVINMTTVPEVVLAKEAGICYASIAMATDYDCWKEHEEAVSVDRVLKTLKENANKAKSLLLTTIPQIGSTEWSETLHNLKNMAQFSVLLPRH

SEQ ID NO: 128491 - DNA, 852 bp, Artificial Sequence
  derived and/or modified sequence
atggctagcgggaccacgaccaccgcagtgaagattggtattattggcggcaccggactggacgacccagaaatcctggaaggcaggactgagaagtatgtggataccccctttggaaagccatcagacgctctcatcctagggaaaattaaaaatgtggactgtgtcctccttgcgaggcacggaaggcagcatacaatcatgccaagtaaagtgaattatcaagccaacatatgggcccttaaggaggaaggatgtacccatgtcattgtgaccaccgcatgtggctcactcagggaagaaattcagcctggcgacatagtcattatcgaccagttcattgaccggactaccatgcggccccagtcattctacgacgggtcccactcctgcgctagaggcgtctgtcacatcccgatggctgagccattctgtcccaaaaccagggaagttttaatagagacagcaaaaaagctcgggctccggtgccatagcaagggtactatggtgacaattgaaggcccccgcttctcatccagggccgaatcttttatgttccgaacatggggtgcagatgtaatcaacatgacaacagtgcctgaggtggtgctagcaaaggaggctggaatctgttacgcttctatagcaatggccacggattacgactgttggaaagagcacgaggaggccgtaagcgtggatagagttctgaagaccctgaaggaaaatgctaacaaagccaagtctctcctgcttaccactattccacagatagggagcactgagtggagtgagaccctgcacaacttgaaaaatatggcccagtttagtgtgttgctgcctcgccactag

SEQ ID NO: 128492 - DNA, 852 bp, Artificial Sequence
  derived and/or modified sequence
atggccagcggcaccaccaccacagctgtgaagattggcatcattggaggcaccggcctggatgatcctgagatcctggagggccgcacagagaagtatgtggacaccccatttgggaagcccagtgatgccctgatcctgggcaagatcaagaatgtggactgtgtgctgctggcccggcacggccggcagcacaccatcatgcccagcaaggtgaactaccaggccaacatctgggccctgaaggaggagggctgcacccacgtgattgtgaccacagcctgtggcagcctgcgggaggagatccagcccggggacatcgtcatcatcgaccagttcatcgacaggaccaccatgaggccccagagcttctatgatggcagccacagctgtgcccggggcgtgtgccacatccccatggccgagcccttctgccccaagacccgggaggtgctgattgaaacagccaagaagctgggcctgcgctgccacagcaagggcaccatggtgaccatcgagggcccccgcttcagcagcagagctgagagcttcatgttccgcacctggggcgcagatgtgatcaacatgaccaccgtgcctgaggtggtgctggccaaggaggccggcatctgctacgccagcatcgccatggccacagattatgactgctggaaggagcacgaggaggccgtgtctgtggacagagtgctgaagaccctgaaggaaaatgccaacaaggccaagagcctgctgctgaccaccatcccccagatcggcagcacagagtggagcgagaccctgcacaacctgaagaacatggcccagttctctgtgctgctgcccaggcactag

SEQ ID NO: 128493 - DNA, 6029 bp, Artificial Sequence
  derived and/or modified sequence
ctccgcactgctcactcccgcgcagtgaggttggcacagccaccgctctgtggctcgcttggttcccttagtcccgagcgctcgcccactgcagattcctttcccgtgcagacatggcctctggcaccaccaccaccgccgtgaagattggaataattggtggaacaggcctggatgatccagaaattttagaaggaagaactgaaaaatatgtggatactccatttggcaagccatctgatgccttaattttggggaagataaaaaatgttgattgcgtcctccttgcaaggcatggaaggcagcacaccatcatgccttcaaaggtcaactaccaggcgaacatctgggctttgaaggaagagggctgtacacatgtcatagtgaccacagcttgtggctccttgagggaggagattcagcccggcgatattgtcattattgatcagttcattgacaggaccactatgagacctcagtccttctatgatggaagtcattcttgtgccagaggagtgtgccatattccaatggctgagccgttttgccccaaaacgagagaggttcttatagagactgctaagaagctaggactccggtgccactcaaaggggacaatggtcacaatcgagggacctcgttttagctcccgggcagaaagcttcatgttccgcacctggggggcggatgttatcaacatgaccacagttccagaggtggttcttgctaaggaggctggaatttgttacgcaagtatcgccatggcgacagattatgactgctggaaggagcacgaggaagcagtttcggtggaccgggtcttaaagaccctgaaagaaaacgctaataaagccaaaagcttactgctcactaccatacctcagatagggtccacagaatggtcagaaaccctccataacctgaagaatatggcccagttttctgttttattaccaagacattaaagtagcatggctgcccaggagaaaagaagacattctaattccagtcattttgggaattcctgcttaacttgaaaaaaatatgggaaagacatgcagctttcatgcccttgcctatcaaagagtatgttgtaagaaagacaagacattgtgtgtattagagactcctgaatgatttagacaacttcaaaatacagaagaaaagcaaatgactagtaaacatgtgggaaaaaatattacattttaagggggaaaaaaaaacccaccattctcttctccccctattaaatttgcaacaataaagggtggagggtaatctctactttcctatactgccaaagaatgtgaggaagaaatgggactctttggttatttattgatgcgactgtaaattggtacagtatttctggagggcaatttggtaaaatgcatcaaaagacttaaaaatacggacgtactttgtgctgggaactctacatctagcaatttctctttaaaaccatatcagagatgcatacaaagaattatatataaagaagggtgtttaataatgatagttataataataaataattgaaacaatctgaatcccttgcaattggaggtaaattatgtcttagttataattagattgtgaatcagccaactgaaaatcctttttgcatatttcaatgtcctaaaaagacacggttgctctatatatgaagtgaaaaaaggatatggtagcattttatagtactagttttgctttaaaatgctatgtaaatatacaaaaaaactagaaagaaatatatataaccttgttattgtatttgggggagggatactgggataatttttattttctttgaatctttctgtgtcttcacatttttctacagtgaatttaatcaaatagtaaagttgttgtaaaaataaaagtggatttagaaagatccagttcttgaaaacactgtttctggtaatgaagcagaatttaagttggtaatattaaggtgaatgtcatttaagggagttacatctttattctgctaaagaagaggatcattgatttctgtacagtcagaacagtacttgggtttgcaacagctttctgagaaaagctaggtgtttaatagtttaactgaaagtttaactatttaaaagactaaatgcacattttatggtatctgatattttaaaaagtaatgtttgattctcctttttatgagttaaattattttatacgagttggtaatttttgctttttaataaagtggaagcttgcttttttaactctttttttattgttattttatagaaatgctttttgttggccgggcacagttgctcatccatgtaatcccagcactgtgggaggccgagacgggtggatcacaaggtcaggagatcgagaccatcctggctaatgcgttgaaactccgtctctactaaaaatacaaaaaattagctgggcgtggtggtgggcacctgtagtcccagctactcaggaggctgaggcaggagaatggtgtgaacctgggaggtggagcttgcagtgagcagagcttgcagtgagacgagcttgtgccactgcactccagcctgggcaacagagtaagactcagtctcaaaaaaaaaaaaaagagtgaaatgctttttgtttgcttcagttttttatcatggggagatctttttcctcagaattgttttcttttcactgtaggctattacaggatacttcaggatcaagatacagaaccttttatttaaagagtttgtaaagtcaatgtgtttgtttgtgtctctgagattgacttcaagataataagctgctaattgtaaacaaaacagttaccctccagtattaatatgactcattagtgtgagccatttgggtcaagtatgattatgacccttggacttcctgatgtagtattaaatttcaactctggttatccattagcaatctgtagagaacttaatgaacctgaacccaggcttctctagctctggtaacgtgtgattgttttcactacaatatgatacatagatggtaccttacttttcctcattcttaataggtgtctaagaatgtcagggcaaaagtatgggcatttttcttgctatgttcagaaagtacagttctctccaacttgcagaggtacttttcttgattaaatagccttctctagcaacatcattttcagactaactaaatgaatgcagtatactcttttctttgttctcaatcattcactccttatgcaaagccaatataattttcctcataccttatgcttgaggatattgttgaagaacacttcctggaacacttctcacttgtgatgctgtactaattttttttttttaatttaagctagtatactaagtgaacaccatggtcagttgtgagcattttggtttccgcaaaggatggatggtgagcatcatgggaaagctgtagtttagtgacttagcccttagtgattaatagatttgcatgtacatagaagtctttgttggccttataatctgctgttatatttggcatggattttcatggttttgagaatgacatcctggccctgtggtccccgagggtcatggtccttgtgacctggcccctgttcactgcccccttcgctagcacgagttgctgtgcagggctggaggtagctaccatggcttgtttcaaggaaggaaactctggtacggtggcaccctcaggagtggaggacagtgaacttccttgaagagggagtgactaaggtgacctccaacctgccctgagccagctgccctgcaggtgccacgtgagcctgctctggcatccacaggatgctcctggagcctcttctctggctgctacctcagggcatggttgtggccccaccaacacctattttccaaataattattcattcttgtgacagtggcctgaacatgtttttaattttctcaacaagcatttagccagcacttatccagtgaaacaatttgataaggtttcaaggagtatctgatgggttaggaagtcacgaaatgaggagttcttgccacatttgcagagtccctccttgataaggtttggcggtgtccccacccaaatctcatgttgaattgtagttcccataatccccacatgttgtgggagggacccagtgggaggtaattaaatcatgggggtggttacccccacactgctgttctcatgatactgagttctcacaagtcctgtttgttttataaggggcttttcccccttttgctcaacacttcttcctgccatcatgtgaagaaggacgtgtttgtttccccttctgccacgattgtaagtttcctgaggccttcccagctatgtggaactgtgagttaattaaacctctttcctttataaattacccagtcatgggcagtcctttacagcagcatgagaatggactaatacactcctcaaatgttttgaagattgttgcaccttggaactaccagtgtgcacacaatctggctcaatgtatatattggcccagcaaggcaaagaactgaagttccaggatggaagaacctgtgttctcctcataatagtatagaataattcaagataggcaagaaggacagcagtaaatgaagaccatggaagaaaagaaggaatgccaaagatcgaggaaatctaccaagactagtagggtagtccagaagaagctgtttcagggcctgttgccagctatgcctttgagaacctcgggatcccaaagaatgaggggaatttcttcagaaagacaatctcggcatgcattatttctttgttttgaagattcactcatgttgcatgcatctgtagcttgtgccttttttattgcctagtagtattctgtcatatgcctatcttacaatttgattatctattcacctgttgatgaatgtttgaattttttccatttgaggaattttatgaataaagctgctataagcatgaaattacaagtctttttgtgaacatattttcacttgtgcaaatgcctatactcccaccagtaatttgtaagaattcttgacaaagcttggtattgtcagcgtttttaattttagccattctattgggtatattttgatatctcgtggttttgatttgcatttttctgattaaagatgttgaacttcttttcatgtgcttattggccattcacatatttcgtgaactatctgtacaaatatttttgtttattaaaaaattagattgttttgttttattattgaatagtaagaattgtttatatattctggatacactctttttcagatatgtgtgttgtgactattcttagtctttagcttgccttttcattttcttaattatgtctttcaaagaacaagtttttcattttgacgaagcctagtttatcaattttttttatggttggtgctttttgtgtgttccaagaaatctttgcctactcatttaattacctgtgtgcccttgtcaaaatcatttaattttgactactcacttaattaccttgcctactcatttaattacctgtgtgcccttgtcaaaatttactgtttatctgtgaatctggatgatctatttatgtcatttatctatgtgtctcttcttatgccagtaccccactgtcttgattattgtggctttatggtgtcttgaaattaagtattgttaagctttgcaatcttttccaagattgttttggctataggtcctttctttataaagtttatattaagcttctccatttttctttaagaaaaaatctgctggaatggcactgaatttttaggtcgatttgggaagaattgacaatattgaacctttcaatcgatggacatggtatgtttctgcatttatttgggccttttaaaatttatctcagcaatattttgtagttttagtgaagaagtcttgtatatatcttttgttaaatgtattcctaaatattttgtggaaatgttactgtaaatagtactttaatttcatttttaagtttattgctggtatacagaaatatgttttatttttgtatattgactttatattctgtaatcttattaaattcacttagttca

SEQ ID NO: 128494 - DNA, 852 bp, Artificial Sequence
  derived and/or modified sequence
atggccagcggcaccaccaccaccgccgtgaagatcggcatcatcggcggcacaggcctagatgatcctgagattttggaggggagaaccgagaaatatgtggatactccatttggaaagccttccgacgctctgatcctcggtaagattaaaaatgtggattgcgtgctacttgctcggcacggaaggcagcatacgatcatgcccagtaaggtgaattaccaagcaaatatctgggcattaaaggaggagggctgcactcatgtgattgtcaccactgcgtgtggcagcctgcgtgaggagatccaacctggtgacattgtcattatcgaccagtttatcgataggaccaccatgaggccccagagtttctatgacgggtcccactcgtgcgcacgcggcgtgtgtcatattccgatggccgaacccttttgcccgaaaacacgagaggtactgattgagacagcgaagaaactgggtctgcggtgccatagcaagggaactatggtgactatcgagggcccacggttcagttcaagggcggaaagctttatgttccgaacctggggcgctgatgtcattaatatgactaccgtgccagaggtcgtactagcaaaagaggcagggatttgttacgcatctatcgcaatggcgacggattacgattgctggaaagagcatgaagaggcagtgagcgttgaccgcgtactaaagaccctgaaggaaaacgcgaataaggccaagagtcttctgctgaccacaattccacagatagggagtacggagtggagtgagactctccacaacctcaaaaacatggctcaatttagcgtgctgttgccccgtcactag

SEQ ID NO: 128495 - DNA, 852 bp, Artificial Sequence
  derived and/or modified sequence
atggcttctgggacaacaacaacagcagtaaaaattggcatcattggagggactggcctagatgatcctgaaatcctcgaaggacgcacagaaaagtacgtagacactcctttcggcaagccctctgacgccttaatccttggcaaaataaaaaatgttgactgtgtcttgttggctagacatggaagacagcacacaataatgccctccaaggttaactaccaagcaaatatttgggctttgaaggaagaggggtgtacacatgtgattgtcaccaccgcttgtggcagcctgagagaggagattcagccaggggatattgtcataatagaccagtttattgacaggaccacaatgcgaccccagtccttttatgatggcagccacagctgtgccaggggagtctgccatattcccatggccgagccgttttgccccaagacgagggaggtgttaatcgaaaccgccaaaaagttggggctgcggtgccactccaagggcactatggtgactatagagggaccccgtttttctagcagggccgaatctttcatgttcagaacctggggtgccgatgtgattaacatgactactgtgcccgaagtggtgttagcgaaggaagcaggaatttgctacgcatctattgcaatggccacagactacgattgctggaaggagcacgaggaggctgtgagtgttgatcgggtgctgaaaacgctgaaagaaaatgcaaacaaagcaaagtccttgctactgaccaccattcctcagattggttctaccgaatggtctgaaaccctccacaacctcaagaatatggcgcagttttcagtgctgctacccaggcactag

SEQ ID NO: 128496 - DNA, 852 bp, Artificial Sequence
  derived and/or modified sequence
atggccagcggcaccaccaccaccgccgtgaagatcggcatcatcggcggcaccggcctggacgaccccgagatcctggagggcagaaccgagaagtacgtggacacccccttcggcaagcccagcgacgccctgatcctgggcaagatcaagaacgtggactgcgtgctgctggccagacacggcagacagcacaccatcatgcccagcaaggtgaactaccaggccaacatctgggccctgaaggaggagggctgcacccacgtgatcgtgaccaccgcctgcggcagcctgagagaggagatccagcccggcgacatcgtgatcatcgaccagttcatcgacagaaccaccatgagaccccagagcttctacgacggcagccacagctgcgccagaggcgtgtgccacatccccatggccgagcccttctgccccaagaccagagaggtgctgatcgagaccgccaagaagctgggcctgagatgccacagcaagggcaccatggtgaccatcgagggccccagattcagcagcagagccgagagcttcatgttcagaacctggggcgccgacgtgatcaacatgaccaccgtgcccgaggtggtgctggccaaggaggccggcatctgctacgccagcatcgccatggccaccgactacgactgctggaaggagcacgaggaggccgtgagcgtggacagagtgctgaagaccctgaaggagaacgccaacaaggccaagagcctgctgctgaccaccatcccccagatcggcagcaccgagtggagcgagaccctgcacaacctgaagaacatggcccagttcagcgtgctgctgcccagacactag

SEQ ID NO: 128497 - DNA, 2097 bp, Artificial Sequence
  derived and/or modified sequence
atgcggagatttctgcttctgtacgccacccagcaagggcaggctaaggctatcgctgaagagatctgtgagcaggccgttgtgcatgggttctccgcggatctgcattgcatctcagagagtgataaatatgacctcaaaaccgaaaccgcgccactggttgtggtcgttagcaccaccggtaccggcgacccccctgacaccgctagaaagtttgttaaggaaattcagaatcagacactgccggttgactttttcgcacacctgcgctatgggttgctgggcttaggcgatagcgagtacacttacttctgtaatggaggtaaaattattgacaaaaggctgcaggaactgggtgcccggcacttttatgataccggacacgccgacgactgtgtgggcctggaacttgtggtggagccctggatcgcgggactgtggcccgcgcttaggaagcacttccgctcttcccggggacaggaggagattagtggtgcccttcctgttgcttccccagcgtcctcccgtaccgaccttgtaaagagtgaactgctacacatcgagtcacaggtagagcttctgcgattcgacgatagcggtaggaaggactctgaggtactgaagcagaatgccgtaaactctaaccagtccaacgtggtgatcgaagattttgagagttctctcacgaggagtgtccctcccctgtctcaggcctcacttaacatcccaggcctcccgcctgagtatttacaagtgcacctgcaggagagtcttggccaagaggagagccaggtctccgtcacctctgcagatccggttttccaggtgcccattagcaaagccgtgcagctgacaacgaacgatgccataaagacaactctgcttgtggaattggatatctcaaacaccgacttcagttaccagccaggcgatgcgttctcggtcatatgtccaaatagcgattcagaagtgcagagtcttctgcaaaggctgcagctcgaggacaagcgggagcattgtgtgttacttaagattaaggctgatacgaagaaaaaaggtgctactttaccccagcatattcctgctggctgctcacttcaattcatcttcacctggtgtttagaaatcagggctatccccaaaaaagcatttctgcgggctctggtcgactacaccagcgatagcgccgagaaacggagactgcaagagctttgcagtaaacagggcgcagcagattactctagattcgttcgggacgcgtgtgcctgtctcctggacttattgttggcttttccctcttgccagccaccgcttagtctgcttctggaacacttgcccaagctccagccacgcccctattcctgtgcgagctcctcactgtttcaccccggaaagctacacttcgtgttcaatattgtggagtttctcagtacagcgaccacggaagtcttgcggaaaggagtgtgtactggatggcttgctcttcttgtggctagcgtgttgcagcctaatattcatgcctcccatgaagactcaggaaaagcgctcgcccctaagatctccattagcccaaggacgacaaatagcttccacctgccggacgaccccagtatccccatcatcatggtgggacctgggactggcatcgctcctttcattgggtttttgcagcatagagagaaactgcaggaacagcatccagacggaaatttcggcgccatgtggcttttctttgggtgcagacataaagaccgggattatctgttcagaaaggagctgcggcactttcttaagcacgggatcctcacacaccttaaggtgtccttctcgcgcgatgcccccgttggcgaggaagaagccccagctaaatatgtccaggacaacatccaactccacggtcagcaggtggcgaggatactcctgcaggagaacggacacatatacgtatgcggagatgcgaaaaacatggctaaagacgtgcatgatgcactcgtgcaaatcatttcaaaggaagtaggagttgaaaaattagaagctatgaagacactcgcgaccctgaaagaggagaagcggtacttgcaggatatatggagctag

SEQ ID NO: 128498 - DNA, 2097 bp, Artificial Sequence
  derived and/or modified sequence
atgaggcgcttcctgctgctgtatgccacccagcagggccaggccaaggccatcgccgaggagatctgtgagcaggccgtggtgcacggcttctctgctgacctgcactgcatcagcgagagtgacaagtatgacctgaagacagaaacagcccccctggtggtggtggtgtccaccaccggcaccggggaccccccagacacagccaggaagtttgtgaaggagatccagaaccagaccctgcctgtggacttctttgcccacctgcgctatggcctgctgggcctgggggacagcgagtacacctacttctgcaatggaggcaagatcatcgacaagaggctgcaggagctgggcgcccggcacttctatgacaccggccatgctgatgactgtgtgggcctggagctggtggtggagccctggattgctggcctgtggccagccctgaggaagcacttccgcagcagccggggccaggaggagatcagcggggccctgcctgtggccagccctgccagcagcaggacagacctggtgaagtctgagctgctgcacatcgagagccaggtggagctgctgcgctttgatgattctggcaggaaggacagcgaggtgctgaagcagaatgctgtgaacagcaaccagagcaatgtggtgattgaggactttgagagcagcctgaccaggtctgtgccccccctgagccaggccagcctgaacatccctggcctgcccccagagtacctgcaggtgcacctgcaggagagcctgggccaggaggagagccaggtgtctgtgaccagcgctgaccccgtcttccaggtgcccatcagcaaggctgtgcagctgaccaccaatgatgccatcaagaccaccctgctggtggagctggacatcagcaacacagacttctcctaccagcctggagatgccttcagcgtcatctgccccaacagcgacagcgaggtgcagagcctgctgcagaggctgcagctggaggacaagcgggagcactgtgtgctgctgaagatcaaggctgacaccaagaagaagggggccaccctgccccagcacatcccagctggctgcagcctgcagttcatcttcacctggtgcctggagatccgggccatccccaagaaggccttcctgcgggccctggtggactacaccagtgacagcgctgagaagaggcggctgcaggagctgtgcagcaagcagggcgctgctgactacagcagatttgtgagagatgcctgtgcctgcctgctggacctgctgctggccttccccagctgccagccccccctgagcctgctgctggagcacctgcccaagctgcagccccggccctacagctgtgccagcagcagcctcttccaccctgggaagctgcactttgtgttcaacatcgtggagttcctgagcacagccaccacagaggtgctgaggaagggcgtgtgcaccggctggctggccctgctggtggcctctgtgctgcagcccaacatccacgccagccatgaggacagcggcaaggccctggcccccaagatcagcatcagccccaggaccaccaacagcttccacctgcctgatgaccccagcatccccatcatcatggtgggccctggcactggaattgcccccttcatcggcttcctgcagcaccgggagaagctgcaggagcagcacccagatggcaactttggagccatgtggctgttcttcggctgccgccacaaggaccgggactacctgttcaggaaggagctgcggcacttcctgaagcacggcatcctgacccacctgaaggtgtccttcagcagagatgcccctgtgggggaggaggaggccccagccaagtatgtgcaggacaacatccagctgcacggccagcaggtggcccgcatcctgctgcaggagaatggccacatctacgtgtgtggagatgccaagaacatggccaaggatgtgcatgatgccctggtgcagatcatcagcaaggaggtgggcgtggagaagctggaggccatgaagaccctggccaccctgaaggaggagaagcgctacctgcaggacatctggagctag

SEQ ID NO: 128499 - DNA, 2097 bp, Artificial Sequence
  derived and/or modified sequence
atgcggcggttcctgctgctgtacgccacccagcagggccaggccaaagccatcgccgaagagatttgcgaacaggccgtggtgcatggattcagcgctgatctgcactgcatctcagagtccgataagtacgatctgaagacagaaaccgctcccttagtggtcgtagtctctaccaccggtaccggagaccccccagacacggcgcggaagttcgtaaaggaaattcagaatcaaaccctacccgttgacttcttcgcgcacttgagatacggcctgctggggctcggcgactcagaatacacctatttctgtaatggtggcaagattatagataaacgcctgcaagaattgggcgcaagacatttctatgatacaggccacgccgatgattgcgtcgggctcgagctagtggtcgagccatggattgcaggactatggccagcattgaggaaacattttcggtctagtcgcgggcaggaggagatcagtggcgccctccctgtggcctccccagcctcctcccgtactgacctggtcaaatccgagctgttacacatcgaatcccaggttgaactcttacgctttgacgatagcggtcgcaaagatagtgaagtcctcaaacagaatgcggtgaacagcaaccagtccaacgtggtgattgaggatttcgaatcctccctgaccaggtcagtgccgccactgtcccaggcatccctgaatattcccggacttcctccggaatatctgcaggtgcacctccaggagtccctcggacaggaagaatcccaggtgtccgtgacttctgcagatccggtgtttcaggtccccatctcgaaagctgtgcagttgactacaaacgacgctataaaaactactttactggttgagctcgacatatccaacaccgatttcagttaccaaccaggtgacgcattctctgtcatctgcccgaactcagattctgaggtgcagagcctgctgcagcgactccagctagaggacaagcgtgagcattgtgtgttgctcaagatcaaggccgatacgaagaagaaaggcgctactctgccacagcacatccctgccgggtgtagcctccagttcatctttacgtggtgcctggaaattcgagctattccgaagaaggcattcctgcgggcactcgtagactacacatcagattcggcagaaaagaggcggctacaggaactttgctcaaagcaaggagccgcagattacagccggttcgttagagacgcctgtgcctgtctgctggacctgctccttgcgtttccatcctgccagccccctttgtcgctgttattagaacacttgcctaaactgcaaccccgcccctactcctgcgcatcctccagcctctttcatcccggcaaactgcactttgtgttcaacattgtcgaattcctgagtacagcaacaactgaagtgctgcgaaaaggggtgtgcacaggatggctggctctgcttgttgccagcgtgctgcagcctaacatccacgcttcgcacgaggactctggaaaagctctggcccccaagatctcaatttccccccgcaccacgaattccttccacctccctgatgaccccagcatccctataatcatggtgggccctggaacggggattgctcccttcattgggtttctgcagcaccgtgagaaacttcaggagcaacacccggacggaaacttcggggctatgtggctgttcttcggttgccgtcacaaggatagagattacctgttccggaaagagctgaggcactttctgaagcacggcatcttaacacacctgaaagtgagtttttctagagatgctccagtgggagaagaggaagcccccgcaaagtacgtgcaggataacattcagttgcatggacagcaggtggcccgcatactgctccaagagaacggccacatttacgtgtgtggagatgccaagaatatggccaaagatgttcacgacgcccttgtgcagataatttcaaaagaagtcggagtggaaaagctagaagcgatgaaaaccctggccaccctcaaggaagagaaaaggtatctgcaggacatatggtcttag

SEQ ID NO: 128500 - DNA, 2097 bp, Artificial Sequence
  derived and/or modified sequence
atgcgacgattcctgctgctgtacgcgacccagcagggacaggccaaagctatcgccgaggaaatatgtgagcaagctgtcgtccatgggttttcagcggacctgcactgcatctcagaatctgacaagtacgacctgaagaccgagaccgctcccctcgtggtggttgtatccactactgggacgggcgaccccccagacaccgctcgaaagtttgtgaaggagatccagaatcagacgctacccgtggatttctttgctcacctgcgatacggcctcctgggcttgggcgacagtgaatatacttatttctgtaacggagggaagatcatcgacaaacgtttgcaggagctgggggcaagacacttctacgacactggacatgccgacgactgcgtgggtctcgaactggtggtggagccatggattgccggattatggcccgcactcaggaaacacttccgttcgtcgcgtgggcaggaagagattagcggggctttacccgtcgcttccccggctagttcccgtacagatttagtgaagtcagagctcttgcatatcgaaagtcaagttgagctactgagatttgacgatagtggtcgaaaggactccgaagttctaaaacagaacgcagtgaactccaaccaaagtaatgtcgtgatcgaagacttcgagtcctcgcttactcgtagcgtgccacctctatcccaggcctccctgaatataccagggctgccacccgaatacctgcaggtccacttacaggaatctctgggacaagaagaatcccaagtatcggtgaccagcgcagaccctgtgtttcaggtgcccatttctaaggcagttcagctgacaaccaatgatgcgataaagaccacccttctcgtggaactcgacatctcgaatactgacttctcctatcagccaggtgacgctttctccgtgatctgccccaacagcgattcagaggtgcagagcctcctccagcgactgcagcttgaagataagcgcgagcactgcgtcctgctcaagattaaagccgataccaagaaaaaaggcgctacactgcctcagcatatccccgctggctgcagcctgcagtttatcttcacatggtgcttggaaatcagagccatccctaaaaaggcgtttctccgcgctttggtagattacacaagcgattctgcagagaaaaggaggctgcaggagctttgtagtaagcagggagctgccgactatagccgttttgtgcgggatgcttgcgcctgcctgctcgatctgctgcttgccttccccagttgtcagccaccgctgtctctgctcctcgagcatttgcctaagctccagcctcggccttacagctgcgcttcatccagtcttttccaccctgggaaactgcacttcgtcttcaacatcgtcgaatttctgtcaacagccaccactgaagtgctgcgtaagggagtgtgtaccgggtggctggcgttgctggttgcctcagtgctgcaacccaatatccatgcttcccatgaggacagcgggaaagctctcgctcctaagataagcattagccctagaaccacaaacagcttccacctacccgatgacccctccatcccaatcattatggttgggcctggaacagggattgctccctttattggctttctacagcacagagagaagcttcaggagcagcatcccgatggcaactttggtgccatgtggctgttcttcggctgtcgacataaagacagagattacctgtttaggaaggaactgaggcactttttgaaacacggaatactgactcaccttaaagttagcttttccagagatgctcctgtgggtgaggaagaggcgcctgcaaaatacgtgcaagataacatacagcttcacgggcagcaggtggccaggatcctgcttcaggaaaatggacatatctacgtgtgcggagatgcaaaaaatatggccaaagacgtgcatgacgccctggtccagattattagcaaagaagtcggcgtagagaaattagaagccatgaaaacccttgccacactgaaagaggaaaagcgctacttgcaggatatctggagctag

SEQ ID NO: 128501 - DNA, 2097 bp, Artificial Sequence
  derived and/or modified sequence
atgagaagattcctgctgctgtacgccacccagcagggccaggccaaggccatcgccgaggagatctgcgagcaggccgtggtgcacggcttcagcgccgacctgcactgcatcagcgagagcgacaagtacgacctgaagaccgagaccgcccccctggtggtggtggtgagcaccaccggcaccggcgacccccccgacaccgccagaaagttcgtgaaggagatccagaaccagaccctgcccgtggacttcttcgcccacctgagatacggcctgctgggcctgggcgacagcgagtacacctacttctgcaacggcggcaagatcatcgacaagagactgcaggagctgggcgccagacacttctacgacaccggccacgccgacgactgcgtgggcctggagctggtggtggagccctggatcgccggcctgtggcccgccctgagaaagcacttcagaagcagcagaggccaggaggagatcagcggcgccctgcccgtggccagccccgccagcagcagaaccgacctggtgaagagcgagctgctgcacatcgagagccaggtggagctgctgagattcgacgacagcggcagaaaggacagcgaggtgctgaagcagaacgccgtgaacagcaaccagagcaacgtggtgatcgaggacttcgagagcagcctgaccagaagcgtgccccccctgagccaggccagcctgaacatccccggcctgccccccgagtacctgcaggtgcacctgcaggagagcctgggccaggaggagagccaggtgagcgtgaccagcgccgaccccgtgttccaggtgcccatcagcaaggccgtgcagctgaccaccaacgacgccatcaagaccaccctgctggtggagctggacatcagcaacaccgacttcagctaccagcccggcgacgccttcagcgtgatctgccccaacagcgacagcgaggtgcagagcctgctgcagagactgcagctggaggacaagagagagcactgcgtgctgctgaagatcaaggccgacaccaagaagaagggcgccaccctgccccagcacatccccgccggctgcagcctgcagttcatcttcacctggtgcctggagatcagagccatccccaagaaggccttcctgagagccctggtggactacaccagcgacagcgccgagaagagaagactgcaggagctgtgcagcaagcagggcgccgccgactacagcagattcgtgagagacgcctgcgcctgcctgctggacctgctgctggccttccccagctgccagccccccctgagcctgctgctggagcacctgcccaagctgcagcccagaccctacagctgcgccagcagcagcctgttccaccccggcaagctgcacttcgtgttcaacatcgtggagttcctgagcaccgccaccaccgaggtgctgagaaagggcgtgtgcaccggctggctggccctgctggtggccagcgtgctgcagcccaacatccacgccagccacgaggacagcggcaaggccctggcccccaagatcagcatcagccccagaaccaccaacagcttccacctgcccgacgaccccagcatccccatcatcatggtgggccccggcaccggcatcgcccccttcatcggcttcctgcagcacagagagaagctgcaggagcagcaccccgacggcaacttcggcgccatgtggctgttcttcggctgcagacacaaggacagagactacctgttcagaaaggagctgagacacttcctgaagcacggcatcctgacccacctgaaggtgagcttcagcagagacgcccccgtgggcgaggaggaggcccccgccaagtacgtgcaggacaacatccagctgcacggccagcaggtggccagaatcctgctgcaggagaacggccacatctacgtgtgcggcgacgccaagaacatggccaaggacgtgcacgacgccctggtgcagatcatcagcaaggaggtgggcgtggagaagctggaggccatgaagaccctggccaccctgaaggaggagaagagatacctgcaggacatctggagctag

SEQ ID NO: 128502 - protein, 466 aa, Artificial Sequence
  derived and/or modified sequence
MLLGGPPRSPRSGTSPKGPWSSTGHVQFGKSPQTWPRRTRPRSPEPAAPSGVRGSTWTRRRDTPRRAGPTALSRYVGHLWMGRRPPSPEARGPVPRSSAASRARRSLASPGISPGPLTATIGGAVAGGGPRQGRAEAHKEVFPGQRVGKMAAPMELFCWSGGWGLPSVDLDSLAVLTYARFTGAPLKVHKISNPWQSPSGTLPALRTSHGEVISVPHKIITHLRKEKYNADYDLSARQGADTLAFMSLLEEKLLPVLVHTFWIDTKNYVEVTRKWYAEAMPFPLNFFLPGRMQRQYMERLQLLTGEHRPEDEEELEKELYREARECLTLLSQRLGSQKFFFGDAPASLDAFVFSYLALLLQAKLPSGKLQVHLRGLHNLCAYCTHILSLYFPWDGAEVPPQRQTPAGPETEEEPYRRRNQILSVLAGLAAMVGYALLSGIVSIQRATPARAPGTRTLGMAEEDEEE

SEQ ID NO: 128503 - protein, 316 aa, Artificial Sequence
  derived and/or modified sequence
  misc_feature (1)..(1): Xaa can be any naturally occurring amino acid
XEGGQDGGAHGAVLLVRGLGAAVSGPGQPGRADLCQIYWCSTEGTQDQQPLAEPFRYPVSLGGTLPALRTSHGEVISVPHKIITHLRKEKYNADYDLSARQGADTLAFMSLLEEKLLPVLVHTFWIDTKNYVEVTRKWYAEAMPFPLNFFLPGRMQRQYMERLQLLTGEHRPEDEEELEKELYREARECLTLLSQRLGSQKFFFGDAPASLDAFVFSYLALLLQAKLPSGKLQVHLRGLHNLCAYCTHILSLYFPWDGAEVPPQRQTPAGPETEEEPYRRRNQILSVLAGLAAMVGYALLSGIVSIQRATPARAPG

SEQ ID NO: 128504 - DNA, 1401 bp, Artificial Sequence
  derived and/or modified sequence
atgctgctcggtggtcctcccagatctcctcgctcgggaacgtctccaaagggcccgtggtcctccaccgggcacgtgcagttcggtaagtctcctcagacctggccccggcggaccaggccacgcagtccggaaccagccgctccctcaggcgtgaggggtagcacttggacgcgccgccgtgatacccccagacgggcaggcccgaccgctcttagcaggtacgtgggccacctctggatgggtaggcggcctccctcgcctgaggcccggggccccgtgccacgttcctccgcagcgtcgagggctagaaggtcactcgccagccctggaattagcccaggcccgctgaccgccaccattggaggagcagtagcagggggcggccccagacaggggcgggcggaagcccacaaggaggtgttccctgggcagcgcgtcggcaagatggccgcacctatggaactgttctgttggagtggcgggtgggggctccccagcgtggatctcgactcattagccgtcctgacatatgcccggttcacgggtgcccccctgaaggtccataagatttccaacccatggcagtcaccctctggaaccctgccagcattaaggacgtctcacggagaagtgataagtgtcccccacaaaatcattacacacttacggaaagaaaagtataacgcagactatgacctcagcgctagacagggagccgatacactggctttcatgtccctgctggaggaaaagctcctgccagtattagtgcatacgttttggatcgataccaagaactacgtcgaagtgaccagaaagtggtatgccgaggccatgccctttccactcaactttttcctgcctggccggatgcaacggcagtacatggaacgactgcagctgctcacgggggaacaccgcccagaagatgaggaggagctggaaaaggaactctacagggaggcccgagagtgcttaacactcctttcccagcggctagggtctcagaaattcttctttggcgacgcccccgcttcactggatgcattcgtgttttcatacctggctctgttattgcaggccaagctgccaagcggtaaactgcaggtgcatctccgaggcctgcataatttatgtgcatattgtacccatatactgtccctgtactttccgtgggacggggctgaggtgccccctcagagacagacacccgctggcccagagacagaggaggagccatataggcggagaaaccagatcctgagcgttctcgccggcctcgcagcaatggtcgggtacgcactgctgtcgggcattgtgtccatccagagagcaaccccagctcgggcccctgggactagaactcttgggatggccgaagaggatgaggaagaatag

SEQ ID NO: 128505 - DNA, 951 bp, Artificial Sequence
  derived and/or modified sequence
taggagggaggacaagatggaggagctcatggtgcggtgctgctggttagagggctgggagccgcggtaagtgggcccggacagcctggaagagcagacctctgccagatctattggtgctctaccgagggcacacaggatcagcagccactggccgagcctttccggtatccagtgagcctgggtggcacgctccctgcgctaaggaccagccatggggaggtgatctccgtcccacacaaaattattacccatttacggaaagagaagtataacgctgactacgatttgtccgcccgacaaggagctgacaccctcgcctttatgagtcttttagaagagaagctgctgccggtcttggtgcataccttctggattgacaccaagaactacgtggaggttacccggaagtggtatgcagaagctatgcctttccctttgaacttctttctgcccgggcgcatgcagcgccagtacatggaacgactgcagttgctaacaggggaacatcgacctgaggatgaagaggaactggagaaggaactgtaccgagaggcacgggaatgcctgacactgttgtcccagagactcggatcacagaagttttttttcggcgatgcccccgcaagcttggacgcctttgtgttttcgtacctagccttgctgctccaggccaagttaccaagcgggaagctccaagtgcatctgcgaggactgcacaatctctgcgcctattgcacacacattctgagtctgtacttcccttgggacggtgccgaggtacctcctcagagacagactccagccgggccggagacagaagaggagccttatcgcaggcgtaatcaaattctctctgtgctggccgggcttgcagctatggtaggatatgcacttctgtccggaatagtctccatacagcgggccacaccagcaagggcgcctggctag

SEQ ID NO: 128506 - DNA, 1401 bp, Artificial Sequence
  derived and/or modified sequence
atgctgctgggcggcccccccaggagccccaggagcggcaccagccccaagggcccctggagcagcactggacatgtgcagtttgggaagagcccccagacctggcccaggaggacccggcccaggagccctgagcctgctgcccccagcggcgtgcggggcagcacctggacccggcggcgggacaccccaagaagagctggccccacagccctgagccgctacgtgggccacctgtggatgggcagaagaccacccagccctgaggcccggggccctgtgcccaggagcagcgctgccagccgggcccggcgcagcctggccagccctggcatcagccctggccccctgacagccaccatcggcggcgctgtggccggcggcggcccccggcagggccgggcagaggcccacaaggaggtgtttcctggccagagggtgggcaagatggccgcccccatggagctgttctgctggagcggcggctggggcctgcccagcgtggacctggacagcctggccgtgctgacctacgcccgcttcaccggggcccccctgaaggtgcacaagatcagcaacccctggcagagccccagcggcaccctgcctgccctgcggaccagccatggagaggtgatctctgtgccccacaagatcatcacccacctgaggaaggagaagtacaatgctgactatgacctgagcgcccggcagggcgctgacaccctggccttcatgagcctgctggaggagaagctgctgcctgtgctggtgcacaccttctggattgacaccaagaactacgtggaggtgaccaggaagtggtatgcagaggccatgcccttccccctgaacttcttcctgcccggccgcatgcagaggcagtacatggagcggctgcagctgctgaccggggagcacaggccagaagatgaggaggagctggagaaggagctgtaccgggaggccagagaatgtctgaccctgctgagccagaggctgggcagccagaagttcttctttggagatgccccagccagcctggatgcctttgtgttctcctacctggccctgctgctgcaggccaagctgcccagcggcaagctgcaggtgcacctgcggggcctgcacaacctgtgtgcctactgcacccacatcctgagcctgtacttcccctgggatggagctgaggtgcccccccagaggcagaccccagctggccctgagacagaggaggagccctacagaagaagaaaccagatcctgtctgtgctggccggcctggccgccatggtgggctacgccctgctgagcggcatcgtgtccatccagagggccaccccagcccgggcccctggcaccaggaccctgggcatggccgaggaggatgaggaggagtag

SEQ ID NO: 128507 - DNA, 951 bp, Artificial Sequence
  derived and/or modified sequence
tgagaaggaggccaggacggcggggcccacggggctgtgctgctggtgcggggcctgggcgctgctgtgtctggccctggccagcccggccgggctgacctgtgccagatctactggtgcagcacagagggcacccaggaccagcagcccctggccgagcccttccgctaccctgtgtccctgggcggcaccctgcctgccctgcggaccagccacggggaggtgatctctgtgccccacaagatcatcacccacctgaggaaggagaagtacaatgctgactatgacctgagcgcccggcagggcgctgacaccctggccttcatgagcctgctggaggagaagctgctgcctgtgctggtgcacaccttctggattgacaccaagaactacgtggaggtgaccaggaagtggtacgccgaggccatgcccttccccctgaacttcttcctgcccggccgcatgcagaggcagtacatggagcggctgcagctgctgactggagagcacaggccagaagatgaggaggagctggagaaggagctgtaccgggaggcccgggagtgcctgaccctgctgagccagaggctgggcagccagaagttcttctttggagatgccccagccagcctggatgcctttgtgttctcctacctggccctgctgctgcaggccaagctgcccagcggcaagctgcaggtgcacctgcggggcctgcacaacctgtgtgcctactgcacccacatcctgagcctgtacttcccctgggatggagctgaggtgcccccccagaggcagaccccagctggccctgagacagaggaggagccctacagaagaagaaaccagatcctgtctgtgctggccggcctggccgccatggtgggctacgccctgctgtctggaattgtgtccatccagagggccaccccagcccgggcccctggatag

SEQ ID NO: 128508 - DNA, 1632 bp, Artificial Sequence
  derived and/or modified sequence
aagccccagcccggcctccgctccggccgccgccaccgcccctgttttgtttccatggcgacaggcggcgcagggcccgctccaaacataacgcgctgtggaaaacatgctgctcgggggacccccccgcagtccccgctcggggacgagccccaaggggccctggagcagtacaggccacgtgcagtttggcaagagcccccagacctggcccaggcgcacaagaccccgctctccagagcctgccgcgccttcaggggttcggggctccacttggacgaggcgccgtgacactccgaggcgcgccgggccgacagcgctgtcccgctacgtgggccacctctggatgggccggcggccgccctcccccgaggcccgcggcccagtcccccgcagttcagctgccagtcgggccagaagaagcctcgcctccccggggatctccccaggccccctgaccgcaacgatcggaggggcggtggcggggggcgggcccaggcaggggagggcagaagcacacaaggaagtgtttccgggacagagggtgggcaagatggcggcgcccatggagctgttctgctggtcagggggctgggggctgccgtcagtggacctggacagcctggccgtgctgacctatgccagatttactggtgctccactgaaggtacacaagatcagcaacccctggcagagcccttcaggaactctgcctgcccttcggaccagtcatggagaggtcatctcagttccacacaagatcatcacccaccttcgaaaagagaagtacaatgctgattatgatctgtcagctcggcaaggggcagacaccctggccttcatgtctctcctggaggagaagttgctcccggtgctggtacatactttttggatagacaccaagaactacgtggaagtgacccggaagtggtatgcagaggctatgccctttcccctcaacttcttcctgcctggccgcatgcagcggcagtacatggaacggctacagctgctgactggggagcacaggcctgaggacgaggaagagctggagaaggagctgtaccgagaggctcgggagtgtctgaccctgctctctcagcgcctgggctctcaaaagttcttctttggagatgcccctgcctccttggacgccttcgtcttcagctacttggccctgctgctgcaggcaaagctgcccagtgggaagctgcaggtccacctgcgtgggctgcacaacctctgtgcctattgtacccacattctcagtctctacttcccctgggatggagctgaggtaccaccgcaacgccagacaccagcaggcccagagactgaggaggagccataccggcgccggaaccagatcctatctgtgctggcaggactggcagccatggtgggctacgccttgctcagcggcattgtctccatccagcgggcaacgcctgctcgggccccaggcacccggaccctgggcatggctgaggaggatgaagaggaatgatttgtcctcacgctcccaagactggtttttctactctcatgcattccagaggcccccgtgcctcctcgttgttggtacagccggacacggggtgctgccacccagaataaagccactcacactga

SEQ ID NO: 128509 - DNA, 946 bp, Artificial Sequence
  derived and/or modified sequence
agagggtgggcaagatggcggcgcccatggagctgttctgctggtcagggggctgggggctgccgtcagtggacctggacagcctggccgtgctgacctatgccagatttactggtgctccactgaaggtacacaagatcagcaacccctggcagagcccttcaggtacccagtatcccttgggggaactctgcctgcccttcggaccagtcatggagaggtcatctcagttccacacaagatcatcacccaccttcgaaaagagaagtacaatgctgattatgatctgtcagctcggcaaggggcagacaccctggccttcatgtctctcctggaggagaagttgctcccggtgctggtacatactttttggatagacaccaagaactacgtggaagtgacccggaagtggtatgcagaggctatgccctttcccctcaacttcttcctgcctggccgcatgcagcggcagtacatggaacggctacagctgctgactggggagcacaggcctgaggacgaggaagagctggagaaggagctgtaccgagaggctcgggagtgtctgaccctgctctctcagcgcctgggctctcaaaagttcttctttggagatgcccctgcctccttggacgccttcgtcttcagctacttggccctgctgctgcaggcaaagctgcccagtgggaagctgcaggtccacctgcgtgggctgcacaacctctgtgcctattgtacccacattctcagtctctacttcccctgggatggagctgaggtaccaccgcaacgccagacaccagcaggcccagagactgaggaggagccataccggcgccggaaccagatcctatctgtgctggcaggactggcagccatggtgggctacgccttgctcagcggcattgtctccatccagcgggcaacgcctgctcgggccccaggc

SEQ ID NO: 128510 - DNA, 1401 bp, Artificial Sequence
  derived and/or modified sequence
atgctgctgggcggccccccccggagcccccggagcggcaccagcccaaagggcccatggtctagtactggccatgtgcagttcgggaagagccctcagacctggccgaggcggacacggcctcgatcccccgagcctgcagccccttcaggggtgcgaggctccacttggacacgccggagggatactcccaggcgcgcaggccctaccgctctctctaggtacgtggggcatctgtggatggggagacgccccccaagtccagaggcaagaggcccagtgccccgaagcagcgcggcttctcgtgccagacggagcctggcatcccctggaatatcccccggccctctaacagcgaccatcggtggcgctgtcgccggaggcgggccacggcagggcagagctgaagcccataaagaggtgtttccaggacaacgagtgggcaagatggccgcgccaatggagctcttctgctggtccggcgggtgggggctccccagtgtcgatttggactcattagcagtcctaacatacgcgcgttttacaggcgcccccctgaaggtccacaaaatcagcaacccctggcagagcccatctggtacactgcccgctctccggacctctcatggggaagtcatttcagtgcctcataagataattacacacctaagaaaggaaaagtacaatgccgattacgatctcagtgctaggcaaggagccgatacccttgctttcatgtctctgttagaggagaagctactgcccgtgttagtgcatactttctggattgacacaaaaaattacgtcgaggtcacccgaaaatggtatgccgaagcgatgccattcccattgaacttcttcctgcccggtcgcatgcagagacagtacatggagcggctccagctgttaactggcgaacatagacccgaggatgaagaggaacttgagaaggagctgtacagggaagccagggaatgcttgaccctgctcagtcaaagacttggcagtcagaaattcttctttggggatgccccagcttcacttgatgcctttgtgttctcttatctggccttactgttgcaagcaaagcttcccagcggtaagctgcaggttcacctgagaggactgcacaatctgtgtgcttattgtacacacattctctccttatactttccctgggatggcgctgaagtgcctccccagcgccagacgcccgctggtccagaaaccgaggaagagccttatcgacgccgaaaccagatactgtccgttcttgcgggtctagccgctatggtcggctatgctctgctgtctggtatcgtgtccatccagagagcgacacctgccagggccccaggaacccggaccctgggaatggctgaggaagacgaggaggagtag

SEQ ID NO: 128511 - DNA, 951 bp, Artificial Sequence
  derived and/or modified sequence
tgagagggcggccaggacggcggcgcccacggcgccgtgctgctggtgagagggctcggcgctgctgtcagcggaccaggacagcctggtcgtgctgatttgtgccagatctactggtgtagcaccgaaggcacccaggatcagcagcccttggccgaaccatttagatacccagtgtctctgggtggaacactgcctgccctcagaaccagccatggggaagtcatctccgtcccacacaagatcatcacccatctgagaaaggagaagtacaacgccgactacgacctgtccgcccgtcagggagctgataccctggcctttatgtcgctgctcgaagagaagcttctgccagtcctcgtacacaccttctggatagacaccaagaactacgtcgaggtgactcgcaaatggtacgctgaggcaatgccgtttcccctcaactttttcttgcctgggaggatgcaacggcaatatatggaacgcctgcagcttcttaccggtgagcaccgacccgaagacgaggaagagctagagaaggaactttatcgggaggctagggaatgtctaacactgttgtcgcagcgcctgggtagccaaaagtttttctttggtgatgcccctgcatccctcgacgcttttgtgttttcttatttagcactcttacttcaggccaaactaccctccgggaagctgcaggtacacttgcggggcctgcataacctgtgtgcttattgcactcacatcctttccttatattttccttgggacggagcggaggtacctccccaacggcaaactcctgccggacccgagaccgaggaagagccttacagaaggagaaatcaaattttgtcagttttggctggcctcgccgccatggttgggtatgctctcctgtcaggcattgtttccatccaacgcgctacacccgccagggcaccaggctag

SEQ ID NO: 128512 - DNA, 1401 bp, Artificial Sequence
  derived and/or modified sequence
atgctgttgggtgggccacctcgatcacctagaagcgggactagccccaaaggaccctggtcctcaaccggccacgtccagtttggcaaaagtccgcagacatggcctaggcgaacgaggcccaggagccccgagcccgcagcaccctccggagttcggggttccacctggacccgacgacgcgacaccccccgtagagccggtcccactgcacttagcaggtacgtcggccacctttggatgggcaggcgtccacctagccccgaggcccgagggcctgttcccaggtccagtgctgctagccgcgcaaggcggagcctggcgagtcccggtatttccccaggaccactgacagcaactattggtggtgcggtagcaggaggtgggcctagacagggtcgggctgaggctcacaaggaggtgttccccggtcaacgcgtggggaagatggccgctccaatggaattattctgttggagcggcggatggggactccccagcgtggatctggacagtctggctgtgctcacttacgcaagatttaccggagctcctctgaaagttcataagatttcgaatccgtggcaatccccaagtggcactttgcccgcactacggacctcacacggtgaagtgatctccgtacctcataagataatcacgcacctacgcaaggagaaatacaacgccgattacgaccttagtgccagacagggagctgatacattagcttttatgtcacttctggaagagaaactgctgcccgtgcttgtgcatactttttggattgatacgaagaattacgtggaagttactaggaagtggtacgccgaagctatgccgtttccactaaacttcttcttgcctgggcgaatgcagcgacagtatatggaacgtctgcagctgcttacaggtgaacacaggcccgaagatgaggaagagctagaaaaagaactgtacagagaagcaagagagtgcctgacgctgctcagccagcgcctcggatcccaaaaattttttttcggcgacgctccggcatcccttgacgccttcgtgttcagttacctggcgctgttgctgcaagcgaaattgccctctgggaagcttcaggtacacctgcgcggactccataatctctgtgcctattgtactcacatcctgagcctgtacttcccctgggacggcgctgaggtaccacctcaacggcagacccccgcaggcccagagacggaggaggagccgtatcgacgacgcaaccagatactgagcgtccttgccggacttgcagccatggtcggatatgcccttctttcgggtattgtgagcattcaacgtgctacacccgctcgtgctcccggaaccaggactttaggaatggctgaagaagatgaggaggagtag

SEQ ID NO: 128513 - DNA, 951 bp, Artificial Sequence
  derived and/or modified sequence
tgagagggaggtcaagatggcggtgcacacggcgctgtcttgctggtcaggggtcttggcgcagctgtgagcggaccagggcaacctggaagagcggacctttgtcaaatttattggtgctctaccgagggaacacaagaccagcagccgttagctgagccattccgctatccggtgagcctgggcggaacactgccggcactccggactagccacggagaagttatctccgtgccccacaagatcataacccacttaaggaaggagaagtacaacgcagattacgacctatccgccagacagggggcagacacactcgcctttatgtcactcctggaagaaaaactgctccccgtactcgttcacaccttctggatcgataccaagaactatgtcgaggtcactcgtaagtggtatgccgaagccatgccttttccattgaatttctttctgccgggtaggatgcagcgccagtacatggaaaggcttcagctcttaaccggagaacacagacctgaagatgaggaggagctggagaaagagctctacagggaggcaagggaatgcctgactctgctatctcaacggctgggcagccagaaattctttttcggggacgccccagctagtctcgatgccttcgttttctcctacttagctctcctgctgcaggccaagttaccgtctggcaaattacaggtgcatctgagaggcctgcataatctctgcgcgtactgtacccatattctgtccctgtacttcccctgggacggggctgaggtgccccctcagcggcaaacccccgcaggcccagagaccgaggaggagccctacagacgcaggaatcaaatcctgagcgttctggcgggattggccgcaatggtcggttacgccctcctgagtggtatagtgtctattcagagggcaacaccagcccgagccccaggatag

SEQ ID NO: 128514 - DNA, 1401 bp, Artificial Sequence
  derived and/or modified sequence
atgctgctgggcggcccccccagaagccccagaagcggcaccagccccaagggcccctggagcagcaccggccacgtgcagttcggcaagagcccccagacctggcccagaagaaccagacccagaagccccgagcccgccgcccccagcggcgtgagaggcagcacctggaccagaagaagagacacccccagaagagccggccccaccgccctgagcagatacgtgggccacctgtggatgggcagaagaccccccagccccgaggccagaggccccgtgcccagaagcagcgccgccagcagagccagaagaagcctggccagccccggcatcagccccggccccctgaccgccaccatcggcggcgccgtggccggcggcggccccagacagggcagagccgaggcccacaaggaggtgttccccggccagagagtgggcaagatggccgcccccatggagctgttctgctggagcggcggctggggcctgcccagcgtggacctggacagcctggccgtgctgacctacgccagattcaccggcgcccccctgaaggtgcacaagatcagcaacccctggcagagccccagcggcaccctgcccgccctgagaaccagccacggcgaggtgatcagcgtgccccacaagatcatcacccacctgagaaaggagaagtacaacgccgactacgacctgagcgccagacagggcgccgacaccctggccttcatgagcctgctggaggagaagctgctgcccgtgctggtgcacaccttctggatcgacaccaagaactacgtggaggtgaccagaaagtggtacgccgaggccatgcccttccccctgaacttcttcctgcccggcagaatgcagagacagtacatggagagactgcagctgctgaccggcgagcacagacccgaggacgaggaggagctggagaaggagctgtacagagaggccagagagtgcctgaccctgctgagccagagactgggcagccagaagttcttcttcggcgacgcccccgccagcctggacgccttcgtgttcagctacctggccctgctgctgcaggccaagctgcccagcggcaagctgcaggtgcacctgagaggcctgcacaacctgtgcgcctactgcacccacatcctgagcctgtacttcccctgggacggcgccgaggtgcccccccagagacagacccccgccggccccgagaccgaggaggagccctacagaagaagaaaccagatcctgagcgtgctggccggcctggccgccatggtgggctacgccctgctgagcggcatcgtgagcatccagagagccacccccgccagagcccccggcaccagaaccctgggcatggccgaggaggacgaggaggagtag

SEQ ID NO: 128515 - DNA, 951 bp, Artificial Sequence
  derived and/or modified sequence
tgagagggcggccaggacggcggcgcccacggcgccgtgctgctggtgagaggcctgggcgccgccgtgagcggccccggccagcccggcagagccgacctgtgccagatctactggtgcagcaccgagggcacccaggaccagcagcccctggccgagcccttcagataccccgtgagcctgggcggcaccctgcccgccctgagaaccagccacggcgaggtgatcagcgtgccccacaagatcatcacccacctgagaaaggagaagtacaacgccgactacgacctgagcgccagacagggcgccgacaccctggccttcatgagcctgctggaggagaagctgctgcccgtgctggtgcacaccttctggatcgacaccaagaactacgtggaggtgaccagaaagtggtacgccgaggccatgcccttccccctgaacttcttcctgcccggcagaatgcagagacagtacatggagagactgcagctgctgaccggcgagcacagacccgaggacgaggaggagctggagaaggagctgtacagagaggccagagagtgcctgaccctgctgagccagagactgggcagccagaagttcttcttcggcgacgcccccgccagcctggacgccttcgtgttcagctacctggccctgctgctgcaggccaagctgcccagcggcaagctgcaggtgcacctgagaggcctgcacaacctgtgcgcctactgcacccacatcctgagcctgtacttcccctgggacggcgccgaggtgcccccccagagacagacccccgccggccccgagaccgaggaggagccctacagaagaagaaaccagatcctgagcgtgctggccggcctggccgccatggtgggctacgccctgctgagcggcatcgtgagcatccagagagccacccccgccagagcccccggctag

SEQ ID NO: 128516 - protein, 273 aa, Artificial Sequence
  derived and/or modified sequence
MTPGTQSPFFLLLLLTVLTVVTGSGHASSTPGGEKETSATQRSSVPSSTEKNALSTGVSFFFLSFHISNLQFNSSLEDPSTDYYQELQRDISEMFLQIYKQGGFLGLSNIKFRPGSVVVQLTLAFREGTINVHDVETQFNQYKTEAASRYNLTISDVSVSDVPFPFSAQSGAGVPGWGIALLVLVCVLVALAIVYLIALAVCQCRRKNYGQLDIFPARDTYHPMSEYPTYHTHGRYVPPSSTDRSPYEKVSAGNGGSSLSYTNPAVAATSANL

SEQ ID NO: 128517 - DNA, 822 bp, Artificial Sequence
  derived and/or modified sequence
atgacccccggcacccagagccccttcttcctgctgctgctgctgaccgtgctgaccgtggtgaccggcagcggccacgccagcagcacccccggcggcgagaaggagaccagcgccacccagagaagcagcgtgcccagcagcaccgagaagaacgccctgagcaccggcgtgagcttcttcttcctgagcttccacatcagcaacctgcagttcaacagcagcctggaggaccccagcaccgactactaccaggagctgcagagagacatcagcgagatgttcctgcagatctacaagcagggcggcttcctgggcctgagcaacatcaagttcagacccggcagcgtggtggtgcagctgaccctggccttcagagagggcaccatcaacgtgcacgacgtggagacccagttcaaccagtacaagaccgaggccgccagcagatacaacctgaccatcagcgacgtgagcgtgagcgacgtgcccttccccttcagcgcccagagcggcgccggcgtgcccggctggggcatcgccctgctggtgctggtgtgcgtgctggtggccctggccatcgtgtacctgatcgccctggccgtgtgccagtgcagaagaaagaactacggccagctggacatcttccccgccagagacacctaccaccccatgagcgagtaccccacctaccacacccacggcagatacgtgccccccagcagcaccgacagaagcccctacgagaaggtgagcgccggcaacggcggcagcagcctgagctacaccaaccccgccgtggccgccaccagcgccaacctgtag

SEQ ID NO: 128518 - DNA, 822 bp, Artificial Sequence
  derived and/or modified sequence
atgacaccaggcactcaatctccgttcttcttattgctgctgttgacagtcttgaccgttgtgacagggtccggccatgcaagctcaactcctgggggggaaaaagaaaccagcgctactcagcgcagcagcgtcccctcctccaccgaaaagaatgccctgtctactggcgtgtctttctttttcctgagtttccacataagcaatttacaattcaattcaagcttagaggacccatccacagattattatcaggaattgcagcgcgacatctctgagatgtttctccagatatataagcaggggggctttttaggtctctcaaacatcaagttccgaccagggagtgtagtggtacaactcaccctggcatttcgtgaaggcacaatcaacgtgcacgacgttgaaacacagttcaaccagtataagaccgaggctgcttcacgctacaatctcacaatctctgacgtgtcggtgagcgacgttccattccccttcagcgctcaaagcggagccggtgttcctggctggggcattgcactgctagtcctagtctgtgtgcttgtggctctggccatcgtgtacctgatcgcgctcgctgtttgtcagtgcaggcgaaagaactacgggcagcttgatatattccctgcaagggatacataccatcccatgagcgagtatccaacttatcacacccacggcagatacgttcccccttcttccacagaccggtccccatatgaaaaggtgagcgccgggaatggaggctccagcctttcctataccaatcctgctgtggcagcaacttctgccaacctgtag

SEQ ID NO: 128519 - DNA, 822 bp, Artificial Sequence
  derived and/or modified sequence
atgaccccaggcacccagagccccttcttcctgctgctgctgctgactgtgctgactgtggtgacaggcagcggccacgccagcagcaccccaggaggagagaaggagaccagcgccacccagaggagctctgtgcccagcagcacagagaagaatgccctgagcactggagtgtccttcttcttcctgtccttccacatcagcaacctgcagttcaacagcagcctggaggaccccagcacagactactaccaggagctgcagagggacatcagcgagatgttcctgcagatctacaagcagggcggcttcctgggcctgagcaacatcaagttccggcccggctctgtggtggtgcagctgaccctggccttccgggagggcaccatcaacgtgcatgatgtggagacccagttcaaccagtacaagacagaggccgccagccgctacaacctgaccatcagtgatgtgtctgtgtctgatgtgcccttccccttcagcgcccagagcggggccggcgtgcccggctggggcatcgccctgctggtgctggtgtgtgtgctggtggccctggccatcgtgtacctgattgccctggccgtgtgccagtgcaggaggaagaactacggccagctggacatcttccctgcccgggacacctaccaccccatgtctgagtaccccacctaccacacccacggccgctacgtgccccccagcagcacagacaggagcccctatgagaaggtgtctgctggaaatggaggcagcagcctgagctacaccaacccagctgtggccgccaccagcgccaacctgtag

SEQ ID NO: 128520 - DNA, 822 bp, Artificial Sequence
  derived and/or modified sequence
atgacccccggcacccagagccccttcttcctgctgctgctgctgacggttctaactgtcgtgaccggaagtgggcacgccagctctaccccagggggcgagaaggagacttcggctactcagagatctagtgtgccatcctccaccgaaaagaatgccctgtccaccggcgttagcttcttttttctcagtttccatatatctaacctgcagtttaattcgtccctggaagacccctctaccgactattaccaggaactgcagcgggatatctccgagatgttcctgcaaatttataagcagggggggttcctgggactgtctaacataaaatttcggcccgggagcgttgttgtgcagttgacactcgccttccgtgaggggacgatcaatgtgcacgacgtggaaacccagttcaatcagtacaaaactgaggccgcctcaagatacaatcttacgattagtgatgtgtcagtttcagatgtcccctttcctttctcggcgcagtctggtgctggagtccccgggtggggcattgccctcctggtgctggtgtgcgtcctggtggcactcgcaatagtttatcttatcgcgctagccgtttgccagtgccgaagaaaaaattacggtcagcttgacatttttcccgcaagagatacatatcatcctatgagcgaatatccgacctaccatacacacggaagatacgtgccccctagctccaccgacaggtcaccgtacgaaaaggtttcggcgggcaacgggggcagctcactcagttacaccaatccggccgtagctgcgaccagcgcaaatctatag

SEQ ID NO: 128521 - DNA, 859 bp, Artificial Sequence
  derived and/or modified sequence
cctccccacccatttcaccaccaccatgacaccgggcacccagtctcctttcttcctgctgctgctcctcacagtgcttacagttgttacgggttctggtcatgcaagctctaccccaggtggagaaaaggagacttcggctacccagagaagttcagtgcccagctctactgagaagaatgctttgtctactggggtctctttctttttcctgtcttttcacatttcaaacctccagtttaattcctctctggaagatcccagcaccgactactaccaagagctgcagagagacatttctgaaatgtttttgcagatttataaacaagggggttttctgggcctctccaatattaagttcaggccaggatctgtggtggtacaattgactctggccttccgagaaggtaccatcaatgtccacgacgtggagacacagttcaatcagtataaaacggaagcagcctctcgatataacctgacgatctcagacgtcagcgtgagtgatgtgccatttcctttctctgcccagtctggggctggggtgccaggctggggcatcgcgctgctggtgctggtctgtgttctggttgcgctggccattgtctatctcattgccttggctgtctgtcagtgccgccgaaagaactacgggcagctggacatctttccagcccgggatacctaccatcctatgagcgagtaccccacctaccacacccatgggcgctatgtgccccctagcagtaccgatcgtagcccctatgagaaggtttctgcaggtaatggtggcagcagcctctcttacacaaacccagcagtggcagccacttctgccaacttgtaggggcacgtcgcc

SEQ ID NO: 128522 - DNA, 822 bp, Artificial Sequence
  derived and/or modified sequence
atgactcctggtactcagtctccctttttccttttgctcctcctcaccgttcttaccgtggtaaccggctctggccacgcatcctctactcccggaggggaaaaagagacctcagcaacccagaggagtagcgtgccttccagcaccgagaaaaatgccctgtctactggcgtgtcctttttttttctgtccttccacattagcaatctgcagtttaactccagcctggaggacccgtctaccgattactaccaggagctccaacgagatataagtgagatgtttctgcagatatacaaacagggcggtttcctgggcctgtccaacattaaattcaggcccggtagcgtggtggtgcagctcacactggccttccgtgagggtaccatcaacgtgcacgatgtggagacacaattcaaccagtataagacagaggctgcttctcgatacaacttaaccatttccgacgttagcgttagcgacgtcccattcccattctccgctcagagtggcgctggggtgccgggatggggcatcgcccttctggtgctggtgtgcgtcctcgtcgccttagccatagtctacttaatcgccctggcagtgtgccaatgcaggagaaagaattacggccagcttgatattttccccgcaagggatacataccaccccatgtctgagtacccaacttaccacactcatggtaggtacgttccgccaagctcaacagatcgctcaccttacgagaaggtgtctgctggtaacggcggatcctcattaagttacactaatccagcagtggctgccacttctgctaacctctag

SEQ ID NO: 128523 - protein, 278 aa, Artificial Sequence
  derived and/or modified sequence
PTGTQTPTPTPISTTTTVTPTPTPTGTQTPTTTPITTTTTVTPTPTPTGTQTPTTVLITTTTTMTPTPTPTSTKSTTVTPITTTTTVTATPTPTGTQTPTMIPISTTTTVTPTPTPTTGSTGPPTHTSTAPIAELTTSNPPPESSTPQTSRSTSSPLTESTTLLSTLPPAIEMTSTAPPSTPTAPTTTSGGHTLSPPPSTTTSPPGTPTRGTTTGSSSAPTPSTVQTTTTSAWTPTPTPLSTPSIIRTTGLRPYPSSVLICCVLNDTYYAPGEEVYNG

SEQ ID NO: 128524 - protein, 1780 aa, Artificial Sequence
  derived and/or modified sequence
MGLPLARLAAVCLALSLAGGSELQTEGRTRNHGHNVCSTWGNFHYKTFDGDVFRFPGLCDYNFASDCRGSYKEFAVHLKRGPGQAEAPAGVESILLTIKDDTIYLTRHLAVLNGAVVSTPHYSPGLLIEKSDAYTKVYSRAGLTLMWNREDALMLELDTKFRNHTCGLCGDYNGLQSYSEFLSDGVLFSPLEFGNMQKINQPDVVCEDPEEEVAPASCSEHRAECERLLTAEAFADCQDLVPLEPYLRACQQDRCRCPGGDTCVCSTVAEFSRQCSHAGGRPGNWRTATLCPKTCPGNLVYLESGSPCMDTCSHLEVSSLCEEHRMDGCFCPEGTVYDDIGDSGCVPVSQCHCRLHGHLYTPGQEITNDCEQCVCNAGRWVCKDLPCPGTCALEGGSHITTFDGKTYTFHGDCYYVLAKGDHNDSYALLGELAPCGSTDKQTCLKTVVLLADKKKNVVVFKSDGSVLLNELQVNLPHVTASFSVFRPSSYHIMVSMAIGVRLQVQLAPVMQLFVTLDQASQGQVQGLCGNFNGLEGDDFKTASGLVEATGAGFANTWKAQSSCHDKLDWLDDPCSLNIESANYAEHWCSLLKKTETPFGRCHSAVDPAEYYKRCKYDTCNCQNNEDCLCAALSSYARACTAKGVMLWGWREHVCNKDVGSCPNSQVFLYNLTTCQQTCRSLSEADSHCLEGFAPVDGCGCPDHTFLDEKGRCVPLAKCSCYHRGLYLEAGDVVVRQEERCVCRDGRLHCRQIRLIGQSCTAPKIHMDCSNLTALATSKPRALSCQTLAAGYYHTECVSGCVCPDGLMDDGRGGCVVEKECPCVHNNDLYSSGAKIKVDCNTCTCKRGRWVCTQAVCHGTCSIYGSGHYITFDGKYYDFDGHCSYVAVQDYCGQNSSLGSFSIITENVPCGTTGVTCSKAIKIFMGRTELKLEDKHRVVIQRDEGHHVAYTTREVGQYLVVESSTGIIVIWDKRTTVFIKLAPSYKGTVCGLCGNFDHRSNNDFTTRDHMVVSSELDFGNSWKEAPTCPDVSTNPEPCSLNPHRRSWAEKQCSILKSSVFSICHSKVDPKPFYEACVHDSCSCDTGGDCECFCSAVASYAQECTKEGACVFWRTPDLCPIFCDYYNPPHECEWHYEPCGNRSFETCRTINGIHSNISVSYLEGCYPRCPKDRPIYEEDLKKCVTADKCGCYVEDTHYPPGASVPTEETCKSWCTCTQTHTAYHVHTHGKILNQTQDGAFCYWEICGPNGTVEKHFNICSITTRPSTLTTFTTITLPTTPTTFTTTTTTTTPTSSTVLSTTPKLCCLWSDWINEDHPSSGSDDGDRETFDGVCGAPEDIECRSVKDPHLSLEQLGQKVQCDVSVGFICKNEDQFGNGPFGLCYDYKIRVNCCWPMDKCITTPSPPTTTPSPPPTSTTTLPPTTTPSPPTTTTTTPPPTTTPSPPITTTTTPPPTTTPSPPISTTTTPPPTTTPSPPTTTPSPPTTTPSPPTTTTTTPPPTTTPSPPTTTPITPPASTTTLPPTTTPSPPTTTTTTPPPTTTPITTTTTVTPTPTPTGTQTPTTTPITTTTTVTPTPTPTGTQTPTSTPITTTTTTPTPTAITTTTTVTPTPTPTGTQTPTTTPITTTTTVTPTPTPTGTQSPTPTAITTTTTVTPTPTPTGTQTPTSTPITTTTTVTPTPTPTGTQTPTPTPISTTTTVTPTPTPTGTQTPTTTPITTTTTVTPTPTPTGTQTPTTTPTPTSTKSTTVTPITTTTTVTATPTPTGTQTPTMIPISTTTTVTP

SEQ ID NO: 128525 - protein, 409 aa, Artificial Sequence
  derived and/or modified sequence
DIECRSVKDPHLSLEQLGQKVQCDVSVGFICKNEDQFGNGPFGLCYDYKIRVNCCCTPTRGTTTGSSSAPTPSTVQTTTTSAWTPTPTPLSTPSIIRTTGLRPYPSSVLICCVLNDTYYAPGEEVYNGTYGDTCYFVNCSLSCTLEFYNWSCPSTPSPTPTPSKSTPTPSKPSSTPSKPTPGTKPPECPDFDPPRQENETWWLCDCFMATCKYNNTVEIVKVECEPPPMPTCSNGLQPVRVEDPDGCCWHWECDCYCTGWGDPHYVTFDGLYYSYQGNCTYVLVEEISPSVDNFGVYIDNYHCDPNDKVSCPRTLIVRHETQEVLIKTVHMMPMQVQVQVNRQAVALPYKKYGLEVYQSGINYVVDIPELGVLVSYNGLSFSVRLPYHRFGNNTKGQCGTCTNTTSDDC

SEQ ID NO: 128526 - protein, 2817 aa, Artificial Sequence
  derived and/or modified sequence
MGLPLARLAAVCLALSLAGGSELQTEGRTRNHGHNVCSTWGNFHYKTFDGDVFRFPGLCDYNFASDCRGSYKEFAVHLKRGPGQAEAPAGVESILLTIKDDTIYLTRHLAVLNGAVVSTPHYSPGLLIEKSDAYTKVYSRAGLTLMWNREDALMLELDTKFRNHTCGLCGDYNGLQSYSEFLSDGVLFSPLEFGNMQKINQPDVVCEDPEEEVAPASCSEHRAECERLLTAEAFADCQDLVPLEPYLRACQQDRCRCPGGDTCVCSTVAEFSRQCSHAGGRPGNWRTATLCPKTCPGNLVYLESGSPCMDTCSHLEVSSLCEEHRMDGCFCPEGTVYDDIGDSGCVPVSQCHCRLHGHLYTPGQEITNDCEQCVCNAGRWVCKDLPCPGTCALEGGSHITTFDGKTYTFHGDCYYVLAKGDHNDSYALLGELAPCGSTDKQTCLKTVVLLADKKKNVVVFKSDGSVLLNELQVNLPHVTASFSVFRPSSYHIMVSMAIGVRLQVQLAPVMQLFVTLDQASQGQVQGLCGNFNGLEGDDFKTASGLVEATGAGFANTWKAQSSCHDKLDWLDDPCSLNIESANYAEHWCSLLKKTETPFGRCHSAVDPAEYYKRCKYDTCNCQNNEDCLCAALSSYARACTAKGVMLWGWREHVCNKDVGSCPNSQVFLYNLTTCQQTCRSLSEADSHCLEGFAPVDGCGCPDHTFLDEKGRCVPLAKCSCYHRGLYLEAGDVVVRQEERCVCRDGRLHCRQIRLIGQSCTAPKIHMDCSNLTALATSKPRALSCQTLAAGYYHTECVSGCVCPDGLMDDGRGGCVVEKECPCVHNNDLYSSGAKIKVDCNTCTCKRGRWVCTQAVCHGTCSIYGSGHYITFDGKYYDFDGHCSYVAVQDYCGQNSSLGSFSIITENVPCGTTGVTCSKAIKIFMGRTELKLEDKHRVVIQRDEGHHVAYTTREVGQYLVVESSTGIIVIWDKRTTVFIKLAPSYKGTVCGLCGNFDHRSNNDFTTRDHMVVSSELDFGNSWKEAPTCPDVSTNPEPCSLNPHRRSWAEKQCSILKSSVFSICHSKVDPKPFYEACVHDSCSCDTGGDCECFCSAVASYAQECTKEGACVFWRTPDLCPIFCDYYNPPHECEWHYEPCGNRSFETCRTINGIHSNISVSYLEGCYPRCPKDRPIYEEDLKKCVTADKCGCYVEDTHYPPGASVPTEETCKSCVCTNSSQVVCRPEEGKILNQTQDGAFCYWEICGPNGTVEKHFNICSITTRPSTLTTFTTITLPTTPTTFTTTTTTTTPTSSTVLSTTPKLCCLWSDWINEDHPSSGSDDGDRETFDGVCGAPEDIECRSVKDPHLSLEQLGQKVQCDVSVGFICKNEDQFGNGPFGLCYDYKIRVNCCWPMDKCITTPSPPTTTPSPPPTSTTTLPPTTTPSPPTTTTTTPPPTTTPSPPITTTTTPPPTTTPSPPISTTTTPPPTTTPSPPTTTPSPPTTTPSPPTTTTTTPPPTTTPSPPTTTPITPPASTTTLPPTTTPSPPTTTTTTPPPTTTPITTTTTVTPTPTPTGTQTPTTTPITTTTTVTPTPTPTGTQTPTSTPITTTTTVTPTPTPTGTQTPTTTPITTTTTVTPTPTPTGTQTPTPTAITTTTTVTPTPTPTGTQTPTTTPITTTTTVTPTPTPTGTQSPTPTAITTTTTVTPTPTPTGTQTPTSTPITTTTTVTPTPTPTGTQTPTPTPISTTTTVTPTPTPTGTQTPTTTPITTTTTVTPTPTPTGTQTPTTVLITTTTTMTPTPTPTSTKSTTVTPITTTTTVTATPTPTGTQTPTMIPISTTTTVTPTPTPTTGSTGPPTHTSTAPIAELTTSNPPPESSTPQTSRSTSSPLTESTTLLSTLPPAIEMTSTAPPSTPTAPTTTSGGHTLSPPPSTTTSPPGTPTRGTTTGSSSAPTPSTVQTTTTSAWTPTPTPLSTPSIIRTTGLRPYPSSVLICCVLNDTYYAPGEEVYNGTYGDTCYFVNCSLSCTLEFYNWSCPSTPSPTPTPSKSTPTPSKPSSTPSKPTPGTKPPECPDFDPPRQENETWWLCDCFMATCKYNNTVEIVKVECEPPPMPTCSNGLQPVRVEDPDGCCWHWECDCYCTGWGDPHYVTFDGLYYSYQGNCTYVLVEEISPSVDNFGVYIDNYHCDPNDKVSCPRTLIVRHETQEVLIKTVHMMPMQVQVQVNRQAVALPYKKYGLEVYQSGINYVVDIPELGVLVSYNGLSFSVRLPYHRFGNNTKGQCGTCTNTTSDDCILPSGEIVSNCEAAADQWLVNDPSKPHCPHSSSTTKRPAVTVPGGGKTTPHKDCTPSPLCQLIKDSLFAQCHALVPPQHYYDACVFDSCFMPGSSLECASLQAYAALCAQQNICLDWRNHTHGACLVECPSHREYQACGPAEEPTCKSSSSQQNNTVLVEGCFCPEGTMNYAPGFDVCVKTCGCVGPDNVPREFGEHFEFDCKNCVCLEGGSGIICQPKRCSQKPVTHCVEDGTYLATEVNPADTCCNITVCKCNTSLCKEKPSVCPLGFEVKSKMVPGRCCPFYWCESKGVCVHGNAEYQPGSPVYSSKCQDCVCTDKVDNNTLLNVIACTHVPCNTSCSPGFELMEAPGECCKKCEQTHCIIKRPDNQHVILKPGDFKSDPKNNCTFFSCVKIHNQLISSVSNITCPNFDASICIPGSITFMPNGCCKTCTPRNETRVPCSTVPVTTEVSYAGCTKTVLMNHCSGSCGTFVMYSAKAQALDHSCSCCKEEKTSQREVVLSCPNGGSLTHTYTHIESCQCQDTVCGLPTGTSRRARRSPRHLGSG

SEQ ID NO: 128527 - DNA, 1440 bp, Artificial Sequence
  derived and/or modified sequence
atgctgatcagcgccgccagcatggcccccgaggtgtgcggccccagcctgcagggcacccccggcccccccccccccctgctgcccaagcccggcaaggacaacctgagactgcagaagctgctgagaaaggccgccagaaagaagatgatgggcggcacccacctggccccccccagagccttcagaaccagcctgagccccgtgagcgaggccagccacgaccaggaggtgaccgccccccacgccgccgagggcccccaccccgccgaggcccccagactgcccgaggcccccagacccgccgaggcccccagaatggtggccgccctgcccagaagcccccacacccccatcatccaccacgtggccagccccctgcagaagagcaccttcagcatcggcctgacccagagaagaatcctggccgcccagttcagagccatgggcccccaggtggtggccagcgcccccgagcccaccagaccccccagcggcttcgtgcccgtgagcggcggcggcggcacccacgtgacccaggtgcacatccagctggcccccagcccccacaacggcacccccgagccccccagaaccgcccccgaggtgggcagcaacagccaggacggcgacgccacccccagcccccccagagcccagcccctggtgcccgtggcccacatcagacccctgcccaccaccgtgcaggccgccagccccctgcccgaggagccccccgtgcccagacccccccccggcttccaggccagcgtgcccagagaggccagcgccagagtggtggtgcccatcgcccccacctgcagaagcctggagagcagcccccacagcctggtgcccatgggccccggcagagagcacctggaggagccccccatggccggccccgccgccgaggccgagagagtgagcagccccgcctgggccagcagccccaccccccccagcggcccccacccctgccccgtgcccaaggtggcccccaagcccagactgagcggctggacctggctgaagaagcagctgctggaggaggcccccgagcccccctgccccgagcccagacagagcctggagcccgaggtgcccacccccaccgagcaggaggtgcccgcccccaccgagcaggaggtgcccgccctgaccgcccccagagcccccgccagcagaaccagcagaatgtgggacgccgtgctgtacagaatgagcgtggccgaggcccagggcagactggccggccccagcggcggcgagcacacccccgccagcctgaccagactgcccttcctgtacagacccagattcaacgccagaaagctgcaggaggccaccagacccccccccaccgtgagaagcatcctggagctgagcccccagcccaagaacttcaacagaaccgccaccggctggagactgcagtag

SEQ ID NO: 128528 - DNA, 1440 bp, Artificial Sequence
  derived and/or modified sequence
atgttgattagtgcagccagcatggcccccgaagtttgcggaccctctctgcaaggaacccctggacctccaccgcctttgctcccgaaaccagggaaagacaacctgcgactgcagaagctgctgcggaaggcagcacgaaagaagatgatgggtggcactcacttggctcccccaagagcctttaggacatcgctgagccccgtatctgaggctagtcatgaccaggaggtgacggccccacacgctgcagagggccctcaccctgcagaagctcctagattaccagaagctcctcggcctgcggaagcacctcgtatggtggccgctcttccccgcagccctcacacccctatcattcaccatgtagcatctccccttcagaaatccaccttctccattggtctgactcagagaaggattctcgctgcccagtttagggccatgggcccccaggtggtggcctctgcccctgagcccactaggcctccatctggatttgttcccgtatccggcggcggaggaacccatgtaactcaggtgcacattcaattggctccctctccccacaacgggacgccagagcccccccgaacggcaccagaagtgggtagcaatagtcaggatggcgacgccaccccctcgccccctcgcgctcaacccctcgtgcctgtcgctcacattcggccattgccaaccacggttcaggctgcatccccgcttcccgaggagccaccagtacctagaccaccaccgggattccaagcctctgtccctcgcgaggcatctgcaagggtagtcgtgcccatcgctcccacctgtcgatcactggagtctagccctcatagtctagttcctatgggcccggggcgtgagcatctagaggaaccacctatggccggccccgccgcagaggctgagagagtgtcgagtcctgcttgggcctcctctcctactccaccctcagggccccacccttgccccgtgcccaaagtggctccaaaacctaggcttagtggatggacttggctgaaaaagcaactgctggaagaggctcctgagcctccatgtcccgagccacgccaaagcctcgagcccgaggttccaacgccaacagagcaagaagtgcctgcacccacagaacaggaggtgcctgccctgacagcacctcgcgcacctgcttccaggacgtcaagaatgtgggacgcggttctgtaccgcatgtcagtggctgaggcccaaggacggctcgctgggcctagcggaggggagcatacccctgcgtctttaaccaggctccctttcctgtacaggccgaggttcaacgctcggaagcttcaggaagcaactcgacccccgcctaccgtaaggtcaatcctcgagctaagccctcaaccaaagaacttcaatagaactgcgacaggctggcgccttcagtag

SEQ ID NO: 128529 - DNA, 174 bp, Artificial Sequence
  derived and/or modified sequence
atgggcaccgcagtcggtcctcaccacagtcccgccccacacgactcagccctgcccgccagattgttgacctctgactttccttatggacgtagttgccagatcgaacaggtgaaatatagcgtcccggatactggcctgtttcagcactgggaggggagtatccctacctag

SEQ ID NO: 128530 - DNA, 1440 bp, Artificial Sequence
  derived and/or modified sequence
atgctgatctctgctgcctccatggcccctgaggtgtgtggccccagcctgcagggcaccccaggccccccaccacccctgctgcccaagccaggcaaggacaacctgcggctgcagaagctgctgaggaaggccgccaggaagaagatgatgggcggcacccacctggccccaccccgggccttccgcaccagcctgagccctgtgtctgaggccagccatgaccaggaggtgacagcccctcatgctgctgagggcccccaccctgctgaggccccccggctgcctgaggcccccaggcctgctgaggcccccaggatggtggccgccctgcccaggagcccccacacccccatcatccaccacgtggccagccccctgcagaagagcaccttcagcatcggcctgacccagaggcgcatcctggccgcccagttccgggccatgggcccccaggtggtggccagcgcccctgagcccaccaggcctccttctggctttgtgcctgtgtctgggggcggcggcacccacgtgacccaggtgcacatccagctggcccccagcccccacaacggcaccccagagccccccaggacagcccctgaggtgggcagcaacagccaggatggagatgccacccccagccccccccgggcccagcccctggtgcctgtggcccacatccggcccctgcccaccaccgtgcaggccgccagccccctgcctgaggagccccctgtgccccggcccccacctggcttccaggcctctgtgccccgggaggccagcgcccgggtggtggtgcccatcgcccccacctgccgcagcctggagagcagcccccacagcctggtgcccatgggccctggccgggagcacctggaggagccccccatggccggccctgctgctgaggccgagcgggtgagcagccctgcctgggccagcagccccaccccacccagcggcccccacccctgccctgtgcccaaggtggcccccaagccccggctgagcggctggacctggctgaagaagcagctgctggaggaggcccctgagcccccctgcccagagccccggcagagcctggagcctgaggtgcccacccccacagagcaggaggtgcctgcccccacagagcaggaggtgcctgccctgacagccccccgggccccagccagcaggaccagcaggatgtgggatgctgtgctgtacaggatgtctgtggccgaggcccagggccgcctggccggccccagcggcggggagcacaccccagccagcctgacccggctgcccttcctgtaccggccccgcttcaatgccaggaagctgcaggaggccacccggcccccacccaccgtgcgcagcatcctggagctgagcccccagcccaagaacttcaacagaacagccaccggctggaggctgcagtag

SEQ ID NO: 128531 - DNA, 1440 bp, Artificial Sequence
  derived and/or modified sequence
atgctgatcagcgccgccagcatggcccccgaggtgtgcggccccagcctccaggggacacctggaccacccccacccctgctacctaagccaggaaaagacaacctccgtctccagaagctcctcagaaaagccgcacgcaaaaagatgatgggaggcactcacctggctcctccacgggcctttcggacgtcattgtctcctgtttccgaggccagtcatgaccaagaggtgactgcgccacacgctgcagagggaccacatcctgcagaggcacctcggctccccgaggcccccagacctgccgaggccccacgcatggtggccgccttgccgcgttccccccatacacccatcattcaccacgtagcatcccctttgcagaagtctacttttagcattgggctgactcaacgccggattctagccgcgcagttccgcgcaatgggcccccaagtggtggcctcagcacctgaacctacaaggccaccttctggcttcgtgcccgtgtccggtgggggcggaacacacgtgacccaggttcacatccagctggcaccttctcctcacaatgggacgcctgaacctccgcgtaccgcgcccgaggtaggatctaacagccaggacggtgatgcaacgccctcgcccccaagggcacaacctttggttccagttgctcatatccgacccttgcccaccactgtgcaggccgcctccccgttgcccgaggagccaccagtccctaggcccccaccaggcttccaggctagcgttcctagagaggcttcagcccgagtagttgtccctattgcaccgacctgccgaagcttggaatcttctccacattctctggtccccatgggtcctgggagggagcatctagaagaaccgcccatggccggacccgcggccgaggctgaaagagtgagctcacctgcatgggcctctagcccaaccccaccttccggaccgcatccttgccccgtgcctaaggttgctccaaagccaaggcttagtgggtggacatggttaaaaaaacaactgctggaggaagctccagaaccaccctgccccgagcccaggcagtctctggagcctgaggttccaactcccacagagcaggaagtgcccgcccccactgaacaggaggtgcccgcactgactgctccacgggcccctgcctctcggacctcccggatgtgggacgccgtcctctacaggatgagtgtagcggaagcccagggtagactggccggccctagtggaggggagcacacccctgcttcccttactaggctcccattcttgtacaggccgcgattcaatgccagaaagctccaggaagccacccgaccccctcctacagtgcggagcattcttgaactgtcgccacagcccaagaatttcaaccggaccgccacaggctggcggctgcagtag

SEQ ID NO: 128532 - DNA, 387 bp, Artificial Sequence
  derived and/or modified sequence
atgggcaccagcagcatcttcctgtgcgtgctgttcctgtgcggcgccttaggcctaacaatgtctcccgcccgagggcgactccggtgctatatttgtggcttcacaaagccatgccacccagttcctacagagtgccgggacgacgaggcttgcggcatttccattgggacctctgtgaaaaaactcccactgaaaggacccgtaccatcagcccgcctgtgccatctgttagctgccttactccactccgtcgcccccctgttgagggccggcccagtacagcacagcaggttccccaccgccgctcaccagccgcctcggctgccggcccctctgtgcggccagctccgatgggagcgaacccccccacctttagcgtcatag

SEQ ID NO: 128533 - DNA, 1440 bp, Artificial Sequence
  derived and/or modified sequence
atgctgatctccgctgcttccatggcaccggaagtctgcggaccaagcctccagggaacccccggtccacccccacctctcttaccaaagccaggtaaagacaacttgaggctgcagaagttgcttaggaaggcagctagaaagaaaatgatgggtggaactcacctagcgcctccacgggctttccgtacaagcttgagtccagtttccgaggctagtcatgatcaagaggtcaccgctccccacgcagctgaggggcctcatccagccgaggcacctcgcctgcccgaagccccaaggccggctgaggcccctcggatggtcgctgcactgccgaggtcccctcatacgcctatcatacatcatgtggcatcccccttacaaaaaagcacttttagtatcggcctgactcaaagacgcatcttagctgcacagtttcgcgctatgggaccacaggttgtggcctcagcccctgagcccacaagaccacccagcggcttcgtgccggtctctggtggcggaggtacacacgtgacccaggtgcacattcagctggccccatctccacacaacgggacccccgagccacccagaacagctcccgaagtcggtagcaacagtcaggacggagacgcaactccatccccccctcgcgctcagcccttggtgcctgtggcccacattcgtcccctgccaaccactgtccaggctgcttctcctctccctgaggagccacctgttccaagaccccctcctggctttcaggcaagcgtgccgagagaggcgtctgcacgagtcgttgtacctattgcccctacctgtcgcagccttgaaagtagtcctcacagcctggtgcccatgggtcccggtcgcgaacacttggaggagcctcccatggcaggcccagccgcagaggcggaacgagtttcgtcgcctgcctgggccagctctccaaccccaccgagcggcccacatccctgccctgtacctaaggtggcgccaaagccgaggctgagcggttggacatggctgaaaaagcagctgctggaagaggcgccagaaccaccatgtcctgagcctcggcagtctttagagccagaggtgccgacccccacagagcaggaggtcccagctccaactgaacaagaggttccggcactgacggccccaagagcgccagcctccagaacctctcgaatgtgggatgcagtgctataccggatgagtgtagccgaagcccagggcagactcgcaggcccaagtgggggtgaacatactccagcatccctcacacgactgccatttctgtataggccacggttcaacgcacgcaagctccaggaggccacccggcctccccctacagtacggtccatcctcgagctttctccacagcccaaaaacttcaatagaaccgcaacgggatggcgcctgcagtag

SEQ ID NO: 128534 - DNA, 837 bp, Artificial Sequence
  derived and/or modified sequence
ccgacaggtacccagacccctaccccaaccccaatcagcaccaccacaaccgtaacccctacccccacaccaacgggaacacagacccctacaaccacacctataaccaccaccacaactgtgacacccactcctactccgaccgggacgcaaacccccacaaccgttctcatcacaaccacgactactatgacccctacccctactcccacctccaccaagtccacaaccgtgacgccaattacaacaacgacgactgtgacagccacacccactcccaccggtacccagacaccaacgatgattcccatcagcacgactacaaccgtcacaccaacacccacacctaccaccggatctactgggccccccactcatacaagtactgcccccattgccgagctgaccacatccaaccctcctcctgagtcctctactcctcagaccagcaggtcaaccagttctcctctgacggaatcaaccaccctattatctaccctgccacccgccatcgaaatgacgagcaccgcccctcctagcactccgactgcccccaccacaacatccggcggacacactttgagccctccaccctctacaacgacgagcccccctggcacacctacaagaggtactaccaccggcagttcttctgccccaactccctccaccgttcagaccacaaccaccagcgcatggacccctactccaacccctctctctacgccttccatcatcagaaccacaggcctccgtccgtatcctagctcagttctgatctgctgcgtgctgaatgatacttattatgctcctggggaagaagtgtacaacggctag

SEQ ID NO: 128535 - DNA, 5343 bp, Artificial Sequence
  derived and/or modified sequence
atgggattacccctggcgcggctggccgccgtttgcctggctctgtccctggctggagggtcggagctccaaacagaagggcggacacgaaaccacgggcacaacgtctgctccacttggggcaacttccactataaaactttcgacggcgatgtctttcggtttccgggattgtgcgactataatttcgctagcgactgcaggggcagttacaaggagtttgcagtccaccttaagcgaggtcctgggcaagccgaggcccccgcaggagtggagagtatcttattaaccatcaaagatgatacgatttacctcacaagacacctcgctgtgcttaacggcgcagtcgtgtccactccccactactccccaggactcttaattgagaaatcagatgcctacaccaaggtatacagccgcgctgggctgacacttatgtggaatagagaagatgccctgatgctggaactggacactaaattcaggaaccatacctgcggactatgtggggattacaacggactgcagagctacagtgagtttctctccgatggggttctgttttcgcctctcgagtttgggaacatgcagaagattaatcaacccgacgttgtttgcgaggaccctgaagaggaagtcgctccagcgtcttgtagcgaacatagagctgagtgtgaaaggctccttacagcagaagcgttcgccgattgtcaggatctggtgccccttgagccttatctgagagcctgccagcaggatcgttgcaggtgtcctggtggcgatacatgcgtttgtagtacggtggctgagtttagcagacaatgctctcacgctggcggccgccccggaaactggaggacagccacattgtgtcccaaaacctgtcccggaaatttggtctacctcgagtccggtagcccctgcatggacacatgctcccatcttgaagtgtcctctctatgtgaggagcacagaatggacggatgcttttgccctgaagggactgtttacgatgatataggcgattccgggtgtgttcccgtgagccagtgccattgccgcctccatggccacctgtatacccccggccaggaaatcactaatgattgcgagcaatgtgtgtgtaatgccggccggtgggtgtgtaaagaccttccgtgtcccggcacttgcgcattggagggtggttcccacattacaacatttgacggaaagacatatacatttcatggtgattgttactatgtgctggccaagggggatcacaacgacagctatgccctcctgggcgagctggcgccatgtgggagtactgataagcaaacctgtcttaagacggtggtactgcttgcagataaaaaaaagaacgttgttgttttcaaaagtgacggaagcgtgcttctcaacgagttgcaagtgaatctgcctcatgtaacggccagtttcagtgtgtttcgccccagtagctaccacatcatggtcagtatggctatcggcgtgagactccaggtgcaactggcgcccgtgatgcagctgttcgtaacccttgaccaggcctcacagggtcaagtccaaggcctgtgtggcaatttcaacggactggagggggatgacttcaagacagccagtggtcttgtcgaggcgactggcgccggttttgcgaatacttggaaggcgcagtcaagttgtcacgataaacttgactggctggacgatccatgtagcctaaatatcgagtctgctaattacgcagagcactggtgtagcctgttaaagaagactgagaccccgttcggcaggtgtcacagcgcggtcgacccggctgagtactacaaacggtgcaagtacgatacatgcaactgtcagaacaacgaagattgcctgtgcgcagcattgagctcctacgctcgcgcctgcacagccaagggtgtgatgctgtggggctggcgcgagcatgtatgtaacaaagacgttggatcctgtcccaatagtcaggtattcctgtacaatctcactacctgccagcaaacctgccggtcgcttagcgaagccgattcccattgtctggaggggttcgctcctgttgacgggtgtgggtgtcccgatcacacctttttggacgagaaaggtcgctgcgtgccactggccaaatgtagttgctatcaccgaggcctttatctggaggctggagacgtcgtggtgagacaagaagagaggtgcgtctgcagggacggtcgtctgcactgccggcaaatcagactgatcggacagagctgcaccgctcctaaaattcatatggactgttctaatctgaccgccttggccaccagcaaacctcgagccctgtcctgccagactttagccgcgggatattaccatacagagtgcgtctccggttgtgtgtgcccagacggactcatggatgatgggcgaggaggttgtgttgtggagaaagagtgcccttgcgtacataacaatgatttgtactccagcggcgccaaaattaaggtcgattgtaacacatgcacatgcaagagaggccgctgggtctgtacacaagctgtctgtcatggcacttgttctatatacgggtcaggacattacattacgtttgatgggaagtactatgatttcgacgggcactgtagctatgtggctgttcaagattactgcggacagaatagctccctcggatctttcagtatcatcactgagaacgtcccttgcggtactactggagtcacgtgctccaaggcaattaaaattttcatgggcagaacagaactgaagttggaagataagcacagagtagtgattcagcgcgacgagggacatcacgtggcctatacaaccagggaggttgggcagtaccttgtggttgagtctagtactggtataatcgtgatttgggataaaaggacaaccgtttttataaaacttgccccatcctataaaggaacagtgtgtggactgtgcggtaatttcgaccataggagtaataatgatttcactactagagaccatatggtcgtgtcctccgaactcgattttggtaactcctggaaggaggccccgacctgtccagacgtaagtactaacccagaaccgtgcagtctgaatccgcatcgtagaagttgggcagaaaagcaatgctcaatcctgaagtctagcgttttcagcatttgccactccaaagttgatcctaagcccttctatgaggcatgcgttcacgactcatgctcgtgtgacactggaggtgactgtgagtgtttctgctctgctgtggcctcttatgcccaggagtgcaccaaggagggcgcttgcgtattctggcggacacccgacctatgccctatcttttgcgactactataacccccctcatgagtgcgagtggcactacgagccttgcggaaatcgatccttcgaaacctgcagaacgattaatggaatccactccaacattagcgtttcgtacctagaaggatgttatcctaggtgtccaaaggatcggcccatctatgaagaagatttaaaaaaatgcgtaaccgctgacaaatgcggctgttatgtggaggatacccattatcctcctggtgcctcggtgcctactgaggagacctgcaaatcttggtgtacctgcacacagactcacactgcataccatgtacatacccacggcaaaattcttaatcagactcaagacggagcattttgctattgggaaatctgcggacccaacggaacggttgagaagcattttaatatctgtagcatcactacacggccaagcacactgacaaccttcaccactatcaccctccccactacgcccacgacttttaccaccaccactaccaccaccacgcctactagcagcaccgtgttatctactacacccaagctgtgctgtctgtggtctgattggataaacgaagatcaccccagtagcggtagtgatgatggcgaccgtgagacgttcgatggtgtgtgcggagctccagaagatatcgagtgtcgatctgtgaaggacccacatctaagcctcgaacaactggggcagaaagtgcagtgcgacgtgagcgtgggatttatatgcaaaaatgaggaccagttcgggaacggcccatttggattgtgttatgactataagattagagtgaattgctgctggccgatggataaatgcattaccacacccagcccacccacaacaacgccttcgccacctccaacatccacaaccacccttcctcccactaccacgccgtctccacctacaaccacaactactacgcctcctcccactaccacgccaagtcctccgattactaccacaactacgccccctccaaccaccacgcccagcccaccgatatcgactacaacgaccccacctcctactacaactccatcacctcctactactactccatcacccccgaccaccaccccttccccaccaaccacaaccacaactacacctccccccaccactacaccctcacctcccacaacaacacctatcactccgcccgcatccacaaccactctgccaccaaccacaactccgtcgccgcctaccacaactacaaccactccgcctccgactacgacccccattacaactactactaccgtcactcccactcccacccctacggggacacagacccccactaccaccccaattacaaccactactactgttacccccacccctacgcccacaggcacccagactccaacttccactcctataactaccaccacaacaactcccactcccacggctatcaccactactactacggtgacccccactccaacacccaccggcacacagacacccaccaccacaccaatcaccactaccacgacagtgactccaacgcccacacctaccggaacacaatctccaacccccacagctattacaacaaccaccaccgtaactccgactcctactcccactgggacgcagactcctacctccacccccattaccacaaccactaccgtcacccctacccccacacccacggggacacagactccaacaccaacgcccatctcaacgaccacaaccgttacccccacacccaccccaacgggcacacagaccccaacgacgactcccatcaccacaacaactactgtcactcccaccccgacccctacaggtacacagacacccaccactacaccgaccccgacttccaccaaatctaccacggtcacaccaattaccaccactaccaccgttactgccacacccaccccaacaggaactcaaacgcctacaatgatccctatctctacaaccaccactgtgactccgtag

SEQ ID NO: 128536 - DNA, 1230 bp, Artificial Sequence
  derived and/or modified sequence
gacatcgagtgcaggagtgtgaaggacccccatctgtcactggagcaattgggacaaaaagtgcaatgtgatgtctctgttggtttcatttgtaaaaatgaggaccagtttgggaacggaccttttggactgtgctacgactataagattcgagtgaattgttgctgcacccctactcgcggtaccactacagggtccagctccgcacctaccccctccacggtacagactacaacgacctccgcgtggacccccactccgactcctctgtctactccatcaataattcgtacaactgggttgcggccttacccgtctagtgtgttgatttgctgtgttctcaacgacacctactacgcacccggagaggaagtctataacgggacttatggggatacttgttatttcgtgaattgtagcctctcttgcaccctggagttctacaactggtcttgcccctctaccccttctcccactccaaccccttcaaagtcaacacctacgcctagtaaaccttcctcaacaccctctaaacctacccctgggacaaaacctcccgagtgccctgacttcgacccccccagacaggagaatgaaacctggtggctgtgtgactgttttatggcaacgtgcaagtacaacaatacggtagaaatcgtaaaagtggagtgcgagcctcctcccatgcccacgtgctctaatggcttacagcctgtgagagtggaggacccggatgggtgttgctggcattgggagtgcgattgttattgcaccggctggggagatcctcactacgtaacattcgacggcctgtattattcatatcagggaaattgcacctacgtgttggttgaggagatctccccttcagtggataactttggcgtgtacattgacaattatcattgtgacccaaacgacaaggtttcctgtcccaggacccttatcgtgagacacgaaacacaggaggtgcttattaaaaccgttcacatgatgcctatgcaggttcaggtgcaagtgaacaggcaggctgtcgctctcccatataagaagtatggcctggaggtttatcagagtggcataaactatgtggtggacattcctgagcttggcgtgttggtcagttataacggattaagttttagcgtaaggctaccctaccaccgattcggcaacaacacgaaagggcagtgtggaacctgcaccaacaccacaagcgacgattgttag

SEQ ID NO: 128537 - DNA, 8454 bp, Artificial Sequence
  derived and/or modified sequence
atgggccttcctctggccaggttggctgccgtgtgtcttgcactctcactggcagggggctccgagttacagacagagggcagaacccgcaatcacggccacaatgtctgctcgacatgggggaacttccactataaaacatttgatggggatgttttccgctttcctggtctgtgtgactacaattttgcctctgactgccgaggatcgtacaaagagttcgctgtgcacctgaaaagaggacctgggcaggccgaggcccctgccggagtggaatccattctgctcactattaaagatgatacgatatacctcacaaggcacctggccgtgttgaatggcgccgtggtttctactccacattacagcccagggctcttaatcgagaagtctgacgcctacacgaaagtgtatagccgcgctggcctgaccctcatgtggaaccgggaggacgccctcatgctggaactcgataccaagtttcggaatcatacctgtgggttgtgtggcgactataatggtttgcagagctacagtgagtttctgtcggacggtgtgctgtttagccccctagaatttgggaatatgcagaagatcaaccagcccgacgtggtgtgcgaagaccctgaagaggaagtggcgccagcctcctgcagcgagcatagggctgagtgtgaaaggttgctcactgccgaagcattcgccgattgtcaggacttggttcccctggagccttatctgagagcttgccagcaagatagatgcagatgtcccgggggggacacctgtgtgtgcagcacggttgctgaattcagccgccagtgtagtcacgcaggaggcagacctggcaactggcgcactgcaactctgtgtcccaagacatgtccaggcaatttagtgtacctggaatccggttcaccttgcatggacacttgcagtcatctggaagtatctagcttatgcgaagagcatcgcatggatggctgcttttgtcctgaaggcacagtctacgacgatatcggtgattctggttgcgttcccgtttcgcagtgtcattgcaggctgcacggccatctgtatactcctggacaggaaataaccaatgactgcgagcagtgcgtttgtaatgcaggtcgttgggtgtgtaaggatctcccttgtccgggtacatgtgctttggaaggtgggagccacattactacattcgacggtaagacgtacacgtttcacggcgactgttattacgttctggccaaaggagatcataatgattcttacgcgcttctgggcgaattggctccctgcggatctaccgacaagcaaacgtgccttaagaccgtagtgctgctggctgataagaagaagaacgtcgtggtatttaagtctgatggctctgttctgctaaacgagctccaggtaaacctgcctcatgtaacagcttctttctccgtcttccggccatcctcctatcatatcatggtgtccatggcaataggggttagactgcaagttcagctggccccagtgatgcagctgttcgttaccctcgaccaagcctcccaggggcaggtgcaaggcctttgtggcaattttaatggcttggagggggacgacttcaagacagcttccggcctcgtggaggctaccggcgcagggtttgccaatacgtggaaagcacagtcttcctgccacgacaaactggactggctggatgatccctgttccctcaatattgaaagcgcgaactatgccgagcactggtgcagcttgctcaaaaagacagagactcctttcggcagatgccattccgccgtcgaccctgccgagtattacaagcgctgtaaatatgacacttgcaattgccaaaataacgaagactgcctctgcgccgctctgagctcctatgctagggcctgcaccgccaagggggtaatgctctggggctggagggaacacgtctgcaacaaagatgtcggctcgtgcccaaattctcaggtgttcctgtataatctgactacgtgtcaacagacttgccgaagtctaagtgaggcagactcccattgcctggagggtttcgcccccgtggacgggtgtggctgtcccgaccatacgttcctggacgagaagggacggtgcgtcccgctcgccaaatgttcatgttatcacagaggtctgtatctcgaggctggggatgtcgtcgtgagacaggaggaaaggtgcgtttgtagagatggccggcttcactgccgtcagattcggctcatcggccaaagctgtaccgcccctaagatccacatggactgtagcaatctgacagcactggcgacatcgaaaccccgcgctctatcttgtcagactttggctgcaggatactatcacaccgagtgcgtgagtggttgtgtgtgccccgatggtctgatggatgatgggcgcggcgggtgtgtcgtggaaaaggaatgtccatgcgtacacaataacgacctatacagctcaggggccaagatcaaagtcgattgcaatacctgtacttgcaaacgggggaggtgggtatgcacacaggccgtttgccacggcacatgctccatttacggtagtggacactacattacatttgatggcaaatattacgacttcgacggccattgctcatatgtcgcagtgcaggactactgtggccaaaattcttcactgggcagcttttcgattataacagagaacgtgccttgcggaactacaggagtgacatgcagtaaggcaattaaaatatttatgggaagaacagagctgaagctggaggataagcaccgagtggtgatccaacgggatgagggacaccatgttgcttatacgacacgagaggtgggccagtacctcgtggtcgaatcaagtacaggaatcatagtcatttgggataagaggaccaccgtgtttattaaactcgcaccctcttataaaggaactgtttgcggactgtgtggcaattttgatcataggtccaacaatgattttactactagagatcacatggtggtatcgtcagaactagacttcgggaattcatggaaggaggcccccacatgcccagacgtgagcacaaacccagaaccttgctctctgaacccacatcgtcggtcttgggccgaaaagcaatgctcgatactgaaatctagtgtattttccatttgtcacagcaaggtagaccccaaaccgttctacgaggcctgcgtgcacgattcatgctcgtgcgacacaggcggagactgtgaatgtttttgtagcgcggtggcctcatacgcacaggaatgcacaaaagaaggcgcatgtgtcttttggaggacgcctgatctctgtcctattttttgtgattactacaatccaccacacgagtgcgagtggcattatgaaccttgcgggaaccgcagctttgagacatgtaggacaattaatggtatccatagcaatatttccgtcagttatctggaaggttgctacccaaggtgtcccaaagataggcccatctacgaagaagacctgaaaaaatgcgtgactgccgacaagtgtggatgttatgtagaggatacacactacccacccggggcaagtgtgcctactgaggagacatgtaagtcctgtgtctgcaccaatagctcacaggtggtctgtcgacccgaagaaggaaagattctgaaccagacacaggacggcgctttttgttactgggaaatttgtggcccaaatgggactgttgagaagcactttaacatttgcagcatcacaacccgcccatctacactcactacattcacaaccattacacttcctaccacacctacaacattcaccaccacaacaactacaactacccccactagcagtaccgtcctgtccacaaccccaaagctctgttgcctatggagtgactggatcaacgaagatcatccatcaagcggaagcgacgacggtgaccgtgaaacgttcgacggggtctgcggagcccctgaggacattgagtgccgcagcgtaaaggatcctcacctaagcctggaacagctggggcagaaggtccagtgcgacgtttctgtgggattcatctgcaagaatgaggatcagtttggcaacggccccttcggcctgtgctacgattacaagatccgcgtgaattgttgctggcccatggacaagtgcattactactccctcgccacctaccaccacgccaagccctcccccgacctctaccacaactctccctccgactacaacccctagtccccctaccacaacaaccacaactccccccccaacaacaaccccttcacctccaatcacaactaccacaacaccgccaccaacaacaactcctagcccccccataagtactacaaccacacctcctcctacaaccacaccctctccacctacaacaacaccatctccgccaaccactaccccctcaccaccaacgacaactactaccacaccgcccccaacaactacaccgtccccaccaactacaaccccaattacaccacctgccagtaccaccacactgccgccaactactacaccctccccaccaaccaccaccacaacgacacctccaccgacaacaacccccatcactacaaccactacagtgacgcccactcccactcccaccggtactcagactccaacaacgacgcctatcaccactaccacaacagtgactcctacaccaaccccgaccggcacccagacgccaactagtacgcctattacaaccacgaccaccgtcactccgacccccacccccaccgggactcagacccccactaccacacccataacaactaccactacggttacgcccacaccgactcctacaggcacccagactcctacccccactgcgatcacgacaaccactaccgttactccaacccctacccctaccggtacacagactcccactaccactcctatcacaacgactactacagtgaccccgacgcccacccctacaggtacacaatcaccgactcctaccgccatcacaacaaccacaaccgttactccaactcccactcctactgggacacagacaccgaccagtactccgatcacaacgaccacaacagttactccaacgcccacgccaaccggcacccagaccccaactcccacaccgatcagtacaaccacgaccgtgacgcctacaccaactcccacaggaacacaaactcccacgaccacccctatcacaaccaccacaaccgtaaccccaacaccaacccccaccggtactcagaccccgaccacggtactgatcaccacgacaactaccatgactccgaccccaacacccacctcaacaaagtccacgactgttactcccatcaccactacaaccactgttacggcaacaccaacgcccacgggcactcagactccgactatgatccctataagcacaaccactactgtgacccctacgcccacaccgactaccgggagcacgggaccccccacccacacctccacagctcctatcgccgagttaacgacctctaaccctccccctgagagctctaccccccagacctcccgcagcacatcaagtcctctaaccgaatctactactttactctcgactttgcctcctgctattgagatgaccagtacagcgccgccttccacacccaccgctccaactacaacctcgggtgggcatacgctctccccgcccccctccacaactacatctcctccagggacaccaacaaggggcaccaccacaggttcaagctccgcccctaccccaagcacagtccaaactacgacgactagcgcctggacccctacccctactcccctgtccaccccctccatcatccgtacaactgggttacggccctatccatcaagcgtattgatatgttgcgtactaaatgacacctactatgcgcccggcgaggaagtgtacaatggcacttacggtgacacctgttattttgttaactgtagcctgagctgcacgctcgagttctacaactggagttgtccctccacacccagccctacacctacacccagtaagagtacccctacgccttcaaagccaagctctaccccttccaagcctaccccaggtaccaaacctcccgaatgcccggacttcgatcctcctcggcaagagaacgaaacatggtggctgtgtgattgtttcatggccacatgcaagtacaataatactgttgaaatcgtcaaggtggaatgcgagcccccccccatgccaacgtgctctaatggtcttcaacctgttcgagtggaggaccccgacggatgctgctggcattgggagtgcgattgctactgtaccgggtggggtgacccacattacgtgacatttgatggcttgtattattcctatcagggcaattgtacttacgtgctggtagaggagatcagtccctcggtggacaacttcggagtgtatattgacaactaccactgtgatccaaacgacaaagtcagttgtccacggacccttattgtccgtcacgagacccaggaggtgctaatcaagactgtccacatgatgccgatgcaggtgcaggtccaggtgaaccgtcaagccgtggccttgccctacaagaagtacggcctcgaagtctaccagtcagggattaactacgtggtagatattccagagttgggagtcctcgtttcatacaacgggctgagcttctccgtgcggctgccatatcatcgcttcggaaataacacaaaggggcagtgcggcacatgtactaacaccacaagcgacgattgtatcctaccatcaggcgagatcgtgagcaactgtgaggccgcagccgatcaatggctagtaaatgaccctagcaagcctcattgccctcatagctcctctactaccaagcgtcctgccgtcactgtgcccgggggtggcaagacaactccccacaaagattgtactccctctccactgtgccaattgattaaggattctctcttcgcccagtgccatgccctggtgcccccacagcattactatgatgcgtgtgtgtttgactcttgcttcatgccagggtcctccctagagtgcgcaagtttgcaagcatatgccgccctctgtgcacagcaaaacatttgtctcgactggcgcaaccatacgcacggggcctgcctggttgagtgtccctcgcatcgtgagtaccaggcttgtggtcccgctgaagaacctacctgcaaatcatctagtagccagcagaataacactgttcttgtggaagggtgcttctgccctgaaggcaccatgaattatgcaccaggtttcgacgtgtgcgttaagacctgtgggtgcgtgggccctgacaatgtgcctcgggagttcggggagcacttcgagtttgattgcaagaattgtgtgtgtttggagggcgggtctgggataatctgccaacctaaacgctgctcccagaaacctgtgactcattgcgtggaggacggaacctacctggcaaccgaagttaaccccgccgacacctgttgcaacatcacagtgtgtaagtgtaacacaagtttgtgcaaggagaagccaagtgtttgtcccctgggatttgaggtaaagtcaaaaatggttccagggcgatgttgcccgttttattggtgcgaaagtaagggcgtgtgcgtccatggaaacgccgaataccaaccaggttctcctgtgtattcgagcaaatgccaggattgcgtttgtaccgacaaggtggacaacaataccctcctcaacgtgatcgcctgcacacacgttccatgcaacactagctgtagcccagggttcgaactgatggaggcccccggagagtgttgtaagaagtgtgagcagacacactgtatcattaaaagaccagataaccaacacgtgatactgaagccaggcgactttaaatcagatcccaaaaataattgtaccttcttttcatgtgtgaagatccacaaccaactgatatcttccgtttctaatatcacctgcccaaatttcgacgctagtatctgtattcctggctcaatcacatttatgcccaatggttgctgtaagacctgcactccccgaaatgagacccgcgtcccctgtagtacggttccagtcaccaccgaggtcagctatgccgggtgtacaaagaccgtgctgatgaaccattgctcgggtagctgcggcacctttgtgatgtatagcgctaaggcacaggcgctcgaccactcttgttcatgttgcaaagaagaaaaaactagccagcgagaagttgtcctttcctgccctaacggtggatctctaacgcatacctacacccatatcgagtcatgccaatgccaggatacagtttgcggcctcccaaccgggacttcacggagggcgcgtcgttccccccgacatcttggtagtggctag

SEQ ID NO: 128538 - DNA, 807 bp, Artificial Sequence
  derived and/or modified sequence
atggacaccagggtgggcacagccatggccagcccccccagcatgttccccagcagcctgaagagctcctggaccaagaccaagagggtgagaagaagctttggagcagaagatgaatgtggcctgcggggagctgagcggggcacagctgaggcccacgccgagcacgagcagagggcccgggccagcggggccggggccggggccggcggcgcagaagatgctggagctgctgctgctgcccctggccgggcccctggggcccaccggcagctgcggctgacagctggggccggccacggcagaaatgcccacgccggccacagcggcctgctgcacggccctgccagccgcagccaccgggcccggcccaggcctgcccgggaggcccaccggccccaccagggcaaccctggccctggccggcagagggcccctgtgcgcagcggccgggcccatgatgctgaggagaagctgtgggcccggccctgccacaccccaccccggggccgggaggccggcggccccccaggccctggccccatcctgcacctgggcggcagcagcccccccaagatcaagttcctgcagcaccccttctccttccagagcccccagcccccagagcccgggaagagcacccgggacacccccaggaggaccagccagccccgggtgcccctgctgggcggccagacccgctacacaggcagccctggccacccccaggacaccggccagaccaagcccacccccagcacccggcaggacccccccaactacagcctgcggggagctgtgccctag

SEQ ID NO: 128539 - DNA, 837 bp, Artificial Sequence
  derived and/or modified sequence
cccaccggcacccagacccccacccccacccccatcagcaccaccaccaccgtgacccccacccccacccccaccggcacccagacccccaccaccacccccatcaccaccaccaccaccgtgacccccacccccacccccaccggcacccagacccccaccaccgtgctgatcaccaccaccaccaccatgacccccacccccacccccaccagcaccaagagcaccaccgtgacccccatcaccaccaccaccaccgtgacagccacccccacccccaccggcacccagacccccaccatgatccccatcagcaccaccaccaccgtgacccccacccccacccccaccaccggcagcactggaccacccacccacaccagcacagcccccatcgccgagctgaccaccagcaaccccccacctgagagcagcaccccccagaccagccgcagcaccagcagccccctgacagagagcaccaccctgctgagcaccctgcccccagccatcgagatgaccagcacagccccacccagcacccccacagcccccaccaccaccagcggcggccacaccctgagccccccacccagcaccaccaccagccccccaggcacccccacccggggcaccaccaccggcagcagcagcgcccccacccccagcacagtgcagaccaccaccaccagcgcctggacccccacccccacccccctgagcacccccagcatcatccgcaccaccggcctgcggccctaccccagctctgtgctgatctgctgcgtgctgaatgacacctactatgcccctggagaggaggtgtacaatggatag

SEQ ID NO: 128540 - DNA, 5343 bp, Artificial Sequence
  derived and/or modified sequence
atgggcctgcccctggcccggctggccgctgtgtgcctggccctgagcctggccggcggcagcgagctgcagacagagggccgcaccaggaaccacggccacaacgtgtgcagcacctggggcaacttccactacaagacctttgatggagatgtgttccgcttccctggcctgtgtgactacaactttgccagtgactgccggggcagctacaaggagtttgctgtgcacctgaagaggggccctggccaggccgaggccccagctggggtggagagcatcctgctgaccatcaaggatgacaccatctacctgaccaggcacctggccgtgctgaatggagctgtggtgtccaccccccactacagccctggcctgctgattgagaagagtgatgcctacaccaaggtgtacagcagagctggcctgaccctgatgtggaaccgggaggatgccctgatgctggagctggacaccaagttcaggaaccacacctgtggcctgtgtggggactacaacggcctgcagagctacagcgagttcctgagtgatggagtgctcttcagccccctggagtttggaaacatgcagaagatcaaccagccagatgtggtgtgtgaagatcctgaggaggaggtggccccagccagctgcagcgagcacagagcagaatgtgagcggctgctgacagctgaggcctttgctgactgccaggacctggtgcccctggagccctacctgcgggcctgccagcaggaccgctgccgctgccctggaggagacacctgtgtgtgcagcacagtggccgagttcagccggcagtgcagccacgccggcggccggcccggcaactggaggacagccaccctgtgccccaagacctgccccggcaacctggtgtacctggagagcggcagcccctgcatggacacctgcagccacctggaggtgagcagcctgtgtgaggagcacaggatggatggctgcttctgcccagagggcaccgtgtatgatgacatcggggacagcggctgtgtgcctgtgtcccagtgccactgccgcctgcacggccacctgtacaccccaggccaggagatcaccaatgactgtgagcagtgtgtgtgcaatgccggccgctgggtgtgcaaggacctgccctgccccggcacctgtgccctggagggcggcagccacatcaccacctttgatggcaagacctacaccttccacggggactgctactacgtgctggccaagggggaccacaatgacagctatgccctgctgggggagctggccccctgtggcagcacagacaagcagacctgcctgaagacagtggtgctgctggccgacaagaagaagaatgtggtggtgttcaagagtgatggctctgtgctgctgaatgagctgcaggtgaacctgccccacgtgacagccagcttctctgtgttccggcccagcagctaccacatcatggtgtccatggccatcggcgtgcggctgcaggtgcagctggcccctgtgatgcagctgtttgtgaccctggaccaggccagccagggccaggtgcagggcctgtgtggcaacttcaacggcctggagggagatgacttcaagacagccagcggcctggtggaggccactggagctggctttgccaacacctggaaggcccagagcagctgccacgacaagctggactggctggatgacccctgcagcctgaacatcgagagcgccaactatgcagagcactggtgcagcctgctgaagaagacagagacccccttcggccgctgccacagcgctgtggaccctgctgagtactacaagcgctgcaagtatgacacctgcaactgccagaacaatgaagactgcctgtgtgccgccctgagcagctatgcccgggcctgcacagccaagggcgtgatgctgtggggctggagggagcacgtgtgcaacaaggatgtgggcagctgccccaacagccaggtgttcctgtacaacctgaccacctgccagcagacctgccgcagcctgtctgaggccgacagccactgcctggagggctttgcccctgtggatggctgcggctgcccagaccacaccttcctggatgagaagggccgctgtgtgcccctggccaagtgcagctgctaccaccggggcctgtacctggaggccggagatgtggtggtgcggcaggaggagcgctgtgtgtgcagagatggccgcctgcactgccggcagatccggctgattggccagagctgcacagcccccaagatccacatggactgcagcaacctgacagccctggccaccagcaagccccgggccctgagctgccagaccctggccgccggctactaccacacagaatgtgtgtctggctgtgtgtgcccagatggcctgatggatgatggccggggcggctgtgtggtggagaaggaatgtccctgtgtgcacaacaatgacctgtacagcagcggggccaagatcaaggtggactgcaacacctgcacctgcaagaggggccgctgggtgtgcacccaggccgtgtgccacggcacctgcagcatctacggcagcggccactacatcacctttgatggcaagtactatgactttgatggccactgcagctatgtggccgtgcaggactactgcggccagaacagcagcctgggcagcttcagcatcatcacagaaaatgtgccctgtggcaccaccggggtgacctgcagcaaggccatcaagatcttcatgggccgcacagagctgaagctggaggacaagcaccgggtggtgatccagagagatgagggccaccacgtggcctacaccacccgggaggtgggccagtacctggtggtggagagcagcacaggcatcatcgtcatctgggacaagaggaccaccgtcttcatcaagctggcccccagctacaagggcaccgtgtgtggcctgtgtggcaactttgaccacaggagcaacaatgacttcaccacccgggaccacatggtggtgtcctctgagctggactttggaaacagctggaaggaggcccccacctgcccagatgtgtccaccaaccctgagccctgcagcctgaacccccacagaagatcctgggccgagaagcagtgcagcatcctgaagagctctgtgttcagcatctgccacagcaaggtggaccccaagcccttctatgaggcctgtgtgcatgacagctgcagctgtgacaccggcggggactgtgagtgcttctgcagcgctgtggccagctatgcccaggagtgcaccaaggagggcgcctgtgtgttctggaggaccccagacctgtgccccatcttctgtgactactacaacccccctcatgaatgtgagtggcactatgagccctgtggcaacagaagctttgagacctgcaggaccatcaatggcatccacagcaacatctctgtgtcctacctggagggctgctacccccgctgccccaaggaccggcccatctatgaggaggacctgaagaagtgtgtgacagctgacaagtgtggctgctacgtggaggacacccactacccacctggggcctctgtgcccacagaggagacctgcaagtcctggtgcacctgcacccagacccacacagcctaccacgtgcacacccacggcaagatcctgaaccagacccaggatggagccttctgctactgggagatctgtggccccaatggaacagtggagaagcacttcaacatctgcagcatcaccacccggcccagcaccctgaccaccttcaccaccatcaccctgcccaccacccccaccaccttcaccaccaccaccaccaccaccacccccaccagcagcacagtgctgagcaccacccccaagctgtgctgcctgtggagcgactggatcaatgaagaccaccccagcagcggcagtgatgatggagaccgggagacctttgatggagtgtgtggggccccagaagatattgagtgccgctctgtgaaggacccccacctgagcctggagcagctgggccagaaggtgcagtgtgatgtgtctgtgggcttcatctgcaagaatgaagaccagtttggaaatggccccttcggcctgtgctatgactacaagatccgggtgaactgctgctggcccatggacaagtgcatcaccacccccagcccccccaccaccacccccagccccccacccaccagcaccaccaccctgccccccaccaccacccccagcccccccaccaccaccaccaccaccccaccacccaccaccacccccagcccccccatcaccaccaccaccaccccaccacccaccaccacccccagcccccccatcagcaccaccaccaccccaccacccaccaccacccccagcccccccaccaccacccccagcccccccaccaccacccccagcccccccaccaccaccaccaccaccccaccacccaccaccacccccagcccccccaccaccacccccatcaccccaccagccagcaccaccaccctgccccccaccaccacccccagcccccccaccaccaccaccaccaccccaccacccaccaccacccccatcaccaccaccaccaccgtgacccccacccccacccccaccggcacccagacccccaccaccacccccatcaccaccaccaccaccgtgacccccacccccacccccaccggcacccagacccccaccagcacccccatcaccaccaccaccaccacccccacccccacagccatcaccaccaccaccaccgtgacccccacccccacccccaccggcacccagacccccaccaccacccccatcaccaccaccaccaccgtgacccccacccccacccccaccggcacccagagccccacccccacagccatcaccaccaccaccaccgtgacccccacccccacccccaccggcacccagacccccaccagcacccccatcaccaccaccaccaccgtgacccccacccccacccccaccggcacccagacccccacccccacccccatcagcaccaccaccaccgtgacccccacccccacccccaccggcacccagacccccaccaccacccccatcaccaccaccaccaccgtgacccccacccccacccccaccggcacccagacccccaccaccacccccacccccaccagcaccaagagcaccaccgtgacccccatcaccaccaccaccaccgtgacagccacccccacccccaccggcacccagacccccaccatgatccccatcagcaccaccaccaccgtgaccccctag

SEQ ID NO: 128541 - DNA, 1230 bp, Artificial Sequence
  derived and/or modified sequence
gacattgaatgtagatctgtgaaggacccccacctgagcctggagcagctgggccagaaggtgcagtgtgatgtgtctgtgggcttcatctgcaagaatgaagaccagtttggaaatggccccttcggcctgtgctatgactacaagatccgggtgaactgctgctgcacccccacccggggcaccaccaccggcagcagcagcgcccccacccccagcacagtgcagaccaccaccaccagcgcctggacccccacccccacccccctgagcacccccagcatcatccgcaccaccggcctgcggccctaccccagctctgtgctgatctgctgcgtgctgaatgacacctactatgcccctggagaggaggtgtacaacggcacctacggggacacctgctactttgtgaactgcagcctgagctgcaccctggagttctacaactggagctgccccagcacccccagccccacccccacccccagcaagagcacccccacccccagcaagcccagcagcacccccagcaagcccaccccaggcaccaagcccccagaatgtcctgactttgatcctccccggcaggagaatgagacctggtggctgtgtgactgcttcatggccacctgcaagtacaacaacacagtggagatcgtgaaggtggagtgtgagcccccacccatgcccacctgcagcaatggcctgcagcctgtgcgggtggaggaccctgatggctgctgctggcactgggagtgtgactgctactgcaccggctggggagacccccactacgtgacctttgatggcctgtactacagctaccagggcaactgcacctacgtgctggtggaggagatcagccccagcgtggacaactttggagtgtacatcgacaactaccactgtgaccccaatgacaaggtgtcctgccccaggaccctcatcgtgagacatgagacccaggaggtgctgatcaagacagtgcacatgatgcccatgcaggtgcaggtgcaggtgaaccggcaggccgtggccctgccctacaagaagtatggcctggaggtgtaccagagcggcatcaactacgtggtggacatccctgagctgggcgtgctggtgtcctacaacggcctgtccttctctgtgcggctgccctaccaccgcttcggcaacaacaccaagggccagtgtggcacctgcaccaacaccaccagtgatgactgctag

SEQ ID NO: 128542 - DNA, 8454 bp, Artificial Sequence
  derived and/or modified sequence
atgggcctgcccctggcccggctggccgctgtgtgcctggccctgagcctggccggcggcagcgagctgcagacagagggccgcaccaggaaccacggccacaacgtgtgcagcacctggggcaacttccactacaagacctttgatggagatgtgttccgcttccctggcctgtgtgactacaactttgccagtgactgccggggcagctacaaggagtttgctgtgcacctgaagaggggccctggccaggccgaggccccagctggggtggagagcatcctgctgaccatcaaggatgacaccatctacctgaccaggcacctggccgtgctgaatggagctgtggtgtccaccccccactacagccctggcctgctgattgagaagagtgatgcctacaccaaggtgtacagcagagctggcctgaccctgatgtggaaccgggaggatgccctgatgctggagctggacaccaagttcaggaaccacacctgtggcctgtgtggggactacaacggcctgcagagctacagcgagttcctgagtgatggagtgctcttcagccccctggagtttggaaacatgcagaagatcaaccagccagatgtggtgtgtgaagatcctgaggaggaggtggccccagccagctgcagcgagcacagagcagaatgtgagcggctgctgacagctgaggcctttgctgactgccaggacctggtgcccctggagccctacctgcgggcctgccagcaggaccgctgccgctgccctggaggagacacctgtgtgtgcagcacagtggccgagttcagccggcagtgcagccacgccggcggccggcccggcaactggaggacagccaccctgtgccccaagacctgccccggcaacctggtgtacctggagagcggcagcccctgcatggacacctgcagccacctggaggtgagcagcctgtgtgaggagcacaggatggatggctgcttctgcccagagggcaccgtgtatgatgacatcggggacagcggctgtgtgcctgtgtcccagtgccactgccgcctgcacggccacctgtacaccccaggccaggagatcaccaatgactgtgagcagtgtgtgtgcaatgccggccgctgggtgtgcaaggacctgccctgccccggcacctgtgccctggagggcggcagccacatcaccacctttgatggcaagacctacaccttccacggggactgctactacgtgctggccaagggggaccacaatgacagctatgccctgctgggggagctggccccctgtggcagcacagacaagcagacctgcctgaagacagtggtgctgctggccgacaagaagaagaatgtggtggtgttcaagagtgatggctctgtgctgctgaatgagctgcaggtgaacctgccccacgtgacagccagcttctctgtgttccggcccagcagctaccacatcatggtgtccatggccatcggcgtgcggctgcaggtgcagctggcccctgtgatgcagctgtttgtgaccctggaccaggccagccagggccaggtgcagggcctgtgtggcaacttcaacggcctggagggagatgacttcaagacagccagcggcctggtggaggccactggagctggctttgccaacacctggaaggcccagagcagctgccacgacaagctggactggctggatgacccctgcagcctgaacatcgagagcgccaactatgcagagcactggtgcagcctgctgaagaagacagagacccccttcggccgctgccacagcgctgtggaccctgctgagtactacaagcgctgcaagtatgacacctgcaactgccagaacaatgaagactgcctgtgtgccgccctgagcagctatgcccgggcctgcacagccaagggcgtgatgctgtggggctggagggagcacgtgtgcaacaaggatgtgggcagctgccccaacagccaggtgttcctgtacaacctgaccacctgccagcagacctgccgcagcctgtctgaggccgacagccactgcctggagggctttgcccctgtggatggctgcggctgcccagaccacaccttcctggatgagaagggccgctgtgtgcccctggccaagtgcagctgctaccaccggggcctgtacctggaggccggagatgtggtggtgcggcaggaggagcgctgtgtgtgcagagatggccgcctgcactgccggcagatccggctgattggccagagctgcacagcccccaagatccacatggactgcagcaacctgacagccctggccaccagcaagccccgggccctgagctgccagaccctggccgccggctactaccacacagaatgtgtgtctggctgtgtgtgcccagatggcctgatggatgatggccggggcggctgtgtggtggagaaggaatgtccctgtgtgcacaacaatgacctgtacagcagcggggccaagatcaaggtggactgcaacacctgcacctgcaagaggggccgctgggtgtgcacccaggccgtgtgccacggcacctgcagcatctacggcagcggccactacatcacctttgatggcaagtactatgactttgatggccactgcagctatgtggccgtgcaggactactgcggccagaacagcagcctgggcagcttcagcatcatcacagaaaatgtgccctgtggcaccaccggggtgacctgcagcaaggccatcaagatcttcatgggccgcacagagctgaagctggaggacaagcaccgggtggtgatccagagagatgagggccaccacgtggcctacaccacccgggaggtgggccagtacctggtggtggagagcagcacaggcatcatcgtcatctgggacaagaggaccaccgtcttcatcaagctggcccccagctacaagggcaccgtgtgtggcctgtgtggcaactttgaccacaggagcaacaatgacttcaccacccgggaccacatggtggtgtcctctgagctggactttggaaacagctggaaggaggcccccacctgcccagatgtgtccaccaaccctgagccctgcagcctgaacccccacagaagatcctgggccgagaagcagtgcagcatcctgaagagctctgtgttcagcatctgccacagcaaggtggaccccaagcccttctatgaggcctgtgtgcatgacagctgcagctgtgacaccggcggggactgtgagtgcttctgcagcgctgtggccagctatgcccaggagtgcaccaaggagggcgcctgtgtgttctggaggaccccagacctgtgccccatcttctgtgactactacaacccccctcatgaatgtgagtggcactatgagccctgtggcaacagaagctttgagacctgcaggaccatcaatggcatccacagcaacatctctgtgtcctacctggagggctgctacccccgctgccccaaggaccggcccatctatgaggaggacctgaagaagtgtgtgacagctgacaagtgtggctgctacgtggaggacacccactacccacctggggcctctgtgcccacagaggagacctgcaagagctgtgtgtgcaccaacagcagccaggtggtgtgcaggcctgaggagggcaagatcctgaaccagacccaggatggagccttctgctactgggagatctgtggccccaacggcaccgtggagaagcacttcaacatctgcagcatcaccacccggcccagcaccctgaccaccttcaccaccatcaccctgcccaccacccccaccaccttcaccaccaccaccaccaccaccacccccaccagcagcacagtgctgagcaccacccccaagctgtgctgcctgtggagcgactggatcaatgaagaccaccccagcagcggcagtgatgatggagaccgggagacctttgatggagtgtgtggggcccctgaggacattgaatgtagatctgtgaaggacccccacctgagcctggagcagctgggccagaaggtgcagtgtgatgtgtctgtgggcttcatctgcaagaatgaagaccagtttggaaatggccccttcggcctgtgctatgactacaagatccgggtgaactgctgctggcccatggacaagtgcatcaccacccccagcccccccaccaccacccccagccccccacccaccagcaccaccaccctgccccccaccaccacccccagcccccccaccaccaccaccaccaccccaccacccaccaccacccccagcccccccatcaccaccaccaccaccccaccacccaccaccacccccagcccccccatcagcaccaccaccaccccaccacccaccaccacccccagcccccccaccaccacccccagcccccccaccaccacccccagcccccccaccaccaccaccaccaccccaccacccaccaccacccccagcccccccaccaccacccccatcaccccaccagccagcaccaccaccctgccccccaccaccacccccagcccccccaccaccaccaccaccaccccaccacccaccaccacccccatcaccaccaccaccaccgtgacccccacccccacccccaccggcacccagacccccaccaccacccccatcaccaccaccaccaccgtgacccccacccccacccccaccggcacccagacccccaccagcacccccatcaccaccaccaccaccgtgacccccacccccacccccaccggcacccagacccccaccaccacccccatcaccaccaccaccaccgtgacccccacccccacccccaccggcacccagacccccacccccacagccatcaccaccaccaccaccgtgacccccacccccacccccaccggcacccagacccccaccaccacccccatcaccaccaccaccaccgtgacccccacccccacccccaccggcacccagagccccacccccacagccatcaccaccaccaccaccgtgacccccacccccacccccaccggcacccagacccccaccagcacccccatcaccaccaccaccaccgtgacccccacccccacccccaccggcacccagacccccacccccacccccatcagcaccaccaccaccgtgacccccacccccacccccaccggcacccagacccccaccaccacccccatcaccaccaccaccaccgtgacccccacccccacccccaccggcacccagacccccaccaccgtgctgatcaccaccaccaccaccatgacccccacccccacccccaccagcaccaagagcaccaccgtgacccccatcaccaccaccaccaccgtgacagccacccccacccccaccggcacccagacccccaccatgatccccatcagcaccaccaccaccgtgacccccacccccacccccaccaccggcagcactggaccacccacccacaccagcacagcccccatcgccgagctgaccaccagcaaccccccacctgagagcagcaccccccagaccagccgcagcaccagcagccccctgacagagagcaccaccctgctgagcaccctgcccccagccatcgagatgaccagcacagccccacccagcacccccacagcccccaccaccaccagcggcggccacaccctgagccccccacccagcaccaccaccagccccccaggcacccccacccggggcaccaccaccggcagcagcagcgcccccacccccagcacagtgcagaccaccaccaccagcgcctggacccccacccccacccccctgagcacccccagcatcatccgcaccaccggcctgcggccctaccccagctctgtgctgatctgctgcgtgctgaatgacacctactatgcccctggagaggaggtgtacaacggcacctacggggacacctgctactttgtgaactgcagcctgagctgcaccctggagttctacaactggagctgccccagcacccccagccccacccccacccccagcaagagcacccccacccccagcaagcccagcagcacccccagcaagcccaccccaggcaccaagcccccagaatgtcctgactttgatcctccccggcaggagaatgagacctggtggctgtgtgactgcttcatggccacctgcaagtacaacaacacagtggagatcgtgaaggtggagtgtgagcccccacccatgcccacctgcagcaatggcctgcagcctgtgcgggtggaggaccctgatggctgctgctggcactgggagtgtgactgctactgcaccggctggggagacccccactacgtgacctttgatggcctgtactacagctaccagggcaactgcacctacgtgctggtggaggagatcagccccagcgtggacaactttggagtgtacatcgacaactaccactgtgaccccaatgacaaggtgtcctgccccaggaccctcatcgtgagacatgagacccaggaggtgctgatcaagacagtgcacatgatgcccatgcaggtgcaggtgcaggtgaaccggcaggccgtggccctgccctacaagaagtatggcctggaggtgtaccagagcggcatcaactacgtggtggacatccctgagctgggcgtgctggtgtcctacaacggcctgtccttctctgtgcggctgccctaccaccgcttcggcaacaacaccaagggccagtgtggcacctgcaccaacaccaccagtgatgactgcatcctgcccagcggggagatcgtgagcaactgtgaggccgctgctgaccagtggctggtgaatgaccccagcaagccccactgcccccacagcagcagcaccaccaagaggcctgctgtgacagtgcctgggggcggcaagaccaccccccacaaggactgcacccccagccccctgtgccagctgatcaaggacagcctgtttgcccagtgccacgccctggtgcccccccagcactactatgatgcctgtgtgtttgacagctgcttcatgcctggcagcagcctggagtgtgccagcctgcaggcctatgctgccctgtgtgcccagcagaacatctgcctggactggaggaaccacacccatggagcctgcctggtggagtgccccagccaccgggagtaccaggcctgtggccctgctgaggagcccacctgcaagagcagcagcagccagcagaacaacacagtgctggtggagggctgcttctgcccagagggcaccatgaactatgcccctggctttgatgtgtgtgtgaagacctgtggctgtgtgggccctgacaacgtgccccgggagtttggagagcactttgaatttgactgcaagaactgtgtgtgcctggagggcggcagcggcatcatctgccagcccaagcgctgcagccagaagcctgtgacccactgtgtggaggatggcacctacctggccacagaggtgaacccagctgacacctgctgcaacatcaccgtgtgcaagtgcaacaccagcctgtgcaaggagaagcccagcgtgtgccccctgggctttgaggtgaagagcaagatggtgcccggccgctgctgccccttctactggtgtgagagcaaaggagtgtgtgtgcacggcaatgctgagtaccagcccggcagccctgtgtacagcagcaagtgccaggactgtgtgtgcacagacaaggtggacaacaacaccctgctgaatgtcatcgcctgcacccacgtgccctgcaacaccagctgcagccctggctttgagctgatggaggcccctggagagtgctgcaagaagtgtgagcagacccactgcatcatcaagaggccagacaaccagcacgtgatcctgaagccaggggacttcaagagtgaccccaagaacaactgcaccttcttcagctgtgtgaagatccacaaccagctgatcagctctgtgagcaacatcacctgccccaactttgatgccagcatctgcatccctggcagcatcaccttcatgcccaacggctgctgcaagacctgcaccccaagaaatgagaccagggtgccctgcagcacagtgcctgtgaccacagaggtgtcctatgccggctgcaccaagacagtgctgatgaaccactgcagcggcagctgtggcacctttgtgatgtacagcgccaaggcccaggccctggaccacagctgcagctgctgcaaggaggagaagaccagccagcgggaggtggtgctgagctgccccaacggcggcagcctgacccacacctacacccacatcgagagctgccagtgccaggacacagtgtgtggcctgcccaccggcaccagcagaagagcccggcgcagccccaggcacctgggcagcggctag

SEQ ID NO: 128543 - DNA, 1243 bp, Artificial Sequence
  derived and/or modified sequence
cccaccggcacacagaccccaaccccgacacccatctccaccaccactacggtgaccccaaccccaacacccaccggcacacagaccccaaccacgacacccatcaccaccaccaccacggtgaccccaaccccgacacccaccggcacacagaccccaaccacggtactcatcaccaccaccactacgatgaccccaaccccaacacccaccagcacaaagagtacaaccgtgacacccatcaccaccacaactacggtgaccgcaaccccaacacccaccggcacacagaccccaaccatgatacccatcagcaccaccactacggtgaccccaaccccaacacccaccactggaagcacggggccccccacccacacaagcacagcacccattgctgagttgaccacatccaatcctccgcctgagtcctcaacccctcagacctctcggtccacctcttcccctctcacggagtcaaccacccttctgagtaccctaccacctgccattgagatgaccagcacggccccaccctccacacccacggcacccacgaccacgagcggaggccacacactgtctccaccgcccagcaccaccacgtcccctccaggcacccccactcgcggtaccacgaccgggtcatcttcagcccccacccccagcactgtgcagacgaccaccaccagtgcctggaccccaacgccgaccccactctccacacccagcatcatcaggaccacaggcctgaggccctacccttcctctgtgcttatctgctgtgtcctgaacgacacctactacgcaccaggtgaggaggtgtacaacggcacatacggagacacctgttatttcgtcaactgctcactgagctgtacgttggagttctataactggtcctgcccatccacgccctccccaacacccacgccctccaagtcgacgcccacgccttccaagccatcgtccacgccctccaagccgacgcccggcaccaagccccccgagtgcccagactttgatcctcccagacaggagaacgagacttggtggctgtgcgactgcttcatggccacgtgcaagtacaacaacacggtggagatcgtgaaggtggagtgtgagccgccgcccatgcccacctgctccaacggcctccaacccgtgcgcgtcgaggaccccgacggctgctgctggcactgggagtgcgactgctactgcacgggctggggcgacccgcact

SEQ ID NO: 128544 - DNA, 5340 bp, Artificial Sequence
  derived and/or modified sequence
atggggctgccactagcccgcctggcggctgtgtgcctggccctgtctttggcagggggctcggagctccagacagagggcagaacccgaaaccacggccacaacgtctgcagcacctggggcaacttccactacaagaccttcgacggggacgtcttccgcttccccggcctctgcgactacaacttcgcctccgactgccgaggctcctacaaggaatttgctgtgcacctgaagcggggtccgggccaggctgaggcccccgccggggtggagtccatcctgctgaccatcaaggatgacaccatctacctcacccgccacctggctgtgcttaacggggccgtggtcagcaccccgcactacagccccgggctgctcattgagaagagcgatgcctacaccaaagtctactcccgcgccggcctcaccctcatgtggaaccgggaggatgcactcatgctggagctggacactaagttccggaaccacacctgtggcctctgcggggactacaacggcctgcagagctattcagaattcctctctgacggcgtgctcttcagtcccctggagtttgggaacatgcagaagatcaaccagcccgatgtggtgtgtgaggatcccgaggaggaggtggcccccgcatcctgctccgagcaccgcgccgagtgtgagaggctgctgaccgccgaggccttcgcggactgtcaggacctggtgccgctggagccgtatctgcgcgcctgccagcaggaccgctgccggtgcccgggcggtgacacctgcgtctgcagcaccgtggccgagttctcccgccagtgctcccacgccggcggccggcccgggaactggaggaccgccacgctctgccccaagacctgccccgggaacctggtgtacctggagagcggctcgccctgcatggacacctgctcacacctggaggtgagcagcctgtgcgaggagcaccgcatggacggctgtttctgcccagaaggcaccgtatatgacgacatcggggacagtggctgcgttcctgtgagccagtgccactgcaggctgcacggacacctgtacacaccgggccaggagatcaccaatgactgcgagcagtgtgtctgtaacgctggccgctgggtgtgcaaagacctgccctgccccggcacctgtgccctggaaggcggctcccacatcaccaccttcgatgggaagacgtacaccttccacggggactgctactatgtcctggccaagggtgaccacaacgattcctacgctctcctgggcgagctggccccctgtggctccacagacaagcagacctgcctgaagacggtggtgctgctggctgacaagaagaagaatgtggtggtcttcaagtccgatggcagtgtactgctcaacgagctgcaggtgaacctgccccacgtgaccgcgagcttctctgtcttccgcccgtcttcctaccacatcatggtgagcatggccattggcgtccggctgcaggtgcagctggccccagtcatgcaactctttgtgacactggaccaggcctcccaggggcaggtgcagggcctctgcgggaacttcaacggcctggaaggtgacgacttcaagacggccagcgggctggtggaggccacgggggccggctttgccaacacctggaaggcacagtcaagctgccatgacaagctggactggttggacgatccctgctccctgaacatcgagagcgccaactacgccgagcactggtgctccctcctgaagaagacagagaccccctttggcaggtgccactcggctgtggaccctgctgagtattacaagaggtgcaaatatgacacgtgtaactgtcagaacaatgaggactgcctgtgcgccgccctgtcctcctacgcgcgcgcctgcaccgccaagggcgtcatgctgtggggctggcgggagcatgtctgcaacaaggatgtgggctcctgccccaactcgcaggtcttcctgtacaacctgaccacctgccagcagacctgccgctccctctccgaggccgacagccactgtctcgagggctttgcgcctgtggacggctgcggctgccctgaccacaccttcctggacgagaagggccgctgcgtacccctggccaagtgctcctgttaccaccgcggtctctacctggaggcgggggatgtggtcgtcaggcaggaagaacgatgtgtgtgccgggatgggcggctgcactgtaggcagatccggctgatcggccagagctgcacggccccaaagatccacatggactgcagcaacctgactgcactggccacctcgaagccccgagccctcagctgccagacgctggccgccggctattaccacacagagtgtgtcagtggctgtgtgtgccccgacgggctgatggatgacggccggggtggctgcgtggtggagaaggaatgcccttgcgtccataacaacgacctgtattcttccggcgccaagatcaaggtggactgcaatacctgcacctgcaagagaggacgctgggtgtgcacccaggctgtgtgccatggcacctgctccatttacgggagtggccactacatcacctttgatgggaagtactacgactttgacggacactgctcctacgtggctgttcaggactactgcggccagaactcctcactgggctcattcagcatcatcaccgagaacgtcccctgtggcactacgggcgtcacctgctccaaggccatcaagatcttcatggggaggacggagctgaagttggaagacaagcaccgtgtggtgatccagcgtgatgagggtcaccacgtggcctacaccacgcgggaggtgggccagtacctggtggtggagtccagcacgggcatcatcgtcatctgggacaagaggaccaccgtgttcatcaagctggctccctcctacaagggcaccgtgtgtggcctgtgtgggaactttgaccaccgctccaacaacgacttcaccacgcgggaccacatggtggtgagcagcgagctggacttcgggaacagctggaaggaggcccccacctgcccagatgtgagcaccaaccccgagccctgcagcctgaacccgcaccgccgctcctgggccgagaagcagtgcagcatcctcaaaagcagcgtgttcagcatctgccacagcaaggtggaccccaagcccttctacgaggcctgtgtgcacgactcgtgctcctgtgacacgggtggggactgtgagtgcttctgctctgccgtggcctcctacgcccaggagtgtaccaaagagggggcctgcgtgttctggaggacgccggacctgtgccccatattctgcgactactacaaccctccgcatgagtgtgagtggcactatgagccatgtgggaaccggagcttcgagacctgcaggaccatcaacggcatccactccaacatctccgtgtcctacctggagggctgctacccccggtgccccaaggacaggcccatctatgaggaggatctgaagaagtgtgtcactgcagacaagtgtggctgctatgtcgaggacacccactacccacctggagcatcggttcccaccgaggagacctgcaagtcctggtgcacatgcacacaaacgcacacagcataccacgtgcacacacacggaaagattcttaaccagacccaggatggcgccttctgctactgggagatctgtggccccaacgggacggtggagaagcacttcaacatctgttccattacgacacgcccgtccaccctgaccaccttcaccaccatcaccctccccaccacccccaccaccttcaccactaccaccaccaccaccaccccgacctccagcacagttttatcaacaactccgaagctgtgctgcctctggtctgactggatcaatgaggaccaccccagcagtggcagcgacgacggtgaccgagaaacatttgatggggtctgcggggcccctgaggacatcgagtgcaggtcggtcaaggatccccacctcagcttggagcagctaggccagaaggtgcagtgtgatgtctctgttgggttcatttgcaagaatgaagaccagtttggaaatggaccatttggactgtgttacgactacaagatacgtgtcaattgttgctggcccatggataagtgtatcaccactcccagccctccaactaccactcccagccctccaccaaccagcacgaccacccttccaccaaccaccacccccagccctccaaccaccaccacaaccacccctccaccaaccaccacccccagccctccaataaccaccacgaccacccctccaccaaccaccactcccagccctccaataagcaccacaaccacccctccaccaaccaccactcccagccctccaaccaccactcccagccctccaaccaccactcccagccctccaacaaccaccacaaccacccctccaccaaccaccactcccagccctccaacgactacgcccatcactccaccagccagcactaccacccttccaccaaccaccactcccagccctccaacaaccaccacaaccacccctccaccaaccaccactcccatcaccaccaccaccacggtgaccccaaccccaacacccaccggcacacagaccccaacaacgacacccatcaccaccaccaccacggtgaccccaaccccaacacccaccggcacacagaccccaacatcgacacccatcaccaccaccactacgaccccaaccccaacagccatcaccaccaccactacggtgaccccaaccccaacacccaccggcacacagaccccaaccacgacacccatcaccaccaccactacggtgacaccaaccccaacacccaccggcacacagtccccaaccccaacagccatcaccaccaccactacggtgaccccaaccccaacacccaccggcacacagaccccaacatcgacacccatcaccaccaccactacggtgaccccaaccccaacacccaccggcacacagaccccaaccccgacacccatctccaccaccactacggtgaccccaaccccaacacccaccggcacacagaccccaaccacgacacccatcaccaccaccaccacggtgaccccaaccccgacacccaccggcacacagaccccaaccacgaccccaacacccaccagcacaaagagtacaaccgtgacacccatcaccaccacaactacggtgaccgcaaccccaacacccaccggcacacagaccccaaccatgatacccatcagcaccaccactacggtgacccca

SEQ ID NO: 128545 - DNA, 1612 bp, Artificial Sequence
  derived and/or modified sequence
gacatcgagtgcaggtcggtcaaggatccccacctcagcttggagcagctaggccagaaggtgcagtgtgatgtctctgttgggttcatttgcaagaatgaagaccagtttggaaatggaccatttggactgtgttacgactacaagatacgtgtcaattgttgctgcacccccactcgcggtaccacgaccgggtcatcttcagcccccacccccagcactgtgcagacgaccaccaccagtgcctggaccccaacgccgaccccactctccacacccagcatcatcaggaccacaggcctgaggccctacccttcctctgtgcttatctgctgtgtcctgaacgacacctactacgcaccaggtgaggaggtgtacaacggcacatacggagacacctgttatttcgtcaactgctcactgagctgtacgttggagttctataactggtcctgcccatccacgccctccccaacacccacgccctccaagtcgacgcccacgccttccaagccatcgtccacgccctccaagccgacgcccggcaccaagccccccgagtgcccagactttgatcctcccagacaggagaacgagacttggtggctgtgcgactgcttcatggccacgtgcaagtacaacaacacggtggagatcgtgaaggtggagtgtgagccgccgcccatgcccacctgctccaacggcctccaacccgtgcgcgtcgaggaccccgacggctgctgctggcactgggagtgcgactgctactgcacgggctggggcgacccgcactatgtcaccttcgacggactctactacagctaccagggcaactgcacctacgtgctggtggaggagatcagcccctccgtggacaacttcggagtttacatcgacaactaccactgcgatcccaacgacaaggtgtcctgtccccgcaccctcatcgtgcgccacgagacccaggaggtgctgatcaagaccgtgcatatgatgcccatgcaggtgcaggtgcaggtgaacaggcaggcggtggcactgccctacaagaagtacgggctggaggtgtaccagtctggcatcaactacgtggtggacatccccgagctgggtgtcctcgtctcctacaatggcctgtccttctccgtcaggctgccctaccaccggtttggcaacaacaccaagggccagtgtggcacctgcaccaacaccacctccgacgactgcattctgcccagcggggagatcgtctccaactgtgaggctgcggctgaccagtggctggtgaacgacccctccaagccacactgcccccacagcagctccacgaccaagcgcccggccgtcactgtgcccgggggcggtaaaacgaccccacacaaggactgcaccccatctcccctctgccagctcatcaaggacagcctgtttgcccagtgccacgcactggtgcccccgcagcactactacgatgcctgcgtgttcgacagctgcttcatgccgggctcgagcctggagtgcgccagtctgcaggcctacgcagccctctgtgcccagcagaacatctgcctcgactggcggaaccacacgcatggggcctgctgtaagtgcc

SEQ ID NO: 128546 - DNA, 8637 bp, Artificial Sequence
  derived and/or modified sequence
caacccacaccgcccctgccagccaccatggggctgccactagcccgcctggcggctgtgtgcctggccctgtctttggcagggggctcggagctccagacagagggcagaacccgaaaccacggccacaacgtctgcagcacctggggcaacttccactacaagaccttcgacggggacgtcttccgcttccccggcctctgcgactacaacttcgcctccgactgccgaggctcctacaaggaatttgctgtgcacctgaagcggggtccgggccaggctgaggcccccgccggggtggagtccatcctgctgaccatcaaggatgacaccatctacctcacccgccacctggctgtgcttaacggggccgtggtcagcaccccgcactacagccccgggctgctcattgagaagagcgatgcctacaccaaagtctactcccgcgccggcctcaccctcatgtggaaccgggaggatgcactcatgctggagctggacactaagttccggaaccacacctgtggcctctgcggggactacaacggcctgcagagctattcagaattcctctctgacggcgtgctcttcagtcccctggagtttgggaacatgcagaagatcaaccagcccgatgtggtgtgtgaggatcccgaggaggaggtggcccccgcatcctgctccgagcaccgcgccgagtgtgagaggctgctgaccgccgaggccttcgcggactgtcaggacctggtgccgctggagccgtatctgcgcgcctgccagcaggaccgctgccggtgcccgggcggtgacacctgcgtctgcagcaccgtggccgagttctcccgccagtgctcccacgccggcggccggcccgggaactggaggaccgccacgctctgccccaagacctgccccgggaacctggtgtacctggagagcggctcgccctgcatggacacctgctcacacctggaggtgagcagcctgtgcgaggagcaccgcatggacggctgtttctgcccagaaggcaccgtatatgacgacatcggggacagtggctgcgttcctgtgagccagtgccactgcaggctgcacggacacctgtacacaccgggccaggagatcaccaatgactgcgagcagtgtgtctgtaacgctggccgctgggtgtgcaaagacctgccctgccccggcacctgtgccctggaaggcggctcccacatcaccaccttcgatgggaagacgtacaccttccacggggactgctactatgtcctggccaagggtgaccacaacgattcctacgctctcctgggcgagctggccccctgtggctccacagacaagcagacctgcctgaagacggtggtgctgctggctgacaagaagaagaatgtggtggtcttcaagtccgatggcagtgtactgctcaacgagctgcaggtgaacctgccccacgtgaccgcgagcttctctgtcttccgcccgtcttcctaccacatcatggtgagcatggccattggcgtccggctgcaggtgcagctggccccagtcatgcaactctttgtgacactggaccaggcctcccaggggcaggtgcagggcctctgcgggaacttcaacggcctggaaggtgacgacttcaagacggccagcgggctggtggaggccacgggggccggctttgccaacacctggaaggcacagtcaagctgccatgacaagctggactggttggacgatccctgctccctgaacatcgagagcgccaactacgccgagcactggtgctccctcctgaagaagacagagaccccctttggcaggtgccactcggctgtggaccctgctgagtattacaagaggtgcaaatatgacacgtgtaactgtcagaacaatgaggactgcctgtgcgccgccctgtcctcctacgcgcgcgcctgcaccgccaagggcgtcatgctgtggggctggcgggagcatgtctgcaacaaggatgtgggctcctgccccaactcgcaggtcttcctgtacaacctgaccacctgccagcagacctgccgctccctctccgaggccgacagccactgtctcgagggctttgcgcctgtggacggctgcggctgccctgaccacaccttcctggacgagaagggccgctgcgtacccctggccaagtgctcctgttaccaccgcggtctctacctggaggcgggggatgtggtcgtcaggcaggaagaacgatgtgtgtgccgggatgggcggctgcactgtaggcagatccggctgatcggccagagctgcacggccccaaagatccacatggactgcagcaacctgactgcactggccacctcgaagccccgagccctcagctgccagacgctggccgccggctattaccacacagagtgtgtcagtggctgtgtgtgccccgacgggctgatggatgacggccggggtggctgcgtggtggagaaggaatgcccttgcgtccataacaacgacctgtattcttccggcgccaagatcaaggtggactgcaatacctgcacctgcaagagaggacgctgggtgtgcacccaggctgtgtgccatggcacctgctccatttacgggagtggccactacatcacctttgatgggaagtactacgactttgacggacactgctcctacgtggctgttcaggactactgcggccagaactcctcactgggctcattcagcatcatcaccgagaacgtcccctgtggcactacgggcgtcacctgctccaaggccatcaagatcttcatggggaggacggagctgaagttggaagacaagcaccgtgtggtgatccagcgtgatgagggtcaccacgtggcctacaccacgcgggaggtgggccagtacctggtggtggagtccagcacgggcatcatcgtcatctgggacaagaggaccaccgtgttcatcaagctggctccctcctacaagggcaccgtgtgtggcctgtgtgggaactttgaccaccgctccaacaacgacttcaccacgcgggaccacatggtggtgagcagcgagctggacttcgggaacagctggaaggaggcccccacctgcccagatgtgagcaccaaccccgagccctgcagcctgaacccgcaccgccgctcctgggccgagaagcagtgcagcatcctcaaaagcagcgtgttcagcatctgccacagcaaggtggaccccaagcccttctacgaggcctgtgtgcacgactcgtgctcctgtgacacgggtggggactgtgagtgcttctgctctgccgtggcctcctacgcccaggagtgtaccaaagagggggcctgcgtgttctggaggacgccggacctgtgccccatattctgcgactactacaaccctccgcatgagtgtgagtggcactatgagccatgtgggaaccggagcttcgagacctgcaggaccatcaacggcatccactccaacatctccgtgtcctacctggagggctgctacccccggtgccccaaggacaggcccatctatgaggaggatctgaagaagtgtgtcactgcagacaagtgtggctgctatgtcgaggacacccactacccacctggagcatcggttcccaccgaggagacctgcaagtcctgcgtgtgtaccaactcctcccaagtcgtctgcaggccggaggaaggaaagattcttaaccagacccaggatggcgccttctgctactgggagatctgtggccccaacgggacggtggagaagcacttcaacatctgttccattacgacacgcccgtccaccctgaccaccttcaccaccatcaccctccccaccacccccaccaccttcaccactaccaccaccaccaccaccccgacctccagcacagttttatcaacaactccgaagctgtgctgcctctggtctgactggatcaatgaggaccaccccagcagtggcagcgacgacggtgaccgagaaacatttgatggggtctgcggggcccctgaggacatcgagtgcaggtcggtcaaggatccccacctcagcttggagcagctaggccagaaggtgcagtgtgatgtctctgttgggttcatttgcaagaatgaagaccagtttggaaatggaccatttggactgtgttacgactacaagatacgtgtcaattgttgctggcccatggataagtgtatcaccactcccagccctccaactaccactcccagccctccaccaaccagcacgaccacccttccaccaaccaccacccccagccctccaaccaccaccacaaccacccctccaccaaccaccacccccagccctccaataaccaccacgaccacccctccaccaaccaccactcccagccctccaataagcaccacaaccacccctccaccaaccaccactcccagccctccaaccaccactcccagccctccaaccaccactcccagccctccaacaaccaccacaaccacccctccaccaaccaccactcccagccctccaacgactacgcccatcactccaccagccagcactaccacccttccaccaaccaccactcccagccctccaacaaccaccacaaccacccctccaccaaccaccactcccatcaccaccaccaccacggtgaccccaaccccaacacccaccggcacacagaccccaacaacgacacccatcaccaccaccaccacggtgaccccaaccccaacacccaccggcacacagaccccaacatcgacacccatcaccaccaccactacggtgaccccaaccccaacacccaccggcacacagaccccaaccacgacacccatcaccaccaccactacggtgaccccaaccccaacacccactggcacacagaccccaaccccaacagccatcaccaccaccactacggtgaccccaaccccaacacccaccggcacacagaccccaaccacgacacccatcaccaccaccactacggtgacaccaaccccaacacccaccggcacacagtccccaaccccaacagccatcaccaccaccactacggtgaccccaaccccaacacccaccggcacacagaccccaacatcgacacccatcaccaccaccactacggtgaccccaaccccaacacccaccggcacacagaccccaaccccgacacccatctccaccaccactacggtgaccccaaccccaacacccaccggcacacagaccccaaccacgacacccatcaccaccaccaccacggtgaccccaaccccgacacccaccggcacacagaccccaaccacggtactcatcaccaccaccactacgatgaccccaaccccaacacccaccagcacaaagagtacaaccgtgacacccatcaccaccacaactacggtgaccgcaaccccaacacccaccggcacacagaccccaaccatgatacccatcagcaccaccactacggtgaccccaaccccaacacccaccactggaagcacggggccccccacccacacaagcacagcacccattgctgagttgaccacatccaatcctccgcctgagtcctcaacccctcagacctctcggtccacctcttcccctctcacggagtcaaccacccttctgagtaccctaccacctgccattgagatgaccagcacggccccaccctccacacccacggcacccacgaccacgagcggaggccacacactgtctccaccgcccagcaccaccacgtcccctccaggcacccccactcgcggtaccacgaccgggtcatcttcagcccccacccccagcactgtgcagacgaccaccaccagtgcctggaccccaacgccgaccccactctccacacccagcatcatcaggaccacaggcctgaggccctacccttcctctgtgcttatctgctgtgtcctgaacgacacctactacgcaccaggtgaggaggtgtacaacggcacatacggagacacctgttatttcgtcaactgctcactgagctgtacgttggagttctataactggtcctgcccatccacgccctccccaacacccacgccctccaagtcgacgcccacgccttccaagccatcgtccacgccctccaagccgacgcccggcaccaagccccccgagtgcccagactttgatcctcccagacaggagaacgagacttggtggctgtgcgactgcttcatggccacgtgcaagtacaacaacacggtggagatcgtgaaggtggagtgtgagccgccgcccatgcccacctgctccaacggcctccaacccgtgcgcgtcgaggaccccgacggctgctgctggcactgggagtgcgactgctactgcacgggctggggcgacccgcactatgtcaccttcgacggactctactacagctaccagggcaactgcacctacgtgctggtggaggagatcagcccctccgtggacaacttcggagtttacatcgacaactaccactgcgatcccaacgacaaggtgtcctgtccccgcaccctcatcgtgcgccacgagacccaggaggtgctgatcaagaccgtgcatatgatgcccatgcaggtgcaggtgcaggtgaacaggcaggcggtggcactgccctacaagaagtacgggctggaggtgtaccagtctggcatcaactacgtggtggacatccccgagctgggtgtcctcgtctcctacaatggcctgtccttctccgtcaggctgccctaccaccggtttggcaacaacaccaagggccagtgtggcacctgcaccaacaccacctccgacgactgcattctgcccagcggggagatcgtctccaactgtgaggctgcggctgaccagtggctggtgaacgacccctccaagccacactgcccccacagcagctccacgaccaagcgcccggccgtcactgtgcccgggggcggtaaaacgaccccacacaaggactgcaccccatctcccctctgccagctcatcaaggacagcctgtttgcccagtgccacgcactggtgcccccgcagcactactacgatgcctgcgtgttcgacagctgcttcatgccgggctcgagcctggagtgcgccagtctgcaggcctacgcagccctctgtgcccagcagaacatctgcctcgactggcggaaccacacgcatggggcctgcttggtggagtgcccatctcacagggagtaccaggcctgtggccctgcagaagagcccacgtgcaaatccagctcctcccagcagaacaacacagtcctggtggaaggctgcttctgtcctgagggcaccatgaactacgctcctggctttgatgtctgcgtgaagacctgcggctgtgtgggacctgacaatgtgcccagagagtttggggagcacttcgagttcgactgcaagaactgtgtctgcctggagggtggaagtggcatcatctgccaacccaagaggtgcagccagaagcccgttacccactgcgtggaagacggcacctacctcgccacggaggtcaaccctgccgacacctgctgcaacattaccgtctgcaagtgcaacaccagcctgtgcaaagagaagccctccgtgtgcccgctgggattcgaagtgaagagcaagatggtgcctggaaggtgctgtcctttctactggtgtgagtccaagggggtgtgtgttcacgggaatgctgagtaccagcccggttctccagtttattcctccaagtgccaggactgcgtgtgcacggacaaggtggacaacaacaccctgctcaacgtcatcgcctgcacccacgtgccctgcaacacctcctgcagccctggcttcgaactcatggaggcccccggggagtgctgtaagaagtgtgaacagacgcactgtatcatcaaacggcccgacaaccagcacgtcatcctgaagcccggggacttcaagagcgacccgaagaacaactgcacattcttcagctgcgtgaagatccacaaccagctcatctcgtccgtctccaacatcacctgccccaactttgatgccagcatttgcatcccgggctccatcacattcatgcccaatggatgctgcaagacctgcacccctcgcaatgagaccagggtgccctgctccaccgtccccgtcaccacggaggtttcgtacgccggctgcaccaagaccgtcctcatgaatcattgctccgggtcctgcgggacatttgtcatgtactcggccaaggcccaggccctggaccacagctgctcctgctgcaaagaggagaaaaccagccagcgtgaggtggtcctgagctgccccaatggcggctcgctgacacacacctacacccacatcgagagctgccagtgccaggacaccgtctgcgggctccccaccggcacctcccgccgggcccggcgctcccctaggcatctggggagcgggtgagcggggtgggcacagcccccttcactgccctcgacagctttacctcccccggaccctctgagcctcctaagctcggcttcctctcttcagatatttattgtctgagtctttgttcagtccttgctttccaataataaactcagggggacatgctgt

SEQ ID NO: 128547 - DNA, 837 bp, Artificial Sequence
  derived and/or modified sequence
cccaccggcacccagacccccacccccacccccatcagcaccaccacaaccgttactcctacccccacccccacaggcacacaaacccctaccaccacacccattacgactacaactaccgtgacaccaacaccaactcccacgggtacccagactccaaccactgtgctaataacaacaacaaccacgatgactccgaccccgacgcccacttcaactaagagcactacggtgactcctattactactaccacaaccgtgaccgccacacctactccgactggaactcaaactcctacgatgattccaatctccactacaactacagtgactcctacgcccacacccaccacaggatcgacggggccacctacccatacttctacagcccctatcgcagagctgacgacgtcaaacccacctccagagtcaagtactccgcagacctctcggtcaacaagtagtccactcaccgagtccaccaccttgctttccacgttacccccagccatcgaaatgacatcaaccgccccaccctcgacgcccacggcccccactaccacatcaggaggccacacattgagcccgccgcctagcaccacaacaagcccccccggaaccccaacgcgtggaacaactactggatccagtagcgccccgaccccttcaacagtgcagaccaccaccacgagcgcatggacacccactccgaccccattgagcaccccctccatcattagaactaccggactcagaccctatccctcatcagttctgatctgctgtgtgctgaacgatacgtattacgcacctggagaggaagtatataatggttag

SEQ ID NO: 128548 - DNA, 5343 bp, Artificial Sequence
  derived and/or modified sequence
atgggcctgcccctggcccggctggccgccgtgtgcctggccctgtccctcgccggaggatctgagctgcaaaccgagggcagaacacgcaaccacggacacaatgtttgttccacttgggggaattttcattacaaaactttcgacggagacgtcttccgattcccaggtctgtgtgactacaatttcgcgagcgactgccgagggtcctacaaagagttcgcagtacatctgaaacgcggtccaggccaggcagaggctccagcgggagttgagtccatcctgctaacaatcaaggacgatactatttacctgacccggcacctggctgttctgaatggagcagtggtgagcacacctcactactccccaggcttgttgatcgagaaatccgacgcttacactaaagtgtactctagggccggcttaacactgatgtggaacagagaagatgcgctgatgttggaattggatacaaagttccgcaatcacacatgtggattgtgcggggactataatggtttgcagtcctatagcgagtttctgagcgatggagtactcttttcccccctggagtttggaaacatgcaaaaaattaatcagcccgatgtggtgtgcgaggatcctgaggaagaggtcgctcccgctagctgtagcgagcacagagcggagtgtgagcgcctgctcaccgcggaggctttcgcagactgccaagacctggtaccgcttgagccttatctgagagcttgccagcaggacaggtgccgctgcccgggcggggatacttgtgtttgctcaaccgttgctgaattctcccggcaatgttcacacgccgggggccgtcctggcaattggagaaccgcaacattgtgcccaaaaacgtgcccaggtaacctggtgtatctggagtccggcagcccgtgcatggacacatgttcccatctggaggtttcatctctttgcgaagagcaccggatggatgggtgcttttgtccggaaggaacagtatacgatgatatcggagactctgggtgcgtgccagtctcccaatgtcactgcagactacacgggcatctttacacacccgggcaggagatcaccaacgactgtgagcaatgtgtgtgcaatgccggaagatgggtgtgcaaggacctgccttgccctggcacctgcgctctggaaggcggatctcatataaccacattcgacggaaagacttatactttccatggcgattgctactatgtactcgctaaaggagatcacaacgactcatacgcccttctaggagagctggccccatgtgggagtacagacaagcagacctgcctgaagacggttgtgttgctggccgataaaaaaaaaaacgtggtggtctttaagagtgatggctcggtgttgcttaacgaactacaagtgaatcttccacatgtgacagcctccttcagcgtcttccgaccatccagctatcacatcatggtatctatggccatcggggtcagattgcaggtccagttggcccctgtcatgcagctctttgtcacgcttgatcaagccagtcagggtcaagtgcagggactttgcggcaattttaacgggctcgagggggatgactttaaaacagccagcggcctggtagaggccacaggggcagggtttgcgaatacctggaaagcccaatcctcttgccatgacaaactggattggctggatgacccatgcagtcttaatatcgagagtgcaaattatgccgagcactggtgtagtttgttgaagaagacggaaacgccctttggacgctgccattctgcggttgaccctgcagaatattacaaacgctgtaaatacgatacctgcaactgccaaaataatgaagactgtctctgcgccgccctgagcagctatgctagggcttgcacagctaagggcgttatgctgtggggttggcgggagcacgtctgtaacaaagatgtgggatcatgtcccaattcccaggtctttctgtacaaccttaccacctgtcagcagacgtgccgctccttgagcgaagctgattcacactgtctggagggatttgcacccgtggacgggtgcgggtgtcccgaccataccttcctcgatgagaaaggacgctgtgtgcccttggctaagtgtagctgttaccacaggggcctttacttagaggccggagacgtcgtggtgaggcaggaggaaagatgcgtgtgccgggatggcaggcttcattgtcgacaaatccggctgatcgggcaatcctgtacagccccaaagatccacatggattgttccaacctgacagccctggctacgagtaagcctcgcgcactgagctgccaaaccctggctgcaggctattaccacacagaatgcgtgagcggctgcgtctgcccggacgggctgatggatgacggaagggggggttgtgtggttgaaaaggagtgtccgtgtgtgcacaacaacgatctatacagttctggagctaagattaaggtcgattgtaacacgtgcacctgtaaacggggccgctgggtgtgcacccaggctgtctgtcacggtacttgctctatctacggttcgggacactatattaccttcgacggtaagtattacgactttgacggccactgcagctacgtggcggtccaagactactgcggacagaatagcagtctcggtagcttttccatcatcacagaaaatgtgccatgtggaaccacaggtgttacctgtagcaaagcgattaagatattcatgggtaggacagagcttaagctcgaagataaacatcgagtcgtcatccagagagacgagggccatcacgtggcctacaccacacgcgaggtcggacagtacttggtggtggagtcctcgacagggattattgttatttgggataagcgcaccacagtgtttattaaactggccccgtcttacaaaggtacagtctgcggactgtgcggtaactttgaccataggagtaataacgactttacgaccagagaccacatggtggtgtcctctgagcttgactttggaaatagctggaaggaagccccaacatgtcctgatgttagcaccaacccggagccttgcagtttgaatccccatagacggagctgggctgaaaagcagtgctcgatcctcaagtccagcgtattctcgatttgccatagtaaggttgaccctaagccgttctatgaggcctgtgtgcacgacagttgcagctgcgacacaggtggcgactgcgagtgcttttgtagcgccgtggcatcctatgcccaagaatgtactaaggagggagcctgtgttttttggcggactcctgatctatgtccaattttttgcgactactacaatccgccacatgaatgcgagtggcattatgagccatgtgggaaccgctctttcgagacctgtcggactataaacggtattcactcaaatatctctgtcagctatctggagggctgttatccgagatgccctaaagaccgccctatatacgaagaggacctgaaaaagtgtgtaaccgctgataagtgcggttgttatgtggaagatactcactaccccccaggcgcttctgtgcctaccgaggagacctgcaagtcgtggtgcacctgcactcaaactcatactgcttaccacgtgcacacacatggcaaaatcttaaatcagacccaagatggcgctttttgttattgggagatctgtggacccaacggaactgtagagaagcacttcaatatctgctctatcacaaccaggccaagcacgctcaccaccttcactactataaccctgcctaccacaccaaccacattcacaaccactacgacaacgactactcccacgtcctccaccgtgctgtcaacaactcctaagctgtgctgtctctggtccgattggatcaatgaagatcatcccagcagcggtagtgacgacggcgaccgagaaacttttgacggggtgtgcggggctcctgaggatatagagtgccgctctgtaaaggatccgcatctgagcctcgaacagcttggtcagaaagtccagtgtgacgtgagcgtgggtttcatctgcaagaatgaggaccaatttggcaacgggccattcggcctgtgctatgattacaagatccgcgttaactgctgctggcccatggataagtgcataacaacccccagcccgcctacgactactccatcccctccacccacctcaactactacactgccaccaacaactacaccttctccacccacaacaacgactacaacccctccacccacgaccacaccctctccacctatcacaaccaccaccactccaccccccaccaccacgccttccccaccaatctccacaacaacaacacctccccccacaaccaccccttctccccccacaaccaccccgtccccccctactaccacgccttcacctcctacaaccactactaccacccctccgcctaccactacgcccagtccccccaccaccacgcctatcacccctccggcctctaccaccaccctaccccccaccacaactcctagcccccctacaaccactactaccacacctccaccgaccactacgcccataactactacaacaacggtgactcctacaccaaccccgacgggaacccaaacccctacgacaacaccaattaccaccaccactacagtcactcctacgccgacacctaccggtacacagacccctacctccacgccaatcaccacaactacgactacccccacacctaccgctatcacaactaccactacggtcacccccacacctactcccacaggaacccaaacccctactactaccccaattactacaactacaactgtcacccctactccaactcccacaggcacccaatcgccaacaccaactgctatcaccacaaccaccaccgtcacgccaacaccaacaccgacaggtacccagacccccacctctacaccgattacaactacaactacagtaacgcccacccccaccccgactggcacccagactccaactccaacacctatttcgacaacaaccactgtgacaccaacccctacaccaacaggcactcagacccctacgacaacgcctatcactaccactactacagtaacgcccactccgactcccacaggcacacagacccctaccaccacccccacccccacttccactaagagcaccaccgtcaccccaatcactacaacgacaactgtgaccgcaacaccaacccctactgggacgcaaaccccaacaatgattccaatctctacaacgacgaccgtcacaccatag

SEQ ID NO: 128549 - DNA, 1230 bp, Artificial Sequence
  derived and/or modified sequence
gacatcgagtgccggagcgtgaaggacccccacctgagcctggagcaactgggacagaaggtccaatgcgacgttagcgtggggtttatatgcaagaacgaagatcagtttggaaacggaccatttgggctatgctatgactataagatccgggtgaattgttgttgtacccctaccaggggcacgaccacaggctcttcctccgcaccaacaccctcgacggtccagaccactacaacatctgcctggactccaactccaacacccctgtctacgccctccataatccgcactaccggtcttaggccttacccgagtagtgtccttatctgttgtgtattgaatgatacatattacgcaccaggggaggaagtatataacgggacttacggggacacttgctattttgtcaactgctccttgagttgcacgctcgagttctacaattggagttgcccatctacaccctcaccaactccaaccccatctaaaagcacccccactccttccaaaccctctagtactccatctaagcccactcctggcactaaaccgccagaatgccccgacttcgatccacccaggcaagagaacgagacgtggtggctctgtgactgcttcatggcgacctgcaagtataataatactgtggagatcgttaaagtggagtgcgagccacccccgatgcctacatgcagtaacgggctgcagcccgttagggtggaagacccagacgggtgctgctggcattgggaatgcgactgttactgtaccggatggggggacccccactacgttacgtttgatgggctgtattactcctatcaggggaactgcacctacgtcctcgtggaagagatatccccttcagtggataatttcggtgtttacatcgacaactatcattgcgaccccaacgacaaagtgtcctgccctcgcacgctcatagtcagacacgagacacaggaggtgctgatcaagaccgtgcacatgatgccgatgcaagtacaagttcaggtcaacaggcaggccgttgccctgccttataagaaatatggactcgaagtgtaccaatccggcatcaactacgtggtagacatcccggagctgggagtgctagtgagctacaatggtttaagtttcagtgtgcggctcccctaccaccggttcggcaataatacaaagggccaatgtggcacttgcaccaacacaacaagtgacgactgctag

SEQ ID NO: 128550 - DNA, 8454 bp, Artificial Sequence
  derived and/or modified sequence
atgggcctgcccctggcccggctggccgccgtgtgcctggccctgtccctggcaggaggaagtgaactccagacagaaggccggacgcgcaaccatggccacaacgtgtgctccacctgggggaacttccattataaaacctttgatggcgatgtgtttagatttcctggtctgtgcgactataattttgcatccgactgtcggggctcatacaaggagtttgccgtgcacctcaagcgtggcccgggacaagcagaagcccccgccggcgtggagtccatcctgctgacgattaaagatgataccatctaccttactcggcacctagcagttctgaacggcgccgtggtctcgacccctcattactcacccggcttacttattgagaaaagtgatgcatacacaaaggtctactctcgggcaggacttacacttatgtggaatcgagaggatgctctcatgctcgaacttgacactaaattcagaaatcatacctgtggactgtgcggtgactacaatggcctgcagtcatattctgaatttctgtccgatggagtattgttctctcccctcgagttcggaaatatgcagaagattaaccagcctgacgtagtgtgcgaggatcctgaggaagaggtagcccccgcttcttgcagcgagcacagagccgaatgtgagagattgcttactgccgaggcatttgctgattgtcaggacttggtcccactggagccatacctgagggcctgtcaacaggaccggtgtaggtgcccaggcggcgacacctgtgtctgttccaccgtagctgagttcagtcggcagtgtagtcacgctggcggccgccccggaaactggagaactgcaactctgtgccccaaaacctgtcccggaaacctggtgtatctggagagtggtagtccatgcatggacacctgttcacatctcgaggtaagtagcctctgcgaagaacacaggatggacggttgtttctgccccgaaggcactgtgtatgacgatatcggcgatagcggttgtgtcccagtcagccagtgccattgcaggctgcatggacatctctatactcctggccaggaaatcactaatgattgcgaacagtgtgtttgcaatgccggcagatgggtctgtaaggatttgccatgccccggaacctgtgcgctcgaagggggtagtcatatcactactttcgatgggaagacgtacactttccacggagactgctattatgtgctagcgaagggggaccataacgactcttatgctttactaggcgagctggcgccgtgtgggtccaccgacaaacagacttgcttgaagacggtcgtactcttggccgacaagaagaagaatgtcgttgtttttaaaagcgacggttccgtcttgctcaacgagctgcaggtgaatttgccccacgtcactgcctcttttagtgtgtttagaccaagttcctatcacatcatggtctccatggcaattggtgtgagactacaggtgcaactggctccagtgatgcaattgttcgtgacgcttgaccaggcaagccagggacaagtccagggtctgtgtggaaattttaacggacttgagggagacgattttaagactgccagcggactggtggaagctacaggggcgggctttgccaatacatggaaggcccagtcctcatgccacgataaactggattggttggacgacccctgttctcttaatatcgaatcggctaactacgcagagcattggtgctctctgctgaagaagactgagacaccgttcggaaggtgccactctgccgtggatcctgcggaatattacaagcgctgcaagtatgacacatgcaactgccagaacaacgaggattgcctttgtgcagccttaagctcttatgcccgggcatgtactgctaaaggagtaatgctctgggggtggcgcgaacacgtgtgtaacaaggacgtcggatcatgccccaacagccaagtgtttttgtacaacttaactacctgtcagcagacatgccgcagtctaagcgaagccgacagccactgtctggaaggatttgcacccgtcgatggatgtggctgccccgaccatacattcctggacgaaaaaggccgatgcgtccccctggccaagtgcagctgctaccacagaggtctgtacctcgaagctggggacgtcgtagttcggcaggaagaaaggtgcgtgtgtagggacggtagattacactgtcggcaaattagactgataggccagtcttgcacggctcccaagatccacatggactgttctaatctaacagccctcgctacaagcaaacctcgggccctgtcatgccagaccctcgcagcaggctactaccacacggaatgcgtctctggttgtgtctgtccggatggtctaatggacgacgggcgcggggggtgcgtggtggaaaaagagtgcccatgtgttcataataacgatctatactcctctggggctaagatcaaagtagattgtaacacatgtacatgcaaaagaggtcgttgggtatgtacccaggccgtgtgtcacggcacatgctcaatctacgggagtggacactacattacttttgatggaaagtattatgactttgacgggcactgcagttacgtggctgtgcaggactattgcgggcagaactctagtctcgggtcatttagcatcatcacagaaaacgtcccctgcggaacaactggggtaacttgctcaaaagccataaagatcttcatgggccgcactgaactcaagctggaagacaagcaccgagtggttatccagagagacgagggacaccacgtggcctacaccacaagagaagtgggccagtatctcgtggtcgagagctcgacgggtatcattgtcatttgggataaacgcacaaccgtgtttattaagctggctccgtcctataagggcacagtgtgcggcctgtgtggcaatttcgaccataggagcaacaatgattttacgacccgagaccacatggtcgtatcttctgagctggacttcggaaacagctggaaggaagccccaacatgccctgatgtgagcacaaatcctgaaccttgtagcctcaacccgcaccgtagatcctgggcagaaaaacaatgctctatcctcaaaagcagcgttttttctatctgtcacagcaaagtcgatccaaagccattttacgaagcttgtgtgcatgacagctgctcttgcgacaccggtggtgattgcgagtgtttttgtagcgccgtcgcatcttatgctcaggaatgcaccaaggagggagcttgtgtcttctggcgaacccctgatctgtgtcctattttttgtgactattataacccaccccatgaatgcgagtggcactatgaaccgtgtggaaatcggagtttcgaaacctgcagaaccattaacgggattcacagcaacataagcgtctcgtatctagaaggctgctatcccaggtgtccaaaggatcgtccgatctacgaagaagaccttaagaaatgtgtgactgctgacaaatgcggctgctacgtggaggacactcactacccccctggagctagtgtccctactgaggaaacatgcaagtcctgcgtgtgtaccaacagttcccaggtggtttgcagacctgaggaggggaagatattgaatcagacacaggacggggccttctgctactgggagatctgcggcccgaacggcaccgttgagaagcactttaatatttgtagcataacgactaggccttcaacgctgactactttcactaccataacgttacctaccacccctacaacattcacaactactaccactacgaccactcccaccagtagtactgtactcagcaccacaccaaaattgtgttgcttgtggtccgattggatcaatgaagaccacccttccagcggcagcgacgatggagatcgtgagactttcgatggagtatgcggggcacccgaggacattgagtgtcggtctgtgaaggacccacacctgtccctggaacagctcggccagaaggtccagtgtgacgtgtcagtgggcttcatatgtaagaatgaagaccagtttgggaacggaccattcggattgtgctatgattataaaatacgcgttaattgttgctggccaatggacaagtgtatcaccaccccctctcctcccactaccactccgagtcccccacccacttcaactacaaccctgcccccgaccaccaccccctctccacccaccacgactaccaccactccacctccgacgacaactccgtcaccccctatcactactactacgactcccccacctactactaccccatccccacccatttccacaacaaccactccgccacccaccacaactccttccccccctaccacaacccccagccctcccaccaccaccccatcccctccaaccacaacaacgacaacaccccctccgaccacaacccctagccccccaaccaccacccctattactccccccgcctctacgacaacgcttccccccacaaccacacctagtccaccaactacaacaaccactacgccgcccccaacgaccacaccaattaccacaaccactaccgttactcccacccctacgcccactggcactcagacccccactactacacctatcaccaccacaacaaccgtgacacctacccctaccccaactgggactcaaacacccacctctacaccaatcaccaccaccaccacagtgactcccactccaaccccaaccggcacacagacgcctaccaccacgcctattaccactaccactactgtgacccccacaccgactcctactggtacacaaacaccaactcccaccgcaatcacaacaaccacaaccgttacgcccacacccacgcctaccggaacacaaacgcccacaacaactcccattaccacaaccacaaccgtgactcccactccgacaccaacaggaacacagtctccaactcccaccgcgattactacgacgaccaccgtaactccaacccctaccccaaccggaacccagactcctacctcaactcccatcaccacaaccactacggtcacaccaactcccacccccaccggcacccaaacacctacaccaacacccatttccacaacaacaactgtcacaccaacgcctactcccactggcactcaaactccgaccaccaccccaataactactactaccactgtaaccccaactcccactcctacaggtactcaaaccccaacgacagtcctcatcaccactacaaccactatgactcctacacccactcccacctctaccaaatcaacaaccgtgacccctattacaacgaccactaccgtgaccgccaccccaactccaacggggactcagactcccaccatgattccaattagcacaacgactactgtgaccccaactcccacccctaccacaggttctaccggtccacccacgcatacttcaactgcacctattgccgaacttactacttctaaccccccaccagaatcctcaactccacaaacctctaggtcaactagtagtcctttaacagagtccactacactcttatccaccctgcctcccgccattgagatgactagcacggcccctcccagcactccaacagcccccactaccacctcagggggacacacactgagccccccaccatctaccaccaccagcccacctggaacacccacacgggggaccacaaccggatcatcaagcgctccaactccatccactgtgcagaccactaccacatccgcctggacccctacccctacacctcttagtacaccatctattattcgcacaactgggttacgcccctacccttcaagcgtgctcatttgttgcgtgctgaacgatacatattacgcgcctggggaggaggtgtataatggaacctacggagatacctgctacttcgtgaactgcagcctttcctgtaccctggagttctataattggtcatgcccaagcacccctagtcctaccccaactccctccaagtctacaccgactccttcgaaaccaagttccacaccttccaagcccaccccaggcaccaagccgcccgagtgtccggatttcgacccacccaggcaggaaaatgaaacatggtggctgtgtgactgcttcatggctacatgcaagtacaacaacacagtggaaatagtgaaggtggagtgtgagcctcctcctatgccaacctgttctaatggactgcagcctgtgcgtgttgaggatccagatggatgttgctggcattgggaatgtgattgctactgtactggctggggagatccccactatgtcacattcgatggcttatattattcctaccaggggaattgcacgtacgtcctggtcgaggagatctcccccagcgtagacaactttggcgtgtatattgacaattaccattgtgatccaaatgacaaagttagctgtcctcgaacactgatcgtccgacacgaaacccaggaagtgctcataaagaccgtgcatatgatgccaatgcaagtgcaggtccaggttaataggcaagccgtggccctgccatataagaagtatggtctggaagtgtatcagtccgggatcaattatgtggtggacatccctgagctgggagtgttggtgagttacaacggtctgtctttttctgtgaggttgccttaccaccgatttgggaacaacaccaaggggcagtgtgggacctgtaccaacactacatctgacgactgtatcctaccttcaggggaaatcgtgagtaactgcgaggccgcagccgatcaatggctggtgaatgaccccagcaagccccactgtccacactcaagttctacaacaaagaggcccgccgttactgtgccaggcggcggtaagaccacaccacataaggactgcacaccttccccgctgtgccagctaatcaaagacagcctgttcgctcagtgtcatgcattggtgcccccacagcattactacgacgcctgtgtgttcgacagttgttttatgccaggcagcagtcttgaatgcgcttcattgcaggcctatgccgccctctgtgcacagcaaaatatctgcctggattggcggaatcacacccacggcgcgtgcctggtggagtgcccaagccaccgtgagtaccaggcttgcggccccgccgaagaaccaacctgtaagtcatcatcatcgcagcagaacaacaccgtgttagtggaagggtgcttctgcccagagggcacaatgaattacgcaccaggtttcgatgtgtgtgtgaaaacttgtggctgtgtagggccggataatgtgcctcgggaattcggagagcactttgagtttgactgcaagaattgtgtatgcctggagggtggctccgggatcatctgtcagcccaaacggtgtagccagaaacccgtcacccattgtgttgaggacggaacatacctggccacggaagtgaacccagctgacacctgttgcaatatcactgtgtgcaagtgtaataccagtctctgtaaggaaaagccgagtgtgtgccccctggggttcgaagtgaagagcaagatggtccctgggagatgttgccctttttattggtgcgaatcaaagggcgtgtgtgtgcacgggaacgctgaatatcagcctgggtcgccagtctacagcagcaagtgtcaggactgcgtttgcactgataaggtggataataatactctgctgaacgtcatcgcgtgtactcatgtgccctgcaacaccagctgctcacccggatttgagctgatggaggctcccggagagtgttgcaaaaagtgtgagcagactcactgtattattaagagacccgataaccaacacgttatactgaagcctggggactttaagagtgatccaaagaacaattgtaccttttttagttgtgtcaaaattcacaatcagcttatctcatccgtatctaatattacgtgccctaatttcgacgcctctatctgcattcccggctcaatcacctttatgccgaatggatgctgcaagacgtgtaccccgagaaatgaaacaagagtaccttgcagcaccgtgccagtgacaacagaagtaagttacgctggatgtaccaaaacagtgttgatgaaccactgctccgggtcttgtggaacttttgttatgtattcagccaaagcccaggcccttgaccacagctgttcttgttgtaaggaagagaagacttcacagcgagaagtcgtgctatcatgtcctaacgggggctcactgacccacacctatacccacatagagagttgccagtgtcaagacaccgtttgtgggctgccaacaggcacttctcgtagggcgcgccgatctccgagacaccttggtagcggctag

SEQ ID NO: 128551 - DNA, 837 bp, Artificial Sequence
  derived and/or modified sequence
cctactggcacgcagactccaacccccacgcctatttcgacgaccaccactgttacccccacgccaacccccacggggacacagaccccgacaacgactccaatcaccaccacaacaactgtgacacccacaccaaccccaaccggcactcagactccgaccaccgtattgatcactacaacaacaacaatgacaccaactcccacccccacatctaccaaatccactactgtgaccccaatcacaacaactactacagtaaccgcaaccccaacccctaccggaacccaaacgccgacaatgatccctatcagcacgacaacgaccgtcacacctactcctaccccaacgaccggatcgactggaccacccacccatacatccactgcacctattgccgagttaaccaccagtaatccccctcccgagtcatccacacctcagacatcccgtagcactagctcgcccctgaccgaatctacgaccctcttatcaacactgccacctgctattgagatgactagcacagccccaccaagtacgcctacagcccctacaactacatcgggtggacacacactgtctccccctccctccacaactacctctcctcctggcaccccaacccggggaactacaactggctcaagttctgcgcctaccccgtctacggttcaaaccacaacgacgtccgcatggacccccacacccacgcctctgtctacacccagcattattcgaacgaccggcctccgtccatacccctcaagcgttttaatatgctgcgttctgaacgacacttactacgcccctggtgaagaggtctataacggatag

SEQ ID NO: 128552 - DNA, 5342 bp, Artificial Sequence
  derived and/or modified sequence
atggggttgccattggcacgcctggcggcagtatgtcttgccctgtcattggccggaggttcagagctgcagaccgagggacggactcgcaatcacggtcataacgtttgctccacctggggcaattttcactataaaacctttgacggcgacgttttcaggttcccaggcctttgcgattacaacttcgcctctgactgtagagggtcttataaagagttcgctgtacatttgaagcgcggacccggacaagctgaagcacccgctggagtagaatcgatcttactcacgattaaggatgataccatctacctgactcggcacctagccgtcctgaatggagcagtagtgagtaccccccactattctcctggacttctgattgagaaaagcgatgcatacaccaaggtgtactcccgggcaggactgacgcttatgtggaacagagaagatgctttaatgctggagttagacacgaaattcaggaaccatacctgtgggctttgtggggactacaacggactccaaagttatagtgagttcctttcagacggggtgctgtttagtccactggaatttggtaacatgcaaaagatcaatcagcccgatgtcgtgtgtgaggatccagaagaagaagtggccccagcatcttgctcagaacatagggccgagtgtgaaagactgctgactgccgaagcctttgccgactgtcaggatctcgtcccgttggagccctatctgcgggcatgccagcaggatagatgtcgctgccccggtggcgacacctgcgtgtgttcaactgtcgcagagttctcacgacagtgtagccatgccggaggacgcccaggaaactggcgaactgcaaccctctgcccaaagacctgtccgggaaacctggtgtatttggagagtggctcgccttgcatggatacgtgctctcatctggaggtatcttccctgtgcgaggaacataggatggatggctgcttctgcccagaaggaacggtgtatgatgacatcggagacagcggatgtgttccagtgtcgcagtgtcattgtcggcttcacggccacttatatacgccagggcaggagatcactaatgactgcgagcaatgcgtttgtaatgccggaagatgggtgtgtaaggatctcccttgccctggaacttgcgctctggagggcggatcgcacattactacctttgatggtaaaacttatactttccacggcgactgctactatgtgcttgccaagggcgaccataatgatagttacgcgcttctgggcgagctggctccctgtggcagtaccgacaagcaaacatgcctcaagacagttgtgttgttagctgacaaaaaaaaaaacgtcgttgtcttcaaatcagacgggtctgtcctgcttaatgagctgcaagtaaatcttccccacgtgaccgcgtccttctcagtgttcagaccctcaagctaccacattatggtgtccatggcaattggtgtgcgcctgcaagtccagctagccccagtcatgcaactttttgtcaccctggaccaggcctctcagggacaggtgcaaggactttgcggcaattttaacgggctcgagggcgatgactttaagacagcctccgggctggtggaggctacgggcgctggcttcgccaatacttggaaagcccagtcttcctgtcatgacaagctggactggctggatgacccatgctccttgaacattgaatccgctaattatgcggaacactggtgttctcttctaaaaaaaactgagactccctttggtagatgtcactcggcggtcgatcctgcagaatactacaaacggtgcaaatacgatacctgtaactgtcaaaacaatgaagactgcctttgcgccgctctcagttcttatgccagagcatgtactgcaaaaggcgtcatgttatgggggtggagagaacacgtttgcaacaaggacgtgggatcgtgccccaattcacaagtgttcctgtacaacctgacaacgtgccagcaaacatgcaggtcactttcagaggccgatagccattgcctggagggattcgctcccgtggatgggtgtgggtgtcctgaccacacctttctcgacgagaaaggtcgatgtgtgcccttggctaaatgttcctgctatcacagggggttatacctagaagccggagatgtggtcgtccgacaagaagagcgctgcgtgtgtagagatggccgactgcactgtagacaaatccgcctaatcggacaaagctgtaccgcacccaagatccacatggactgttctaacctcacagcgctcgcgacctccaaacctagagctctcagctgtcaaacgctagctgctggttactatcacacagagtgcgtgtccgggtgtgtctgtccagacggccttatggatgatgggcgagggggttgcgtggtggagaaggagtgcccgtgtgtccataacaatgacctttactcaagtggagcgaagatcaaggttgattgcaacacctgcacctgcaagaggggtagatgggtctgcactcaggctgtttgtcatggaacctgcagcatttatggatcgggacactacatcaccttcgacggtaaatactatgatttcgatgggcactgcagttatgtggcggtgcaggattactgtggccagaactccagcctggggagcttcagcatcatcacagagaatgtcccgtgtggaacaacgggcgtgacttgcagcaaagccattaagatcttcatgggcagaaccgagctgaaacttgaggacaagcatagagttgttatccagcgagatgagggccaccacgttgcctacaccactcgggaggttggacaatacctggtggtggagagcagcacgggtatcattgtaatctgggataagaggacaactgtctttataaaactcgcaccaagttacaaggggacagtatgtggactttgcggcaattttgaccataggtcgaataacgacttcactactcgggatcatatggtcgtaagctccgagcttgactttggtaatagctggaaggaagcacccacatgtcccgatgtgagtacaaacccagagccctgcagtctaaatccccaccggcgtagttgggccgaaaaacagtgtagcatcttaaagagtagcgtctttagtatttgccactccaaggttgaccccaagcccttctacgaggcctgtgtgcatgactcatgttcttgcgatacaggcggtgattgcgaatgcttttgcagcgccgtggccagctacgctcaagaatgtaccaaggagggcgcatgtgttttctggcgaactcctgatctgtgtcccatattttgcgactactacaatccaccacacgagtgtgaatggcactacgaaccctgcggaaatcggagttttgagacttgccgaacaatcaatggaatacacagtaacatctctgtgtcatacttggagggctgttatccaaggtgccccaaagatcgaccgatctatgaagaagatcttaagaagtgcgtgacggccgacaagtgcgggtgctatgtggaggatacgcactatcccccaggggcatccgtccctacagaagaaacctgcaagtcctggtgtacatgcacgcagacccacaccgcttatcatgtacatactcacggtaagatccttaaccagacacaggatggcgctttctgttactgggaaatatgtggtccaaatggaaccgtggaaaaacactttaacatctgcagcatcaccacccgaccttctaccctgaccacatttaccactatcaccctgccaacaactcctacaacgttcactaccacaacgaccaccacaacccctacatctagcaccgtcctctccacaacccccaaattgtgctgtttatggtctgactggattaatgaagaccacccctcctctggaagcgatgatggggatagggagacctttgacggagtctgcggggctcccgaggatatcgagtgcaggtctgtaaaagatccccacctctcactggaacagcttggacaaaaggtccaatgtgacgtgtcagtgggattcatctgtaagaacgaggaccagtttgggaatggtcctttcggcttatgctatgactataaaatacgcgttaattgttgctggcctatggataagtgcatcaccacccctagccctcctacgactacaccatctccccctcccaccagcacaacaactttgccacccaccacaacgcccagcccccctaccacaaccacgacaactccccctccgaccacgacgccttctcctccaatcacaaccaccacaacccctccccctactaccacccccagtccacccatctcaaccaccacaactccaccacctacgaccacccctagcccccctacaaccaccccctccccacccaccacaactcctagtcctcccaccaccacaactactaccccgcctccaactactacgccaagccctcctacaactacaccaattacccctccagcttctacgaccactttacctccaacgaccactccgagtccccctactacgactaccaccaccccccctcctacaacaactcctatcaccacaactaccacggtcacccctactccaactcctacaggtacccaaacacctactaccaccccaattacgactacaactactgtcactcccacgccaacccccacagggacgcagactcctacctcaacacctattactaccaccacgactactcctacacccacagccattacaaccactactaccgtcacgccaaccccaacccccactggcacacaaacccctacaaccacacctatcacgaccactacgactgttaccccaaccccaacccccaccggaacccagtcacccactcccacagcgattactactactaccaccgtgacccccactcctacacccacagggacgcaaacccctacatcgacccctattaccactactaccacagttacgcccactcccacacctaccggcacacagacacctactcctacccccatctcaactacaacaacagtgaccccgacacctactcccacagggacccagacaccaaccacaaccccaattacaaccactacaaccgtgacacccactcctacacccacaggaacccagacacctactactacaccaaccccgacaagtacaaaatccacaaccgtgacccccattacgacaactacaaccgtgaccgcaacccctacccctactggaacacagacacccaccatgattcctatctctacgacaactacggtgaccccgta

SEQ ID NO: 128553 - DNA, 1230 bp, Artificial Sequence
  derived and/or modified sequence
gatattgagtgtcgatccgtaaaggatccccacctgtctcttgaacaactcggccagaaggtgcaatgtgatgtgagcgtagggtttatttgtaagaatgaggaccagtttgggaatgggccatttggactttgctatgactacaagatcagagttaattgctgttgcacccctactagaggaaccactacagggtcctctagcgcccctaccccttctaccgtccagactactacaacatccgcgtggacaccaactcctacccctctgagcacaccatcgattataaggacgaccggacttaggccctatcccagcagtgtgcttatctgttgcgttctgaacgacacctattacgcccctggcgaagaagtttacaatggaacctatggcgatacgtgctacttcgtgaactgcagcctcagttgcacgctcgagttttacaactggagttgccccagcactccgagcccaacacccaccccctcaaagagcacaccaactccctccaaaccaagttcgacccctagtaagccaactcccggtactaagcctcctgagtgcccagattttgaccccccacggcaagaaaatgagacgtggtggctgtgtgattgttttatggccacatgtaaatacaataatacggtggaaattgttaaggtggaatgtgagccgccacctatgcctacctgttctaacggcctccaaccagttcgagtggaggatccagacggctgctgctggcattgggaatgcgattgttattgcacggggtggggtgatccacattacgtgacatttgacggcctgtactattcgtaccaagggaattgtacgtacgtgttggtggaggagattagtccttctgtagacaacttcggggtctatatcgacaactatcactgcgatcctaacgataaggtgagttgcccgaggacattaatcgtcaggcatgaaacacaagaagtgctgatcaaaaccgttcacatgatgcccatgcaagttcaagttcaggtcaatcgtcaggcagtggccctgccgtataagaagtatggcttagaggtctaccaaagcggaattaattatgtcgtagacatccccgaactcggcgtactagtatcctataacggactcagttttagcgtgcgtttgccatatcaccggtttggaaataatactaaggggcagtgcggaacatgcactaatacgacgagcgacgactgttag

SEQ ID NO: 128554 - DNA, 8453 bp, Artificial Sequence
  derived and/or modified sequence
atgggcctcccacttgctcgcctggctgcagtttgcctggctctctccctggctggcggaagcgagttacagacggaaggacggactagaaaccacggccacaatgtgtgcagtacctgggggaacttccattacaaaactttcgatggcgacgtgtttcgctttccgggtctgtgtgactataacttcgctagcgattgccgaggcagttataaagagtttgccgtgcacctgaaacgtggccctggtcaggccgaggccccagctggagttgagtctatcttgctgactataaaggacgacaccatctacctgacgcggcatctggctgtactgaacggtgccgtggtctcaactcctcactactccccgggactcctgatcgagaagagcgacgcatacaccaaagtgtactctcgagctggcctcacactgatgtggaacagagaggacgctctgatgctggagctggacaccaaatttcggaatcacacttgtggtttgtgtggagactacaacggccttcagtcctattccgagttcctgtctgatggagtgctcttttcacctctggagttcgggaatatgcagaagataaatcagcctgacgtggtctgtgaagacccagaggaggaggtggccccagctagctgttctgagcaccgcgctgaatgtgaacgactgcttacggcagaggccttcgctgattgccaggatctagttcccctggagccataccttcgggcatgtcagcaagaccgctgccgctgcccgggaggcgatacctgcgtatgcagtactgtggctgagtttagccggcagtgctcacacgccggtggacgcccaggtaactggagaactgcaacactgtgtcccaagacttgcccgggaaacctggtctatcttgagtcgggttctccctgcatggatacatgcagtcacctggaagtgagtagcttatgcgaagaacatcgaatggacgggtgtttctgccctgaagggactgtctatgatgacatcggtgacagtggatgcgtgcctgtcagccagtgtcattgccgtttgcacgggcacctgtatacgcctgggcaggaaatcacaaacgactgcgagcaatgcgtatgcaacgccggtagatgggtatgcaaggacctgccgtgcccgggtacttgcgctctcgaggggggatcacatattactacctttgacggcaagacgtacactttccacggagattgctattatgtgctggcaaagggggaccacaacgattcctatgcgctgctcggtgaattggccccatgcggctccaccgataagcaaacatgtttgaaaacagtcgttcttctagccgacaagaagaaaaatgtggtggtgttcaagtcagacggctccgtgctgctgaacgagctgcaggtgaacctgccacacgtgactgcaagtttcagtgtcttcaggccctcatcctaccacatcatggtttcgatggctattggcgtacggctgcaggtccagctggctcccgtgatgcagttgttcgtgacactcgatcaggcatcccagggtcaggtgcaggggttatgcgggaattttaacggactcgaaggggacgatttcaagaccgcatccggccttgtggaagccacaggggcagggtttgcaaacacatggaaagctcagtcgtcttgccacgataagttggattggttagacgatccttgcagcctgaatattgagtctgcaaactacgcagaacactggtgctccttgctgaagaagaccgagacaccgtttggtcggtgtcacagtgcagtcgatccagccgaatactataaacgatgtaaatacgacacatgtaattgccagaacaacgaagactgtctgtgcgctgccctatcctcatacgccagggcctgtactgcaaagggagtaatgctatgggggtggagagaacacgtatgtaataaggatgtgggcagctgtccaaattcccaagtgtttctctacaacctcacaacctgtcaacagacctgccggagtctgtccgaggctgactcgcactgcctggagggattcgccccagtggacgggtgtggatgtccagaccacacttttctggacgaaaaaggcagatgcgtgcctcttgccaagtgtagctgttatcacaggggtctgtacctggaggccggtgatgtggtggtccggcaagaagagagatgcgtgtgccgtgatggaagacttcactgtcggcaaatacgcctcattggccagtcctgtacagcgccaaaaatccacatggattgctccaatctgaccgctctggcgacaagtaagccacgtgccctgagttgtcagacattagcagccggatactatcacaccgagtgcgttagcggatgtgtctgcccagatggccttatggatgatggcaggggcggttgcgttgtagagaaagagtgcccctgtgtccataacaacgatctttacagctcaggggctaagatcaaggtggattgcaatacttgtacctgcaagcgaggcaggtgggtgtgcacacaggccgtctgccacgggacctgttccatctacggctcgggtcattacatcaccttcgatggcaaatactacgattttgacgggcactgctcctatgtggccgtccaggactactgcggacagaacagctccctgggatcattttctataattactgagaatgtgccatgtgggacaactggagttacctgctctaaggccattaagatcttcatgggacgtaccgagctcaagctcgaggataagcatcgcgttgtaattcaacgggatgagggccatcacgtggcgtacacgactcgcgaggttggtcagtacctggtcgttgagagttctaccggtatcatagtgatttgggataaaaggacgactgtgtttatcaagctcgctccgagttacaagggaacggtatgcggactctgcgggaattttgaccataggtccaacaacgactttaccacccgagatcatatggttgttagctctgaactggattttggaaacagctggaaggaagccccaacatgccccgacgtgtccacaaatcccgagccatgtagcttgaacccgcatcgtcgctcatgggcagagaaacagtgcagcatactgaaaagttcggtgttttccatttgccattccaaggtggatcctaaacctttctatgaagcatgcgtccatgacagctgcagctgtgatactggtggtgattgtgaatgcttctgctctgcagtcgcttcttatgcgcaggagtgcactaaagaaggtgcttgtgtgttctggcggacccctgacttatgcccaattttttgtgactactacaaccctccacacgagtgtgaatggcactacgagccatgtgggaaccgcagctttgaaacatgcaggaccattaacggcatccactccaacatctcagtgtcttacttagaagggtgctaccccaggtgccctaaggaccggcctatctacgaagaagacttgaaaaaatgtgtcaccgctgacaaatgtggatgctacgtagaagatacacactacccacccggagctagcgttcctacagaagaaacctgtaaatcttgtgtgtgtaccaacagcagccaggtggtctgtcgaccggaggaaggaaagatcctgaaccagactcaagacggagcattctgctactgggagatttgtgggccaaacggaacagtagagaagcatttcaatatctgcagtattactacccggccttccacactgacaacattcaccacaatcactctgcccaccactccaaccacattcaccacaaccacgactacaactacccctacatctagcaccgttctgtccacgacccctaagctgtgctgtctatggtcagactggatcaacgaggatcatccgtcaagcggatccgacgacggtgatcgcgagacgttcgatggggtgtgcggtgctccagaagacatagagtgcaggtccgtcaaggacccccatcttagtctggagcaattaggccagaaggtacagtgcgatgtgagcgttgggttcatttgcaaaaatgaagatcagtttgggaatggccctttcggcttgtgctacgactacaagattagagttaactgctgttggcctatggataaatgcatcacaacccctagccccccaacgactacaccttcacctccacccaccagcaccactactctccccccaacaacaactccttcccccccaactactacaacaacaactccccctcccactacaactccttccccccctattaccaccaccacaactccacctccaactacgacccctagcccacctatcagcacaactactacgccacccccaaccactactccttcacctccgactaccacacctagcccacctacaaccactccaagcccccctacgaccaccacaactacaccccctcctaccacaaccccgtccccgccaaccactacccctattacccccccagctagcacaacaacgttgcccccaacaaccacaccttcccccccaactacgaccaccaccacaccccctcccacaactactcctatcaccactactacaactgtgaccccgaccccgactccgactgggacccaaacccccactactactcctatcaccacaaccactacggtgacacccactccaacccccacaggaactcagacccctacctctacaccaattaccacaacgacgaccgtgacccctaccccaacaccaaccggtacccagacgcctacaactaccccaatcactaccactacaacagtgaccccaacccccactcccactggcacacagacgccaaccccaactgcgatcactactaccactacagttacccccacaccaacccctaccgggacccagacacctaccaccacacctataaccacgaccaccacagtaaccccgaccccaacacccaccggcacccagtcacccactccgactgcaatcaccaccaccaccacagtgacgcccacccctacccccaccggaacccagactcctacgagtacccctatcacgacaacaacgacagtgacgccaacacctacaccaaccggcacgcagactcctacccctacgcctatttcaacaaccaccaccgtgacccctacaccgactcctaccggaacccagaccccaacaaccactccaataaccacaaccacaacggtcacgcccactcccacacccacggggacgcagacccccacaaccgtacttattacaacaacaacgaccatgacccccacgccaacaccaacgtccacaaagagtacaactgttaccccaattaccaccactacaaccgtgacggcgactcccacccctaccgggacgcagacacctacaatgataccaatttctacaaccaccacggttacgccgactcctacacctaccacaggctctacagggcctcctacccatacaagtacagcccctatcgcagaactaacaacatcaaatcccccaccggaaagtagtaccccacagacttccagaagcactagttccccgctaacagagtctaccaccctgctgagcactttgcccccagcaattgagatgactagtacagccccaccctctacgcccaccgccccaacaactacctctggtggtcacaccctttctccaccaccctcaactacaactagccctcccggaacccctacgagaggaaccacgacggggtccagttccgctcccactccatcaacagtgcagactactacaacatctgcttggacccccacaccaacccccctgtcaactccatcgatcatacgcacaacggggcttaggccatatcctagcagcgtccttatctgttgcgtgctgaatgacacctattacgcaccgggtgaggaggtttataatgggacctacggtgatacgtgctactttgttaactgctcactgagctgcacgctcgagttttataattggagttgcccttctacaccctctccgaccccaactccttcaaaatccactcccacaccctcaaaaccctcatcaaccccctcaaagcccaccccagggactaagccccctgagtgtccggatttcgacccacccaggcaggagaacgaaacatggtggctctgtgactgctttatggcgacatgtaagtataacaatacagtagaaatcgtgaaagtagaatgtgagccaccccctatgccaacttgctccaacggattacaaccagtgcgggtcgaggaccccgacggatgttgctggcattgggaatgtgactgttattgcacaggttggggcgatccacattacgtgacatttgatggactgtattattcctaccagggcaactgcacctacgtgctggtcgaggagatcagccccagcgtcgacaacttcggcgtgtatattgacaactatcactgtgaccccaatgataaggtgtcttgtcctaggacgctcatcgtccggcatgagacacaagaagtgctaataaagactgttcatatgatgccaatgcaggtgcaggttcaggtgaacagacaggctgtcgcattgccctacaaaaagtacggactcgaagtatatcagagcggcattaactatgttgtagatattcccgaactgggcgtactggtgagttataacgggctatccttcagtgtacggttgccttatcatagattcggaaacaacacaaaaggtcagtgcggcacgtgtacgaatactactagtgatgattgcatccttccttccggtgagatcgtgtctaattgtgaggcagcagccgatcaatggctagttaacgatccgtcaaaaccgcattgcccacacagtagcagcaccacgaaacggccagcagtgactgtccccggtggtggaaaaaccaccccacataaggactgcactccgtcccctttatgtcaacttatcaaagacagtctattcgcacagtgtcacgcattggtgccacctcaacactattacgacgcctgtgtgtttgatagttgctttatgccaggatctagtctggagtgcgcttcactgcaagcctatgcggctctatgcgcccagcagaacatttgcctggactggcgcaatcatactcatggagcttgcttagtcgagtgcccaagtcatcgcgaatatcaggcttgtggcccagctgaagagcccacatgtaaatcatcctcctctcagcagaacaacacagtgttagtcgagggatgtttttgccctgaggggaccatgaattacgcccctggtttcgatgtgtgtgtgaagacctgtggctgtgttggccctgataatgtgccacgcgagtttggagagcattttgaatttgattgtaagaattgcgtgtgtttggaaggaggctctggaattatctgccagcccaaacgatgctcgcagaaaccagttacacattgtgtcgaagatggcacttatcttgctactgaggtcaaccctgctgatacgtgttgtaacatcactgtgtgcaagtgtaatacctccctctgcaaagagaaaccatctgtgtgtcccttgggatttgaagtgaagtctaaaatggtccccggacggtgctgccctttctactggtgcgagtcaaaaggcgtctgcgtgcatgggaacgccgagtatcaacccggatcaccagtttactcctccaaatgccaggattgcgtatgcaccgataaggttgataacaacaccctgctcaatgttattgcttgtacccatgtgccttgcaacacatcctgctcaccaggcttcgagctgatggaagccccaggtgagtgctgcaaaaaatgtgagcagacccactgtatcatcaagaggcccgacaaccagcacgtaatcctcaagccaggcgatttcaagtctgaccctaagaacaattgtaccttcttctcatgcgtgaaaattcataatcagcttatttcctctgtgagcaatattacctgccctaattttgatgctagtatctgtattcctggctcaattaccttcatgccaaatggctgctgcaagacgtgcactccgcgtaacgaaacacgtgttccatgcagtacagtgccagttaccaccgaagtatcatacgcgggatgcacaaaaaccgtattgatgaaccattgctccggcagctgcggtacttttgtgatgtatagcgctaaggcccaagccctggaccactcctgtagctgctgcaaggaggagaagacatctcagagagaggtggtgctgtcttgtcctaatggtggcagtttaacgcacacttacacgcacatcgagagctgtcaatgccaggatacagtgtgtgggttgccaacagggacatctaggagagcgcgaagaagtccgaggcacctggggtctggcta

SEQ ID NO: 128555 - DNA, 807 bp, Artificial Sequence
  derived and/or modified sequence
atggacaccagagtgggcaccgccatggccagcccccccagcatgttccccagcagcctgaagagcagctggaccaagaccaagagagtgagaagaagcttcggcgccgaggacgagtgcggcctgagaggcgccgagagaggcaccgccgaggcccacgccgagcacgagcagagagccagagccagcggcgccggcgccggcgccggcggcgccgaggacgccggcgccgccgccgccgcccccggcagagcccccggcgcccacagacagctgagactgaccgccggcgccggccacggcagaaacgcccacgccggccacagcggcctgctgcacggccccgccagcagaagccacagagccagacccagacccgccagagaggcccacagaccccaccagggcaaccccggccccggcagacagagagcccccgtgagaagcggcagagcccacgacgccgaggagaagctgtgggccagaccctgccacaccccccccagaggcagagaggccggcggcccccccggccccggccccatcctgcacctgggcggcagcagcccccccaagatcaagttcctgcagcaccccttcagcttccagagcccccagccccccgagcccggcaagagcaccagagacacccccagaagaaccagccagcccagagtgcccctgctgggcggccagaccagatacaccggcagccccggccacccccaggacaccggccagaccaagcccacccccagcaccagacaggacccccccaactacagcctgagaggcgccgtgccctag

SEQ ID NO: 128556 - DNA, 837 bp, Artificial Sequence
  derived and/or modified sequence
cccaccggcacccagacccccacccccacccccatcagcaccaccaccaccgtgacccccacccccacccccaccggcacccagacccccaccaccacccccatcaccaccaccaccaccgtgacccccacccccacccccaccggcacccagacccccaccaccgtgctgatcaccaccaccaccaccatgacccccacccccacccccaccagcaccaagagcaccaccgtgacccccatcaccaccaccaccaccgtgaccgccacccccacccccaccggcacccagacccccaccatgatccccatcagcaccaccaccaccgtgacccccacccccacccccaccaccggcagcaccggcccccccacccacaccagcaccgcccccatcgccgagctgaccaccagcaaccccccccccgagagcagcaccccccagaccagcagaagcaccagcagccccctgaccgagagcaccaccctgctgagcaccctgccccccgccatcgagatgaccagcaccgccccccccagcacccccaccgcccccaccaccaccagcggcggccacaccctgagccccccccccagcaccaccaccagcccccccggcacccccaccagaggcaccaccaccggcagcagcagcgcccccacccccagcaccgtgcagaccaccaccaccagcgcctggacccccacccccacccccctgagcacccccagcatcatcagaaccaccggcctgagaccctaccccagcagcgtgctgatctgctgcgtgctgaacgacacctactacgcccccggcgaggaggtgtacaacggctag

SEQ ID NO: 128557 - DNA, 5343 bp, Artificial Sequence
  derived and/or modified sequence
atgggcctgcccctggccagactggccgccgtgtgcctggccctgagcctggccggcggcagcgagctgcagaccgagggcagaaccagaaaccacggccacaacgtgtgcagcacctggggcaacttccactacaagaccttcgacggcgacgtgttcagattccccggcctgtgcgactacaacttcgccagcgactgcagaggcagctacaaggagttcgccgtgcacctgaagagaggccccggccaggccgaggcccccgccggcgtggagagcatcctgctgaccatcaaggacgacaccatctacctgaccagacacctggccgtgctgaacggcgccgtggtgagcaccccccactacagccccggcctgctgatcgagaagagcgacgcctacaccaaggtgtacagcagagccggcctgaccctgatgtggaacagagaggacgccctgatgctggagctggacaccaagttcagaaaccacacctgcggcctgtgcggcgactacaacggcctgcagagctacagcgagttcctgagcgacggcgtgctgttcagccccctggagttcggcaacatgcagaagatcaaccagcccgacgtggtgtgcgaggaccccgaggaggaggtggcccccgccagctgcagcgagcacagagccgagtgcgagagactgctgaccgccgaggccttcgccgactgccaggacctggtgcccctggagccctacctgagagcctgccagcaggacagatgcagatgccccggcggcgacacctgcgtgtgcagcaccgtggccgagttcagcagacagtgcagccacgccggcggcagacccggcaactggagaaccgccaccctgtgccccaagacctgccccggcaacctggtgtacctggagagcggcagcccctgcatggacacctgcagccacctggaggtgagcagcctgtgcgaggagcacagaatggacggctgcttctgccccgagggcaccgtgtacgacgacatcggcgacagcggctgcgtgcccgtgagccagtgccactgcagactgcacggccacctgtacacccccggccaggagatcaccaacgactgcgagcagtgcgtgtgcaacgccggcagatgggtgtgcaaggacctgccctgccccggcacctgcgccctggagggcggcagccacatcaccaccttcgacggcaagacctacaccttccacggcgactgctactacgtgctggccaagggcgaccacaacgacagctacgccctgctgggcgagctggccccctgcggcagcaccgacaagcagacctgcctgaagaccgtggtgctgctggccgacaagaagaagaacgtggtggtgttcaagagcgacggcagcgtgctgctgaacgagctgcaggtgaacctgccccacgtgaccgccagcttcagcgtgttcagacccagcagctaccacatcatggtgagcatggccatcggcgtgagactgcaggtgcagctggcccccgtgatgcagctgttcgtgaccctggaccaggccagccagggccaggtgcagggcctgtgcggcaacttcaacggcctggagggcgacgacttcaagaccgccagcggcctggtggaggccaccggcgccggcttcgccaacacctggaaggcccagagcagctgccacgacaagctggactggctggacgacccctgcagcctgaacatcgagagcgccaactacgccgagcactggtgcagcctgctgaagaagaccgagacccccttcggcagatgccacagcgccgtggaccccgccgagtactacaagagatgcaagtacgacacctgcaactgccagaacaacgaggactgcctgtgcgccgccctgagcagctacgccagagcctgcaccgccaagggcgtgatgctgtggggctggagagagcacgtgtgcaacaaggacgtgggcagctgccccaacagccaggtgttcctgtacaacctgaccacctgccagcagacctgcagaagcctgagcgaggccgacagccactgcctggagggcttcgcccccgtggacggctgcggctgccccgaccacaccttcctggacgagaagggcagatgcgtgcccctggccaagtgcagctgctaccacagaggcctgtacctggaggccggcgacgtggtggtgagacaggaggagagatgcgtgtgcagagacggcagactgcactgcagacagatcagactgatcggccagagctgcaccgcccccaagatccacatggactgcagcaacctgaccgccctggccaccagcaagcccagagccctgagctgccagaccctggccgccggctactaccacaccgagtgcgtgagcggctgcgtgtgccccgacggcctgatggacgacggcagaggcggctgcgtggtggagaaggagtgcccctgcgtgcacaacaacgacctgtacagcagcggcgccaagatcaaggtggactgcaacacctgcacctgcaagagaggcagatgggtgtgcacccaggccgtgtgccacggcacctgcagcatctacggcagcggccactacatcaccttcgacggcaagtactacgacttcgacggccactgcagctacgtggccgtgcaggactactgcggccagaacagcagcctgggcagcttcagcatcatcaccgagaacgtgccctgcggcaccaccggcgtgacctgcagcaaggccatcaagatcttcatgggcagaaccgagctgaagctggaggacaagcacagagtggtgatccagagagacgagggccaccacgtggcctacaccaccagagaggtgggccagtacctggtggtggagagcagcaccggcatcatcgtgatctgggacaagagaaccaccgtgttcatcaagctggcccccagctacaagggcaccgtgtgcggcctgtgcggcaacttcgaccacagaagcaacaacgacttcaccaccagagaccacatggtggtgagcagcgagctggacttcggcaacagctggaaggaggcccccacctgccccgacgtgagcaccaaccccgagccctgcagcctgaacccccacagaagaagctgggccgagaagcagtgcagcatcctgaagagcagcgtgttcagcatctgccacagcaaggtggaccccaagcccttctacgaggcctgcgtgcacgacagctgcagctgcgacaccggcggcgactgcgagtgcttctgcagcgccgtggccagctacgcccaggagtgcaccaaggagggcgcctgcgtgttctggagaacccccgacctgtgccccatcttctgcgactactacaaccccccccacgagtgcgagtggcactacgagccctgcggcaacagaagcttcgagacctgcagaaccatcaacggcatccacagcaacatcagcgtgagctacctggagggctgctaccccagatgccccaaggacagacccatctacgaggaggacctgaagaagtgcgtgaccgccgacaagtgcggctgctacgtggaggacacccactacccccccggcgccagcgtgcccaccgaggagacctgcaagagctggtgcacctgcacccagacccacaccgcctaccacgtgcacacccacggcaagatcctgaaccagacccaggacggcgccttctgctactgggagatctgcggccccaacggcaccgtggagaagcacttcaacatctgcagcatcaccaccagacccagcaccctgaccaccttcaccaccatcaccctgcccaccacccccaccaccttcaccaccaccaccaccaccaccacccccaccagcagcaccgtgctgagcaccacccccaagctgtgctgcctgtggagcgactggatcaacgaggaccaccccagcagcggcagcgacgacggcgacagagagaccttcgacggcgtgtgcggcgcccccgaggacatcgagtgcagaagcgtgaaggacccccacctgagcctggagcagctgggccagaaggtgcagtgcgacgtgagcgtgggcttcatctgcaagaacgaggaccagttcggcaacggccccttcggcctgtgctacgactacaagatcagagtgaactgctgctggcccatggacaagtgcatcaccacccccagcccccccaccaccacccccagccccccccccaccagcaccaccaccctgccccccaccaccacccccagcccccccaccaccaccaccaccacccccccccccaccaccacccccagcccccccatcaccaccaccaccacccccccccccaccaccacccccagcccccccatcagcaccaccaccacccccccccccaccaccacccccagcccccccaccaccacccccagcccccccaccaccacccccagcccccccaccaccaccaccaccacccccccccccaccaccacccccagcccccccaccaccacccccatcaccccccccgccagcaccaccaccctgccccccaccaccacccccagcccccccaccaccaccaccaccacccccccccccaccaccacccccatcaccaccaccaccaccgtgacccccacccccacccccaccggcacccagacccccaccaccacccccatcaccaccaccaccaccgtgacccccacccccacccccaccggcacccagacccccaccagcacccccatcaccaccaccaccaccacccccacccccaccgccatcaccaccaccaccaccgtgacccccacccccacccccaccggcacccagacccccaccaccacccccatcaccaccaccaccaccgtgacccccacccccacccccaccggcacccagagccccacccccaccgccatcaccaccaccaccaccgtgacccccacccccacccccaccggcacccagacccccaccagcacccccatcaccaccaccaccaccgtgacccccacccccacccccaccggcacccagacccccacccccacccccatcagcaccaccaccaccgtgacccccacccccacccccaccggcacccagacccccaccaccacccccatcaccaccaccaccaccgtgacccccacccccacccccaccggcacccagacccccaccaccacccccacccccaccagcaccaagagcaccaccgtgacccccatcaccaccaccaccaccgtgaccgccacccccacccccaccggcacccagacccccaccatgatccccatcagcaccaccaccaccgtgaccccctag

SEQ ID NO: 128558 - DNA, 1230 bp, Artificial Sequence
  derived and/or modified sequence
gacatcgagtgcagaagcgtgaaggacccccacctgagcctggagcagctgggccagaaggtgcagtgcgacgtgagcgtgggcttcatctgcaagaacgaggaccagttcggcaacggccccttcggcctgtgctacgactacaagatcagagtgaactgctgctgcacccccaccagaggcaccaccaccggcagcagcagcgcccccacccccagcaccgtgcagaccaccaccaccagcgcctggacccccacccccacccccctgagcacccccagcatcatcagaaccaccggcctgagaccctaccccagcagcgtgctgatctgctgcgtgctgaacgacacctactacgcccccggcgaggaggtgtacaacggcacctacggcgacacctgctacttcgtgaactgcagcctgagctgcaccctggagttctacaactggagctgccccagcacccccagccccacccccacccccagcaagagcacccccacccccagcaagcccagcagcacccccagcaagcccacccccggcaccaagccccccgagtgccccgacttcgacccccccagacaggagaacgagacctggtggctgtgcgactgcttcatggccacctgcaagtacaacaacaccgtggagatcgtgaaggtggagtgcgagcccccccccatgcccacctgcagcaacggcctgcagcccgtgagagtggaggaccccgacggctgctgctggcactgggagtgcgactgctactgcaccggctggggcgacccccactacgtgaccttcgacggcctgtactacagctaccagggcaactgcacctacgtgctggtggaggagatcagccccagcgtggacaacttcggcgtgtacatcgacaactaccactgcgaccccaacgacaaggtgagctgccccagaaccctgatcgtgagacacgagacccaggaggtgctgatcaagaccgtgcacatgatgcccatgcaggtgcaggtgcaggtgaacagacaggccgtggccctgccctacaagaagtacggcctggaggtgtaccagagcggcatcaactacgtggtggacatccccgagctgggcgtgctggtgagctacaacggcctgagcttcagcgtgagactgccctaccacagattcggcaacaacaccaagggccagtgcggcacctgcaccaacaccaccagcgacgactgctag

SEQ ID NO: 128559 - DNA, 8454 bp, Artificial Sequence
  derived and/or modified sequence
atgggcctgcccctggccagactggccgccgtgtgcctggccctgagcctggccggcggcagcgagctgcagaccgagggcagaaccagaaaccacggccacaacgtgtgcagcacctggggcaacttccactacaagaccttcgacggcgacgtgttcagattccccggcctgtgcgactacaacttcgccagcgactgcagaggcagctacaaggagttcgccgtgcacctgaagagaggccccggccaggccgaggcccccgccggcgtggagagcatcctgctgaccatcaaggacgacaccatctacctgaccagacacctggccgtgctgaacggcgccgtggtgagcaccccccactacagccccggcctgctgatcgagaagagcgacgcctacaccaaggtgtacagcagagccggcctgaccctgatgtggaacagagaggacgccctgatgctggagctggacaccaagttcagaaaccacacctgcggcctgtgcggcgactacaacggcctgcagagctacagcgagttcctgagcgacggcgtgctgttcagccccctggagttcggcaacatgcagaagatcaaccagcccgacgtggtgtgcgaggaccccgaggaggaggtggcccccgccagctgcagcgagcacagagccgagtgcgagagactgctgaccgccgaggccttcgccgactgccaggacctggtgcccctggagccctacctgagagcctgccagcaggacagatgcagatgccccggcggcgacacctgcgtgtgcagcaccgtggccgagttcagcagacagtgcagccacgccggcggcagacccggcaactggagaaccgccaccctgtgccccaagacctgccccggcaacctggtgtacctggagagcggcagcccctgcatggacacctgcagccacctggaggtgagcagcctgtgcgaggagcacagaatggacggctgcttctgccccgagggcaccgtgtacgacgacatcggcgacagcggctgcgtgcccgtgagccagtgccactgcagactgcacggccacctgtacacccccggccaggagatcaccaacgactgcgagcagtgcgtgtgcaacgccggcagatgggtgtgcaaggacctgccctgccccggcacctgcgccctggagggcggcagccacatcaccaccttcgacggcaagacctacaccttccacggcgactgctactacgtgctggccaagggcgaccacaacgacagctacgccctgctgggcgagctggccccctgcggcagcaccgacaagcagacctgcctgaagaccgtggtgctgctggccgacaagaagaagaacgtggtggtgttcaagagcgacggcagcgtgctgctgaacgagctgcaggtgaacctgccccacgtgaccgccagcttcagcgtgttcagacccagcagctaccacatcatggtgagcatggccatcggcgtgagactgcaggtgcagctggcccccgtgatgcagctgttcgtgaccctggaccaggccagccagggccaggtgcagggcctgtgcggcaacttcaacggcctggagggcgacgacttcaagaccgccagcggcctggtggaggccaccggcgccggcttcgccaacacctggaaggcccagagcagctgccacgacaagctggactggctggacgacccctgcagcctgaacatcgagagcgccaactacgccgagcactggtgcagcctgctgaagaagaccgagacccccttcggcagatgccacagcgccgtggaccccgccgagtactacaagagatgcaagtacgacacctgcaactgccagaacaacgaggactgcctgtgcgccgccctgagcagctacgccagagcctgcaccgccaagggcgtgatgctgtggggctggagagagcacgtgtgcaacaaggacgtgggcagctgccccaacagccaggtgttcctgtacaacctgaccacctgccagcagacctgcagaagcctgagcgaggccgacagccactgcctggagggcttcgcccccgtggacggctgcggctgccccgaccacaccttcctggacgagaagggcagatgcgtgcccctggccaagtgcagctgctaccacagaggcctgtacctggaggccggcgacgtggtggtgagacaggaggagagatgcgtgtgcagagacggcagactgcactgcagacagatcagactgatcggccagagctgcaccgcccccaagatccacatggactgcagcaacctgaccgccctggccaccagcaagcccagagccctgagctgccagaccctggccgccggctactaccacaccgagtgcgtgagcggctgcgtgtgccccgacggcctgatggacgacggcagaggcggctgcgtggtggagaaggagtgcccctgcgtgcacaacaacgacctgtacagcagcggcgccaagatcaaggtggactgcaacacctgcacctgcaagagaggcagatgggtgtgcacccaggccgtgtgccacggcacctgcagcatctacggcagcggccactacatcaccttcgacggcaagtactacgacttcgacggccactgcagctacgtggccgtgcaggactactgcggccagaacagcagcctgggcagcttcagcatcatcaccgagaacgtgccctgcggcaccaccggcgtgacctgcagcaaggccatcaagatcttcatgggcagaaccgagctgaagctggaggacaagcacagagtggtgatccagagagacgagggccaccacgtggcctacaccaccagagaggtgggccagtacctggtggtggagagcagcaccggcatcatcgtgatctgggacaagagaaccaccgtgttcatcaagctggcccccagctacaagggcaccgtgtgcggcctgtgcggcaacttcgaccacagaagcaacaacgacttcaccaccagagaccacatggtggtgagcagcgagctggacttcggcaacagctggaaggaggcccccacctgccccgacgtgagcaccaaccccgagccctgcagcctgaacccccacagaagaagctgggccgagaagcagtgcagcatcctgaagagcagcgtgttcagcatctgccacagcaaggtggaccccaagcccttctacgaggcctgcgtgcacgacagctgcagctgcgacaccggcggcgactgcgagtgcttctgcagcgccgtggccagctacgcccaggagtgcaccaaggagggcgcctgcgtgttctggagaacccccgacctgtgccccatcttctgcgactactacaaccccccccacgagtgcgagtggcactacgagccctgcggcaacagaagcttcgagacctgcagaaccatcaacggcatccacagcaacatcagcgtgagctacctggagggctgctaccccagatgccccaaggacagacccatctacgaggaggacctgaagaagtgcgtgaccgccgacaagtgcggctgctacgtggaggacacccactacccccccggcgccagcgtgcccaccgaggagacctgcaagagctgcgtgtgcaccaacagcagccaggtggtgtgcagacccgaggagggcaagatcctgaaccagacccaggacggcgccttctgctactgggagatctgcggccccaacggcaccgtggagaagcacttcaacatctgcagcatcaccaccagacccagcaccctgaccaccttcaccaccatcaccctgcccaccacccccaccaccttcaccaccaccaccaccaccaccacccccaccagcagcaccgtgctgagcaccacccccaagctgtgctgcctgtggagcgactggatcaacgaggaccaccccagcagcggcagcgacgacggcgacagagagaccttcgacggcgtgtgcggcgcccccgaggacatcgagtgcagaagcgtgaaggacccccacctgagcctggagcagctgggccagaaggtgcagtgcgacgtgagcgtgggcttcatctgcaagaacgaggaccagttcggcaacggccccttcggcctgtgctacgactacaagatcagagtgaactgctgctggcccatggacaagtgcatcaccacccccagcccccccaccaccacccccagccccccccccaccagcaccaccaccctgccccccaccaccacccccagcccccccaccaccaccaccaccacccccccccccaccaccacccccagcccccccatcaccaccaccaccacccccccccccaccaccacccccagcccccccatcagcaccaccaccacccccccccccaccaccacccccagcccccccaccaccacccccagcccccccaccaccacccccagcccccccaccaccaccaccaccacccccccccccaccaccacccccagcccccccaccaccacccccatcaccccccccgccagcaccaccaccctgccccccaccaccacccccagcccccccaccaccaccaccaccacccccccccccaccaccacccccatcaccaccaccaccaccgtgacccccacccccacccccaccggcacccagacccccaccaccacccccatcaccaccaccaccaccgtgacccccacccccacccccaccggcacccagacccccaccagcacccccatcaccaccaccaccaccgtgacccccacccccacccccaccggcacccagacccccaccaccacccccatcaccaccaccaccaccgtgacccccacccccacccccaccggcacccagacccccacccccaccgccatcaccaccaccaccaccgtgacccccacccccacccccaccggcacccagacccccaccaccacccccatcaccaccaccaccaccgtgacccccacccccacccccaccggcacccagagccccacccccaccgccatcaccaccaccaccaccgtgacccccacccccacccccaccggcacccagacccccaccagcacccccatcaccaccaccaccaccgtgacccccacccccacccccaccggcacccagacccccacccccacccccatcagcaccaccaccaccgtgacccccacccccacccccaccggcacccagacccccaccaccacccccatcaccaccaccaccaccgtgacccccacccccacccccaccggcacccagacccccaccaccgtgctgatcaccaccaccaccaccatgacccccacccccacccccaccagcaccaagagcaccaccgtgacccccatcaccaccaccaccaccgtgaccgccacccccacccccaccggcacccagacccccaccatgatccccatcagcaccaccaccaccgtgacccccacccccacccccaccaccggcagcaccggcccccccacccacaccagcaccgcccccatcgccgagctgaccaccagcaaccccccccccgagagcagcaccccccagaccagcagaagcaccagcagccccctgaccgagagcaccaccctgctgagcaccctgccccccgccatcgagatgaccagcaccgccccccccagcacccccaccgcccccaccaccaccagcggcggccacaccctgagccccccccccagcaccaccaccagcccccccggcacccccaccagaggcaccaccaccggcagcagcagcgcccccacccccagcaccgtgcagaccaccaccaccagcgcctggacccccacccccacccccctgagcacccccagcatcatcagaaccaccggcctgagaccctaccccagcagcgtgctgatctgctgcgtgctgaacgacacctactacgcccccggcgaggaggtgtacaacggcacctacggcgacacctgctacttcgtgaactgcagcctgagctgcaccctggagttctacaactggagctgccccagcacccccagccccacccccacccccagcaagagcacccccacccccagcaagcccagcagcacccccagcaagcccacccccggcaccaagccccccgagtgccccgacttcgacccccccagacaggagaacgagacctggtggctgtgcgactgcttcatggccacctgcaagtacaacaacaccgtggagatcgtgaaggtggagtgcgagcccccccccatgcccacctgcagcaacggcctgcagcccgtgagagtggaggaccccgacggctgctgctggcactgggagtgcgactgctactgcaccggctggggcgacccccactacgtgaccttcgacggcctgtactacagctaccagggcaactgcacctacgtgctggtggaggagatcagccccagcgtggacaacttcggcgtgtacatcgacaactaccactgcgaccccaacgacaaggtgagctgccccagaaccctgatcgtgagacacgagacccaggaggtgctgatcaagaccgtgcacatgatgcccatgcaggtgcaggtgcaggtgaacagacaggccgtggccctgccctacaagaagtacggcctggaggtgtaccagagcggcatcaactacgtggtggacatccccgagctgggcgtgctggtgagctacaacggcctgagcttcagcgtgagactgccctaccacagattcggcaacaacaccaagggccagtgcggcacctgcaccaacaccaccagcgacgactgcatcctgcccagcggcgagatcgtgagcaactgcgaggccgccgccgaccagtggctggtgaacgaccccagcaagccccactgcccccacagcagcagcaccaccaagagacccgccgtgaccgtgcccggcggcggcaagaccaccccccacaaggactgcacccccagccccctgtgccagctgatcaaggacagcctgttcgcccagtgccacgccctggtgcccccccagcactactacgacgcctgcgtgttcgacagctgcttcatgcccggcagcagcctggagtgcgccagcctgcaggcctacgccgccctgtgcgcccagcagaacatctgcctggactggagaaaccacacccacggcgcctgcctggtggagtgccccagccacagagagtaccaggcctgcggccccgccgaggagcccacctgcaagagcagcagcagccagcagaacaacaccgtgctggtggagggctgcttctgccccgagggcaccatgaactacgcccccggcttcgacgtgtgcgtgaagacctgcggctgcgtgggccccgacaacgtgcccagagagttcggcgagcacttcgagttcgactgcaagaactgcgtgtgcctggagggcggcagcggcatcatctgccagcccaagagatgcagccagaagcccgtgacccactgcgtggaggacggcacctacctggccaccgaggtgaaccccgccgacacctgctgcaacatcaccgtgtgcaagtgcaacaccagcctgtgcaaggagaagcccagcgtgtgccccctgggcttcgaggtgaagagcaagatggtgcccggcagatgctgccccttctactggtgcgagagcaagggcgtgtgcgtgcacggcaacgccgagtaccagcccggcagccccgtgtacagcagcaagtgccaggactgcgtgtgcaccgacaaggtggacaacaacaccctgctgaacgtgatcgcctgcacccacgtgccctgcaacaccagctgcagccccggcttcgagctgatggaggcccccggcgagtgctgcaagaagtgcgagcagacccactgcatcatcaagagacccgacaaccagcacgtgatcctgaagcccggcgacttcaagagcgaccccaagaacaactgcaccttcttcagctgcgtgaagatccacaaccagctgatcagcagcgtgagcaacatcacctgccccaacttcgacgccagcatctgcatccccggcagcatcaccttcatgcccaacggctgctgcaagacctgcacccccagaaacgagaccagagtgccctgcagcaccgtgcccgtgaccaccgaggtgagctacgccggctgcaccaagaccgtgctgatgaaccactgcagcggcagctgcggcaccttcgtgatgtacagcgccaaggcccaggccctggaccacagctgcagctgctgcaaggaggagaagaccagccagagagaggtggtgctgagctgccccaacggcggcagcctgacccacacctacacccacatcgagagctgccagtgccaggacaccgtgtgcggcctgcccaccggcaccagcagaagagccagaagaagccccagacacctgggcagcggctag

SEQ ID NO: 128560 - protein, 96 aa, Artificial Sequence
  derived and/or modified sequence
MAISKSTVVVVILCFILIQELGIYGEDPHMDAAKKIDCGGKCNSRCSKARRQKMCIRACNSCCKKCRCVPPGTSGNRDLCPCYARLTTHGGKLKCP

SEQ ID NO: 128561 - protein, 5706 aa, Artificial Sequence
  derived and/or modified sequence
MGAPSACRTLVLALAAMLVVPQAETQGPVEPSWENAGHTMDGGAPTSSPTRRVSFVPPVTVFPSLSPLNPAHNGRVCSTWGDFHYKTFDGDVFRFPGLCNYVFSEHCRAAYEDFNVQLRRGLVGSRPVVTRVVIKAQGLVLEASNGSVLINGQREELPYSRTGLLVEQSGDYIKVSIRLVLTFLWNGEDSALLELDPKYANQTCGLCGDFNGLPAFNEFYAHNARLTPLQFGNLQKLDGPTEQCPDPLPLPAGNCTDEEGICHRTLLGPAFAECHALVDSTAYLAACAQDLCRCPTCPCATFVEYSRQCAHAGGQPRNWRCPELCPRTCPLNMQHQECGSPCTDTCSNPQRAQLCEDHCVDGCFCPPGSTVLDDITHSGCLPLGQCPCTHGGRTYSPGTSFNTTCSSCTCSGGLWQCQDLPCPGTCSVQGGAHISTYDEKLYDLHGDCSYVLSKKCADSSFTVLAELRKCGLTDNENCLKAVTLSLDGGDTAIRVQADGGVFLNSIYTQLPLSAANITLFTPSSFFIVVQTGLGLQLLVQLVPLMQVFVRLDPAHQGQMCGLCGNFNQNQADDFTALSGVVEATGAAFANTWKAQAACANARNSFEDPCSLSVENENYARHWCSRLTDPNSAFSRCHSIINPKPFHSNCMFDTCNCERSEDCLCAALSSYVHACAAKGVQLSDWRDGVCTKYMQNCPKSQRYAYVVDACQPTCRGLSEADVTCSVSFVPVDGCTCPAGTFLNDAGACVPAQECPCYAHGTVLAPGEVVHDEGAVCSCTGGKLSCLGASLQKSTGCAAPMVYLDCSNSSAGTPGAECLRSCHTLDVGCFSTHCVSGCVCPPGLVSDGSGGCIAEEDCPCVHNEATYKPGETIRVDCNTCTCRNRRWECSHRLCLGTCVAYGDGHFITFDGDRYSFEGSCEYILAQDYCGDNTTHGTFRIVTENIPCGTTGTTCSKAIKLFVESYELILQEGTFKAVARGPGGDPPYKIRYMGIFLVIETHGMAVSWDRKTSVFIRLHQDYKGRVCGLCGNFDDNAINDFATRSRSVVGDALEFGNSWKLSPSCPDALAPKDPCTANPFRKSWAQKQCSILHGPTFAACRSQVDSTKYYEACVNDACACDSGGDCECFCTAVAAYAQACHDAGLCVSWRTPDTCPLFCDFYNPHGGCEWHYQPCGAPCLKTCRNPSGHCLVDLPGLEGCYPKCPPSQPFFNEDQMKCVAQCGCYDKDGNYYDVGARVPTAENCQSCNCTPSGIQCAHSLEACTCTYEDRTYSYQDVIYNTTDGLGACLIAICGSNGTIIRKAVACPGTPATTPFTFTTAWVPHSTTSPALPVSTVCVREVCRWSSWYNGHRPEPGLGGGDFETFENLRQRGYQVCPVLADIECRAAQLPDMPLEELGQQVDCDRMRGLMCANSQQSPPLCHDYELRVLCCEYVPCGPSPAPGTSPQPSLSASTEPAVPTPTQTTATEKTTLWVTPSIRSTAALTSQTGSSSGPVTVTPSAPGTTTCQPRCQWTEWFDEDYPKSEQLGGDVESYDKIRAAGGHLCQQPKDIECQAESFPNWTLAQVGQKVHCDVHFGLVCRNWEQEGVFKMCYNYRIRVLCCSDDHCRGRATTPPPTTELETATTTTTQALFSTPQPTSSPGLTRAPPASTTAVPTLSEGLTSPRYTSTLGTATTGGPTTPAGSTEPTVPGVATSTLPTRSALPGTTGSLGTWRPSQPPTLAPTTMATSRARPTGTASTASKEPLTTSLAPTLTSELSTSQAETSTPRTETTMSPLTNTTTSQGTTRCQPKCEWTEWFDVDFPTSGVAGGDMETFENIRAAGGKMCWAPKSIECRAENYPEVSIDQVGQVLTCSLETGLTCKNEDQTGRFNMCFNYNVRVLCCDDYSHCPSTPATSSTATPSSTPGTTWILTKPTTTATTTASTGSTATPTSTLRTAPPPKVLTTTATTPTVTSSKATPSSSPGTATALPALRSTATTPTATSVTPIPSSSLGTTWTRLSQTTTPTATMSTATPSSTPETAHTSTVLTATATTTGATGSVATPSSTPGTAHTTKVPTTTTTGFTATPSSSPGTALTPPVWISTTTTPTTRGSTVTPSSIPGTTHTATVLTTTTTTVATGSMATPSSSTQTSGTPPSLTTTATTITATGSTTNPSSTPGTTPIPPVLTTTATTPAATSNTVTPSSALGTTHTPPVPNTMATTHGRSLPPSSPHTVRTAWTSATSGILGTTHITEPSTVTSHTLAATTGTTQHSTPALSSPHPSSRTTESPPSPGTTTPGHTTATSRTTATATPSKTRTSTLLPSSPTSAPITTVVTMGCEPQCAWSEWLDYSYPMPGPSGGDFDTYSNIRAAGGAVCEQPLGLECRAQAQPGVPLRELGQVVECSLDFGLVCRNREQVGKFKMCFNYEIRVFCCNYGHCPSTPATSSTAMPSSTPGTTWILTELTTTATTTESTGSTATPSSTPATAGTPHVSTTATTPTVTSSKATPFSSPGTATALPALRSTATTPTATSFTAIPSSSLGTTWTRLSQTTTPTATMSTATPSSTPETVHTSTVLTTTATTTGATGSVATPSSTPGTAHTTKVLTTTTTGFTATPSSSPGTARTLPVWISTTTTPTTRGSTVTPSSIPGTTHTPTVLTTTTTTVATGSMATPSSSTQTSGTPPSLTTTATTITATGSTTNPSSTPGTTPIPPVLTTTATTPAATSSTVTPSSALGTTHTPPVPNTTATTHGRSLSPSSPHTVRTAWTSATSGTLGTTHITEPSTGTSHTPAATTGTTQHSTPALSSPHPSSRTTESPPSPGTTTPGHTRATSRTTATATPSKTRTSTLLPSSPTSAPITTVVTMGCEPQCAWSEWLDYSYPMPGPSGGDFDTYSNIRAAGGAVCEQPLGLECRAQAQPGVPLRELGQVVECSLDFGLVCRNREQVGKFKMCFNYEIRVFCCNYGHCPSTPATSSTATPSSTPGTTWILTEQTTAATTTATTGSTAIPSSTPGTAPPPKVLTSTATTPTATSSKATSSSSPRTATTLPVLTSTATKSTATSFTPIPSFTLGTTGTLPEQTTTPMATMSTIHPSSTPETTHTSTVLTTKATTTRATSSMSTPSSTPGTTWILTELTTAATTTAATGPTATPSSTPGTTWILTEPSTTATVTVPTGSTATASSTRATAGTLKVLTSTATTPTVISSRATPSSSPGTATALPALRSTATTPTATSVTAIPSSSLGTAWTRLSQTTTPTATMSTATPSSTPETVHTSTVLTTTTTTTRATGSVATPSSTPGTAHTTKVPTTTTTGFTATPSSSPGTALTPPVWISTTTTPTTRGSTVTPSSIPGTTHTATVLTTTTTTVATGSMATPSSSTQTSGTPPSLTTTATTITATGSTTNPSSTPGTTPIPPVLTTTATTPAATSSTVTPSSALGTTHTPPVPNTTATTHGRSLPPSSPHTVRTAWTSATSGILGTTHITEPSTVTSHTPAATTSTTQHSTPALSSPHPSSRTTESPPSPGTTTPGHTRGTSRTTATATPSKTRTSTLLPSSPTSAPITTVVTTGCEPQCAWSEWLDYSYPMPGPSGGDFDTYSNIRAAGGAVCEQPLGLECRAQAQPGVPLRELGQVVECSLDFGLVCRNREQVGKFKMCFNYEIRVFCCNYGHCPSTPATSSTATPSSTPGTTWILTKLTTTATTTESTGSTATPSSTPGATAGTPHVSTTATTPTVTSSKATPFSSPGTATALPALRSTATTPTATSFTAIPSSSLGTTWTRLSQTTTPTATMSTATPSSTPETAHTSTVLTTTATTTRATGSVATPSSTPGTAHTTKVPTTTTTGFTVTPSSSPGTARTPPVWISTTTTPTTSGSTVTPSSVPGTTHTPTVLTTTTTTVATGSMATPSSSTQTSGTPPSLITTATTITATGSTTNPSSTPGTTPIPPVLTTTATTPAATSSTVTPSSALGTTHTPPVPNTTATTHGRSLSPSSPHTVRTAWTSATSGTLGTTHITEPSTGTSHTPAATTGTTQHSTPALSSPHPSSRTTESPPSPGTTTPGHTTATSRTTATATPSKTRTSTLLPSSPTSAPITTVVTTGCEPQCAWSEWLDYSYPMPGPSGGDFDTYSNIRAAGGAVCEQPLGLECRAQAQPGVPLGELGQVVECSLDFGLVCRNREQVGKFKMCFNYEIRVFCCNYGHCPSTPATSSTAMPSSTPGTTWILTELTTTATTTASTGSTATPSSTPGTAPPPKVLTSPATTPTATSSKATSSSSPRTATTLPVLTSTATKSTATSVTPIPSSTLGTTGTLPEQTTTPVATMSTIHPSSTPETTHTSTVLTTKATTTRATSSTSTPSSTPGTTWILTELTTAATTTAATGPTATPSSTPGTTWILTELTTTATTTASTGSTATPSSTPGTTWILTEPSTTATVTVPTGSTATASSTQATAGTPHVSTTATTPTVTSSKATPSSSPGTATALPALRSTATTPTATSFTAIPSSSLGTTWTRLSQTTTPTATMSTATPSSTPETVHTSTVLTATATTTGATGSVATPSSTPGTAHTTKVPTTTTTGFTATPSSSPGTALTPPVWISTTTTPTTTTPTTSGSTVTPSSIPGTTHTARVLTTTTTTVATGSMATPSSSTQTSGTPPSLTTTATTITATGSTTNPSSTPGTTPITPVLTSTATTPAATSSKATSSSSPRTATTLPVLTSTATKSTATSFTPIPSSTLWTTWTVPAQTTTPMSTMSTIHTSSTPETTHTSTVLTTTATMTRATNSTATPSSTLGTTRILTELTTTATTTAATGSTATLSSTPGTTWILTEPSTIATVMVPTGSTATASSTLGTAHTPKVVTTMATMPTATASTVPSSSTVGTTRTPAVLPSSLPTFSVSTVSSSVLTTLRPTGFPSSHFSTPCFCRAFGQFFSPGEVIYNKTDRAGCHFYAVCNQHCDIDRFQGACPTSPPPVSSAPLSSPSPAPGCDNAIPLRQVNETWTLENCTVARCVGDNRVVLLDPKPVANVTCVNKHLPIKVSDPSQPCDFHYECECICSMWGGSHYSTFDGTSYTFRGNCTYVLMREIHARFGNLSLYLDNHYCTASATAAAARCPRALSIHYKSMDIVLTVTMVHGKEEGLILFDQIPVSSGFSKNGVLVSVLGTTTMRVDIPALGVSVTFNGQVFQARLPYSLFHNNTEGQCGTCTNNQRDDCLQRDGTTAASCKDMAKTWLVPDSRKDGCWAPTGTPPTASPAAPVSSTPTPTPCPPQPLCDLMLSQVFAECHNLVPPGPFFNACISDHCRGRLEVPCQSLEAYAELCRARGVCSDWRGATGGLCDLTCPPTKVYKPCGPIQPATCNSRNQSPQLEGMAEGCFCPEDQILFNAHMGICVQACPCVGPDGFPKFPGERWVSNCQSCVCDEGSVSVQCKPLPCDAQGQPPPCNRPGFVTVTRPRAENPCCPETVCVCNTTTCPQSLPVCPPGQESICTQEEGDCCPTFRCRPQLCSYNGTFYGVGATFPGALPCHMCTCLSGDTQDPTVQCQEDACNNTTCPQGFEYKRVAGQCCGECVQTACLTPDGQPVQLNETWVNSHVDNCTVYLCEAEGGVHLLTPQPASCPDVSSCRGSLRKTGCCYSCEEDSCQVRINTTILWHQGCETEVNITFCEGSCPGASKYSAEAQAMQHQCTCCQERRVHEETVPLHCPNGSAILHTYTHVDECGCTPFCVPAPMAPPHTRGFPAQEATAV

SEQ ID NO: 128562 - protein, 5528 aa, Artificial Sequence
  derived and/or modified sequence
APRMGAPSACRTLVLALAAMLVVPQAGKSPPLRPLSRNSGAGLDGGAPTSSPTRRVSFVPPVTVFPSLSRKQMLPLPAGKGVFASPKGGGPDLGVQLPPALNPAHNGRVCSTWGDFHYKTFDGDVFRFPGLCNYVFSEHCRAAYEDFNVQLRRGLVGSRPVVTRVVIKAQGLVLEASNGSVLINGQREELPYSRTGLLVEQSGDYIKVSIRLVLTFLWNGEDSALLELDPKYANQTCGLCGDFNGLPAFNEFYAHNARLTPLQFGNLQKLDGPTEQCPDPLPLPAGNCTDEEGICHRTLLGPAFAECHALVDSTAYLAACAQDLCRCPTCPCATFVEYSRQCAHAGGQPRNWRCPELCPRTCPLNMQHQECGSPCTDTCSNPQRAQLCEDHCVDGCFCPPGRSCTVLDDITHSGCLPLGQCPCTHGGRTYSPGTSFNTTCSSCTCSGGLWQCQDLPCPGTCSVQGGAHISTYDEKLYDLHGDCSYVLSKKCADSSFTVLAELRKCGLTDNENCLKAVTLSLDGGDTAIRVQADGGVFLNSIYTQLPLSAANITLFTPSSFFIVVQTGLGLQLLVQLVPLMQVFVRLDPAHQGQMCGLCGNFNQNQADDFTALSGVVEATGAAFANTWKAQAACANARNSFEDPCSLSVENENYARHWCSRLTDPNSAFSRCHSIINPKPFHSNCMFDTCNCERSEDCLCAALSSYVHACAAKGVQLSDWRDGVCTKYMQNCPKSQRYAYVVDACQPTCRGLSEADVTCSVSFVPVDGCTCPAGTFLNDAGACVPAQECPCYAHGTVLAPGEVVHDEGAVCSCTGGKLSCLGASLQKSTGCAAPMVYLDCSNSSAGTPGAECLRSCHTLDVGCFSTHCVSGCVCPPGLVSDGSGGCIAEEDCPCVHNEATYKPGETIRVDCNTCTCRNRRWECSHRLCLGTCVAYGDGHFITFDGDRYSFEGSCEYILAQDYCGDNTTHGTFRIVTENIPCGTTGTTCSKAIKLFVEVRTAPAVSTPDPAANEPAPREASVGFRQRLPPLQSYELILQEGTFKAVARGPGGDPPYKIRYMGIFLVIETHGMAVSWDRKTSVFIRLHQDYKGRVCGLCGNFDDNAINDFATRSRSVVGDALEFGNSWKLSPSCPDALAPKDPCTANPFRKSWAQKQCSILHGPTFAACRSQVDSTKYYEACVNDACACDSGGDCECFCTAVAAYAQACHDAGLCVSWRTPDTCPLFCDFYNPHGGCEWHYQPCGAPCLKTCRNPSGHCLVDLPGLEGCYPKCPPSQPFFNEDQMKCVAQCGCYDKDGNYYDVGARVPTAENCQSCNCTPSGIQCAHSLEACTCTYEDRTYSYQDVIYNTTDGLGACLIAICGSNGTIIRKAVACPGTPATTPFTFTTAWVPHSTTSPALPVSTVCVREVCRWSSWYNGHRPEPGLGGGDFETFENLRQRGYQVCPVLADIECRAAQLPDMPLEELGQQVDCDRMRGLMCANSQQSPPLCHDYELRVLCCEYVPCGPSPAPGTSPQPSLSASTEPAVPTPTQTTATEKTTLWVTPSIRSTAALTSQTGSSSGPVTVTPSAPGTTTCQPRCQWTEWFDEDYPKSEQLGGDVESYDKIRAAGGHLCQQPKDIECQAESFPNWTLAQVGQKVHCDVHFGLVCRNWEQEGVFKMCYNYRIRVLCCSDDHCRGRATTPPPTTELETATTTTTQALFSTPQPTSSPGLTRAPPASTTAVPTLSEGLTSPRYTSTLGTATTGGPTTPAGSTEPTVPGVATSTLPTRSALPGTTGSLGTWRPSQPPTLAPTTMATSRARPTGTASTASKEPLTTSLAPTLTSELSTSQAETSTPRTETTMSPLTNTTTSQGTTRCQPKCEWTEWFDVDFPTSGVAGGDMETFENIRAAGGKMCWAPKSIECRAENYPEVSIDQVGQVLTCSLETGLTCKNEDQTGRFNMCFNYNVRVLCCDDYSHCPSTPATSSTATPSSTPGTTWILTKPTTTATTTASTGSTATPTSTLRTAPPPKVLTTTATTPTVTSSKATPSSSPGTATALPALRSTATTPTATSVTPIPSSSLGTTWTRLSQTTTPTATMSTATPSSTPETAHTSTVLTATATTTGATGSVATPSSTPGTAHTTKVPTTTTTGFTATPSSSPGTALTPPVWISTTTTPTTRGSTVTPSSIPGTTHTATVLTTTTTTVATGSMATPSSSTQTSGTTHTPPVPNTMATTHGRSLPPSSPHTVRTAWTSATSGILGTTHITEPSTVTSHTLAATTGTTQHSTPALSSPHPSSRTTESPPSPGTTTPGHTTATSRTTATATPSKTRTSTLLPSSPTSAPITTVVTMGCEPQCAWSEWLDYSYPMPGPSGGDFDTYSNIRAAGGAVCEQPLGLECRAQAQPGVPLRELGQVVECSLDFGLVCRNREQVGKFKMCFNYEIRVFCCNYGHCPSTPATSSTAMPSSTPGTTWILTELTTTATTTESTGSTATPSSTPGTTWILTEPSTTATVTVPTGSTATASSTQATAGTPHVSTTATTPTVTSSKATPFSSPGTATALPALRSTATTPTATSFTAIPSSSLGTTWTRLSQTTTPTATMSTATPSSTPETVHTSTVLTTTATTTGATGSVATPSSTPGTAHTTKVLTTTTTGFTATPSSSPGTARTLPVWISTTTTPTTRGSTVTPSSIPGTTHTPTVLTTTTTTVATGSMATPSSSTQTSGTTHTPPVPNTTATTHGRSLSPSSPHTVRTAWTSATSGTLGTTHITEPSTGTSHTPAATTGTTQHSTPALSSPHPSSRTTESPPSPGTTTPGHTRATSRTTATATPSKTRTSTLLPSSPTSAPITTVVTMGCEPQCAWSEWLDYSYPMPGPSGGDFDTYSNIRAAGGAVCEQPLGLECRAQAQPGVPLRELGQVVECSLDFGLVCRNREQVGKFKMCFNYEIRVFCCNYGHCPSTPATSSTATPSSTPGTTWILTEQTTAATTTATTGSTAIPSSTPGTAPPPKVLTSTATTPTATSSKATSSSSPRTATTLPVLTSTATKSTATSFTPIPSFTLGTTGTLPEQTTTPMATMSTIHPSSTPETTHTSTVLTTKATTTRATSSMSTPSSTPGTTWILTELTTAATTTAATGPTATPSSTPGTTWILTEPSTTATVTVPTGSTATASSTRATAGTLKVLTSTATTPTVISSRATPSSSPGTATALPALRSTATTPTATSVTAIPSSSLGTAWTRLSQTTTPTATMSTATPSSTPETVHTSTVLTTTTTTTRATGSVATPSSTPGTAHTTKVPTTTTTGFTATPSSSPGTALTPPVWISTTTTPTTRGSTVTPSSIPGTTHTATVLTTTTTTVATGSMATPSSSTQTSGTTHTPPVPNTTATTHGRSLPPSSPHTVRTAWTSATSGILGTTHITEPSTVTSHTPAATTSTTQHSTPALSSPHPSSRTTESPPSPGTTTPGHTRGTSRTTATATPSKTRTSTLLPSSPTSAPITTVVTTGCEPQCAWSEWLDYSYPMPGPSGGDFDTYSNIRAAGGAVCEQPLGLECRAQAQPGVPLRELGQVVECSLDFGLVCRNREQVGKFKMCFNYEIRVFCCNYGHCPSTPATSSTATPSSTPGTTWILTKLTTTATTTESTGSTATPSSTPGTTWILTEPSTTATVTVPTGSTATASSTQATAGTPHVSTTATTPTVTSSKATPFSSPGTATALPALRSTATTPTATSFTAIPSSSLGTTWTRLSQTTTPTATMSTATPSSTPETAHTSTVLTTTATTTRATGSVATPSSTPGTAHTTKVPTTTTTGFTVTPSSSPGTARTPPVWISTTTTPTTSGSTVTPSSVPGTTHTPTVLTTTTTTVATGSMATPSSSTQTSGTTHTPPVPNTTATTHGRSLSPSSPHTVRTAWTSATSGTLGTTHITEPSTGTSHTPAATTGTTQHSTPALSSPHPSSRTTESPPSPGTTTPGHTTATSRTTATATPSKTRTSTLLPSSPTSAPITTVVTTGCEPQCAWSEWLDYSYPMPGPSGGDFDTYSNIRAAGGAVCEQPLGLECRAQAQPGVPLGELGQVVECSLDFGLVCRNREQVGKFKMCFNYEIRVFCCNYGHCPSTPATSSTAMPSSTPGTTWILTELTTTATTTASTGSTATPSSTPGTAPPPKVLTSPATTPTATSSKATSSSSPRTATTLPVLTSTATKSTATSVTPIPSSTLGTTGTLPEQTTTPVATMSTIHPSSTPETTHTSTVLTTKATTTRATSSTSTPSSTPGTTWILTELTTAATTTAATGPTATPSSTPGTTWILTELTTTATTTASTGSTATPSSTPGTTWILTEPSTTATVTVPTGSTATASSTQATAGTPHVSTTATTPTVTSSKATPSSSPGTATALPALRSTATTPTATSFTAIPSSSLGTTWTRLSQTTTPTATMSTATPSSTPETVHTSTVLTATATTTGATGSVATPSSTPGTAHTTKVPTTTTTGFTATPSSSPGTALTPPTTTPMSTMSTIHTSSTPETTHTSTVLTTTATMTRATNSTATPSSTLGTTRILTELTTTATTTAATGSTATLSSTPGTTWILTEPSTIATVMVPTGSTATASSTLGTAHTPKVVTTMATMPTATASTVPSSSTVGTTRTPAVLPSSLPTFSVSTVSSSVLTTLRPTGFPSSHFSTPCFCRAFGQFFSPGEVIYNKTDRAGCHFYAVCNQHCDIDRFQGACPTSPPPVSSAPLSSPSPAPGCDNAIPLRQVNETWTLENCTVARCVGDNRVVLLDPKPVANVTCVNKHLPIKVSDPSQPCDFHYECECECVGGRGITPGAGICSMWGGSHYSTFDGTSYTFRGNCTYVLMREIHARFGNLSLYLDNHYCTASATAAAARCPRALSIHYKSMDIVLTVTMVHGKEEGLILFDQIPVSSGFSKNGVLVSVLGTTTMRVDIPALGVSVTFNGQVFQARLPYSLFHNNTEGQCGTCTNNQRDDCLQRDGTTAASCKDMAKTWLVPDSRKDGCWAPTGTPPTASPAAPVSSTPTPTPCPPQPLCDLMLSQVFAECHNLVPPGPFFNACISDHCRGRLEVPCQSLEAYAELCRARGVCSDWRGATGGLCDLTCPPTKVYKPCGPIQPATCNSRNQSPQLEGMAEGCFCPEDQILFNAHMGICVQACPCVGPDGFPKFPGERWVSNCQSCVCDEGSVSVQCKPLPCDAQGQPPPCNRPGFVTVTRPRAENPCCPETVCVCNTTTCPQSLPVCPPGQESICTQEEGDCCPTFRCRPQLCSYNGTFYGVGATFPGALPCHMCTCLSGDTQDPTVQCQEDACNNTTCPQGFEYKRVAGQCCGECVQTACLTPDGQPVQLNETWVNSHVDNCTVYLCEAEGGVHLLTPQPASCPDVSSCRGSLRKTGCCYSCEEDSCQVRINTTILWHQGCETEVNITFCEGSCPGASKYSAEAQAMQHQCTCCQERRVHEETVPLHCPNGSAILHTYTHAVQVLCGLLAWGLQAGGHIRGAVQDPQQPLKDQEASGKARQGGGYRQTVAWGDKSNARAWLQKPVVWVQSGAFPTPGPASALCPW

SEQ ID NO: 128563 - protein, 5765 aa, Artificial Sequence
  derived and/or modified sequence
MGAPSACRTLVLALAAMLVVPQAETQGPVEPSWENAGHTMDGGAPTSSPTRRVSFVPPVTVFPSLSPLNPAHNGRVCSTWGDFHYKTFDGDVFRFPGLCNYVFSEHCRAAYEDFNVQLRRGLVGSRPVVTRVVIKAQGLVLEASNGSVLINGQREELPYSRTGLLVEQSGDYIKVSIRLVLTFLWNGEDSALLELDPKYANQTCGLCGDFNGLPAFNEFYAHNARLTPLQFGNLQKLDGPTEQCPDPLPLPAGNCTDEEGICHRTLLGPAFAECHALVDSTAYLAACAQDLCRCPTCPCATFVEYSRQCAHAGGQPRNWRCPELCPRTCPLNMQHQECGSPCTDTCSNPQRAQLCEDHCVDGCFCPPGRSCTVLDDITHSGCLPLGQCPCTHGGRTYSPGTSFNTTCSSCTCSGGLWQCQDLPCPGTCSVQGGAHISTYDEKLYDLHGDCSYVLSKKCADSSFTVLAELRKCGLTDNENCLKAVTLSLDGGDTAIRVQADGGVFLNSIYTQLPLSAANITLFTPSSFFIVVQTGLGLQLLVQLVPLMQVFVRLDPAHQGQMCGLCGNFNQNQADDFTALSGVVEATGAAFANTWKAQAACANARNSFEDPCSLSVENENYARHWCSRLTDPNSAFSRCHSIINPKPFHSNCMFDTCNCERSEDCLCAALSSYVHACAAKGVQLSDWRDGVCTKYMQNCPKSQRYAYVVDACQPTCRGLSEADVTCSVSFVPVDGCTCPAGTFLNDAGACVPAQECPCYAHGTVLAPGEVVHDEGAVCSCTGGKLSCLGASLQKSTGCAAPMVYLDCSNSSAGTPGAECLRSCHTLDVGCFSTHCVSGCVCPPGLVSDGSGGCIAEEDCPCVHNEATYKPGETIRVDCNTCTCRNRRWECSHRLCLGTCVAYGDGHFITFDGDRYSFEGSCEYILAQDYCGDNTTHGTFRIVTENIPCGTTGTTCSKAIKLFVESYELILQEGTFKAVARGPGGDPPYKIRYMGIFLVIETHGMAVSWDRKTSVFIRLHQDYKGRVCGLCGNFDDNAINDFATRSRSVVGDALEFGNSWKLSPSCPDALAPKDPCTANPFRKSWAQKQCSILHGPTFAACRSQVDSTKYYEACVNDACACDSGGDCECFCTAVAAYAQACHDAGLCVSWRTPDTCPLFCDFYNPHGGCEWHYQPCGAPCLKTCRNPSGHCLVDLPGLEGCYPKCPPSQPFFNEDQMKCVAQCGCYDKDGNYYDVGARVPTAENCQSCNCTPSGIQCAHSLEACTCTYEDRTYSYQDVIYNTTDGLGACLIAICGSNGTIIRKAVACPGTPATTPFTFTTAWVPHSTTSPALPVSTVCVREVCRWSSWYNGHRPEPGLGGGDFETFENLRQRGYQVCPVLADIECRAAQLPDMPLEELGQQVDCDRMRGLMCANSQQSPPLCHDYELRVLCCEYVPCGPSPAPGTSPQPSLSASTEPAVPTPTQTTATEKTTLWVTPSIRSTAALTSQTGSSSGPVTVTPSAPGTTTCQPRCQWTEWFDEDYPKSEQLGGDVESYDKIRAAGGHLCQQPKDIECQAESFPNWTLAQVGQKVHCDVHFGLVCRNWEQEGVFKMCYNYRIRVLCCSDDHCRGRATTPPPTTELETATTTTTQALFSTPQPTSSPGLTRAPPASTTAVPTLSEGLTSPRYTSTLGTATTGGPTTPAGSTEPTVPGVATSTLPTRSALPGTTGSLGTWRPSQPPTLAPTTMATSRARPTGTASTASKEPLTTSLAPTLTSELSTSQAETSTPRTETTMSPLTNTTTSQGTTRCQPKCEWTEWFDVDFPTSGVAGGDMETFENIRAAGGKMCWAPKSIECRAENYPEVSIDQVGQVLTCSLETGLTCKNEDQTGRFNMCFNYNVRVLCCDDYSHCPSTPATSSTATPSSTPGTTWILTKPTTTATTTASTGSTATPTSTLRTAPPPKVLTTTATTPTVTSSKATPSSSPGTATALPALRSTATTPTATSVTPIPSSSLGTTWTRLSQTTTPTATMSTATPSSTPETAHTSTVLTATATTTGATGSVATPSSTPGTAHTTKVPTTTTTGFTATPSSSPGTALTPPVWISTTTTPTTRGSTVTPSSIPGTTHTATVLTTTTTTVATGSMATPSSSTQTSGTPPSLTTTATTITATGSTTNPSSTPGTTPIPPVLTTTATTPAATSNTVTPSSALGTTHTPPVPNTMATTHGRSLPPSSPHTVRTAWTSATSGILGTTHITEPSTVTSHTLAATTGTTQHSTPALSSPHPSSRTTESPPSPGTTTPGHTTATSRTTATATPSKTRTSTLLPSSPTSAPITTVVTMGCEPQCAWSEWLDYSYPMPGPSGGDFDTYSNIRAAGGAVCEQPLGLECRAQAQPGVPLRELGQVVECSLDFGLVCRNREQVGKFKMCFNYEIRVFCCNYGHCPSTPATSSTAMPSSTPGTTWILTELTTTATTTESTGSTATPSSTPGTTWILTEPSTTATVTVPTGSTATASSTQATAGTPHVSTTATTPTVTSSKATPFSSPGTATALPALRSTATTPTATSFTAIPSSSLGTTWTRLSQTTTPTATMSTATPSSTPETVHTSTVLTTTATTTGATGSVATPSSTPGTAHTTKVLTTTTTGFTATPSSSPGTARTLPVWISTTTTPTTRGSTVTPSSIPGTTHTPTVLTTTTTTVATGSMATPSSSTQTSGTPPSLTTTATTITATGSTTNPSSTPGTTPIPPVLTTTATTPAATSSTVTPSSALGTTHTPPVPNTTATTHGRSLSPSSPHTVRTAWTSATSGTLGTTHITEPSTGTSHTPAATTGTTQHSTPALSSPHPSSRTTESPPSPGTTTPGHTRATSRTTATATPSKTRTSTLLPSSPTSAPITTVVTMGCEPQCAWSEWLDYSYPMPGPSGGDFDTYSNIRAAGGAVCEQPLGLECRAQAQPGVPLRELGQVVECSLDFGLVCRNREQVGKFKMCFNYEIRVFCCNYGHCPSTPATSSTATPSSTPGTTWILTEQTTAATTTATTGSTAIPSSTPGTAPPPKVLTSTATTPTATSSKATSSSSPRTATTLPVLTSTATKSTATSFTPIPSFTLGTTGTLPEQTTTPMATMSTIHPSSTPETTHTSTVLTTKATTTRATSSMSTPSSTPGTTWILTELTTAATTTAATGPTATPSSTPGTTWILTEPSTTATVTVPTGSTATASSTRATAGTLKVLTSTATTPTVISSRATPSSSPGTATALPALRSTATTPTATSVTAIPSSSLGTAWTRLSQTTTPTATMSTATPSSTPETVHTSTVLTTTTTTTRATGSVATPSSTPGTAHTTKVPTTTTTGFTATPSSSPGTALTPPVWISTTTTPTTRGSTVTPSSIPGTTHTATVLTTTTTTVATGSMATPSSSTQTSGTPPSLTTTATTITATGSTTNPSSTPGTTPIPPVLTTTATTPAATSSTVTPSSALGTTHTPPVPNTTATTHGRSLPPSSPHTVRTAWTSATSGILGTTHITEPSTVTSHTPAATTSTTQHSTPALSSPHPSSRTTESPPSPGTTTPGHTRGTSRTTATATPSKTRTSTLLPSSPTSAPITTVVTTGCEPQCAWSEWLDYSYPMPGPSGGDFDTYSNIRAAGGAVCEQPLGLECRAQAQPGVPLRELGQVVECSLDFGLVCRNREQVGKFKMCFNYEIRVFCCNYGHCPSTPATSSTATPSSTPGTTWILTKLTTTATTTESTGSTATPSSTPGTTWILTEPSTTATVTVPTGSTATASSTQATAGTPHVSTTATTPTVTSSKATPFSSPGTATALPALRSTATTPTATSFTAIPSSSLGTTWTRLSQTTTPTATMSTATPSSTPETAHTSTVLTTTATTTRATGSVATPSSTPGTAHTTKVPTTTTTGFTVTPSSSPGTARTPPVWISTTTTPTTSGSTVTPSSVPGTTHTPTVLTTTTTTVATGSMATPSSSTQTSGTPPSLITTATTITATGSTTNPSSTPGTTPIPPVLTTTATTPAATSSTVTPSSALGTTHTPPVPNTTATTHGRSLSPSSPHTVRTAWTSATSGTLGTTHITEPSTGTSHTPAATTGTTQHSTPALSSPHPSSRTTESPPSPGTTTPGHTTATSRTTATATPSKTRTSTLLPSSPTSAPITTVVTTGCEPQCAWSEWLDYSYPMPGPSGGDFDTYSNIRAAGGAVCEQPLGLECRAQAQPGVPLGELGQVVECSLDFGLVCRNREQVGKFKMCFNYEIRVFCCNYGHCPSTPATSSTAMPSSTPGTTWILTELTTTATTTASTGSTATPSSTPGTAPPPKVLTSPATTPTATSSKATSSSSPRTATTLPVLTSTATKSTATSVTPIPSSTLGTTGTLPEQTTTPVATMSTIHPSSTPETTHTSTVLTTKATTTRATSSTSTPSSTPGTTWILTELTTAATTTAATGPTATPSSTPGTTWILTELTTTATTTASTGSTATPSSTPGTTWILTEPSTTATVTVPTGSTATASSTQATAGTPHVSTTATTPTVTSSKATPSSSPGTATALPALRSTATTPTATSFTAIPSSSLGTTWTRLSQTTTPTATMSTATPSSTPETVHTSTVLTATATTTGATGSVATPSSTPGTAHTTKVPTTTTTGFTATPSSSPGTALTPPVWISTTTTPTTTTPTTSGSTVTPSSIPGTTHTARVLTTTTTTVATGSMATPSSSTQTSGTPPSLTTTATTITATGSTTNPSSTPGTTPITPVLTSTATTPAATSSKATSSSSPRTATTLPVLTSTATKSTATSFTPIPSSTLWTTWTVPAQTTTPMSTMSTIHTSSTPETTHTSTVLTTTATMTRATNSTATPSSTLGTTRILTELTTTATTTAATGSTATLSSTPGTTWILTEPSTIATVMVPTGSTATASSTLGTAHTPKVVTTMATMPTATASTVPSSSTVGTTRTPAVLPSSLPTFSVSTVSSSVLTTLRPTGFPSSHFSTPCFCRAFGQFFSPGEVIYNKTDRAGCHFYAVCNQHCDIDRFQGACPTSPPPVSSAPLSSPSPAPGCDNAIPLRQVNETWTLENCTVARCVGDNRVVLLDPKPVANVTCVNKHLPIKVSDPSQPCDFHYECECICSMWGGSHYSTFDGTSYTFRGNCTYVLMREIHARFGNLSLYLDNHYCTASATAAAARCPRALSIHYKSMDIVLTVTMVHGKEEGLILFDQIPVSSGFSKNGVLVSVLGTTTMRVDIPALGVSVTFNGQVFQARLPYSLFHNNTEGQCGTCTNNQRDDCLQRDGTTAASCKDMAKTWLVPDSRKDGCWAPTGTPPTASPAAPVSSTPTPTPCPPQPLCDLMLSQVFAECHNLVPPGPFFNACISDHCRGRLEVPCQSLEAYAELCRARGVCSDWRGATGGLCDLTCPPTKVYKPCGPIQPATCNSRNQSPQLEGMAEGCFCPEDQILFNAHMGICVQACPCVGPDGFPKFPGERWVSNCQSCVCDEGSVSVQCKPLPCDAQGQPPPCNRPGFVTVTRPRAENPCCPETVCVCNTTTCPQSLPVCPPGQESICTQEEGDCCPTFRCRPQLCSYNGTFYGVGATFPGALPCHMCTCLSGDTQDPTVQCQEDACNNTTCPQGFEYKRVAGQCCGECVQTACLTPDGQPVQLNETWVNSHVDNCTVYLCEAEGGVHLLTPQPASCPDVSSCRGSLRKTGCCYSCEEDSCQVRINTTILWHQGCETEVNITFCEGSCPGASKYSAEAQAMQHQCTCCQERRVHEETVPLHCPNGSAILHTYTHVDECGCTPFCVPAPMAPPHTRGFPAQEATAV

SEQ ID NO: 128564 - protein, 5762 aa, Artificial Sequence
  derived and/or modified sequence
MGAPSACRTLVLALAAMLVVPQAETQGPVEPSWENAGHTMDGGAPTSSPTRRVSFVPPVTVFPSLSPLNPAHNGRVCSTWGDFHYKTFDGDVFRFPGLCNYVFSEHCRAAYEDFNVQLRRGLVGSRPVVTRVVIKAQGLVLEASNGSVLINGQREELPYSRTGLLVEQSGDYIKVSIRLVLTFLWNGEDSALLELDPKYANQTCGLCGDFNGLPAFNEFYAHNARLTPLQFGNLQKLDGPTEQCPDPLPLPAGNCTDEEGICHRTLLGPAFAECHALVDSTAYLAACAQDLCRCPTCPCATFVEYSRQCAHAGGQPRNWRCPELCPRTCPLNMQHQECGSPCTDTCSNPQRAQLCEDHCVDGCFCPPGTVLDDITHSGCLPLGQCPCTHGGRTYSPGTSFNTTCSSCTCSGGLWQCQDLPCPGTCSVQGGAHISTYDEKLYDLHGDCSYVLSKKCADSSFTVLAELRKCGLTDNENCLKAVTLSLDGGDTAIRVQADGGVFLNSIYTQLPLSAANITLFTPSSFFIVVQTGLGLQLLVQLVPLMQVFVRLDPAHQGQMCGLCGNFNQNQADDFTALSGVVEATGAAFANTWKAQAACANARNSFEDPCSLSVENENYARHWCSRLTDPNSAFSRCHSIINPKPFHSNCMFDTCNCERSEDCLCAALSSYVHACAAKGVQLSDWRDGVCTKYMQNCPKSQRYAYVVDACQPTCRGLSEADVTCSVSFVPVDGCTCPAGTFLNDAGACVPAQECPCYAHGTVLAPGEVVHDEGAVCSCTGGKLSCLGASLQKSTGCAAPMVYLDCSNSSAGTPGAECLRSCHTLDVGCFSTHCVSGCVCPPGLVSDGSGGCIAEEDCPCVHNEATYKPGETIRVDCNTCTCRNRRWECSHRLCLGTCVAYGDGHFITFDGDRYSFEGSCEYILAQDYCGDNTTHGTFRIVTENIPCGTTGTTCSKAIKLFVESYELILQEGTFKAVARGPGGDPPYKIRYMGIFLVIETHGMAVSWDRKTSVFIRLHQDYKGRVCGLCGNFDDNAINDFATRSRSVVGDALEFGNSWKLSPSCPDALAPKDPCTANPFRKSWAQKQCSILHGPTFAACRSQVDSTKYYEACVNDACACDSGGDCECFCTAVAAYAQACHDAGLCVSWRTPDTCPLFCDFYNPHGGCEWHYQPCGAPCLKTCRNPSGHCLVDLPGLEGCYPKCPPSQPFFNEDQMKCVAQCGCYDKDGNYYDVGARVPTAENCQSCNCTPSGIQCAHSLEACTCTYEDRTYSYQDVIYNTTDGLGACLIAICGSNGTIIRKAVACPGTPATTPFTFTTAWVPHSTTSPALPVSTVCVREVCRWSSWYNGHRPEPGLGGGDFETFENLRQRGYQVCPVLADIECRAAQLPDMPLEELGQQVDCDRMRGLMCANSQQSPPLCHDYELRVLCCEYVPCGPSPAPGTSPQPSLSASTEPAVPTPTQTTATEKTTLWVTPSIRSTAALTSQTGSSSGPVTVTPSAPGTTTCQPRCQWTEWFDEDYPKSEQLGGDVESYDKIRAAGGHLCQQPKDIECQAESFPNWTLAQVGQKVHCDVHFGLVCRNWEQEGVFKMCYNYRIRVLCCSDDHCRGRATTPPPTTELETATTTTTQALFSTPQPTSSPGLTRAPPASTTAVPTLSEGLTSPRYTSTLGTATTGGPTTPAGSTEPTVPGVATSTLPTRSALPGTTGSLGTWRPSQPPTLAPTTMATSRARPTGTASTASKEPLTTSLAPTLTSELSTSQAETSTPRTETTMSPLTNTTTSQGTTRCQPKCEWTEWFDVDFPTSGVAGGDMETFENIRAAGGKMCWAPKSIECRAENYPEVSIDQVGQVLTCSLETGLTCKNEDQTGRFNMCFNYNVRVLCCDDYSHCPSTPATSSTATPSSTPGTTWILTKPTTTATTTASTGSTATPTSTLRTAPPPKVLTTTATTPTVTSSKATPSSSPGTATALPALRSTATTPTATSVTPIPSSSLGTTWTRLSQTTTPTATMSTATPSSTPETAHTSTVLTATATTTGATGSVATPSSTPGTAHTTKVPTTTTTGFTATPSSSPGTALTPPVWISTTTTPTTRGSTVTPSSIPGTTHTATVLTTTTTTVATGSMATPSSSTQTSGTPPSLTTTATTITATGSTTNPSSTPGTTPIPPVLTTTATTPAATSNTVTPSSALGTTHTPPVPNTMATTHGRSLPPSSPHTVRTAWTSATSGILGTTHITEPSTVTSHTLAATTGTTQHSTPALSSPHPSSRTTESPPSPGTTTPGHTTATSRTTATATPSKTRTSTLLPSSPTSAPITTVVTMGCEPQCAWSEWLDYSYPMPGPSGGDFDTYSNIRAAGGAVCEQPLGLECRAQAQPGVPLRELGQVVECSLDFGLVCRNREQVGKFKMCFNYEIRVFCCNYGHCPSTPATSSTAMPSSTPGTTWILTELTTTATTTESTGSTATPSSTPGTTWILTEPSTTATVTVPTGSTATASSTQATAGTPHVSTTATTPTVTSSKATPFSSPGTATALPALRSTATTPTATSFTAIPSSSLGTTWTRLSQTTTPTATMSTATPSSTPETVHTSTVLTTTATTTGATGSVATPSSTPGTAHTTKVLTTTTTGFTATPSSSPGTARTLPVWISTTTTPTTRGSTVTPSSIPGTTHTPTVLTTTTTTVATGSMATPSSSTQTSGTPPSLTTTATTITATGSTTNPSSTPGTTPIPPVLTTTATTPAATSSTVTPSSALGTTHTPPVPNTTATTHGRSLSPSSPHTVRTAWTSATSGTLGTTHITEPSTGTSHTPAATTGTTQHSTPALSSPHPSSRTTESPPSPGTTTPGHTRATSRTTATATPSKTRTSTLLPSSPTSAPITTVVTMGCEPQCAWSEWLDYSYPMPGPSGGDFDTYSNIRAAGGAVCEQPLGLECRAQAQPGVPLRELGQVVECSLDFGLVCRNREQVGKFKMCFNYEIRVFCCNYGHCPSTPATSSTATPSSTPGTTWILTEQTTAATTTATTGSTAIPSSTPGTAPPPKVLTSTATTPTATSSKATSSSSPRTATTLPVLTSTATKSTATSFTPIPSFTLGTTGTLPEQTTTPMATMSTIHPSSTPETTHTSTVLTTKATTTRATSSMSTPSSTPGTTWILTELTTAATTTAATGPTATPSSTPGTTWILTEPSTTATVTVPTGSTATASSTRATAGTLKVLTSTATTPTVISSRATPSSSPGTATALPALRSTATTPTATSVTAIPSSSLGTAWTRLSQTTTPTATMSTATPSSTPETVHTSTVLTTTTTTTRATGSVATPSSTPGTAHTTKVPTTTTTGFTATPSSSPGTALTPPVWISTTTTPTTRGSTVTPSSIPGTTHTATVLTTTTTTVATGSMATPSSSTQTSGTPPSLTTTATTITATGSTTNPSSTPGTTPIPPVLTTTATTPAATSSTVTPSSALGTTHTPPVPNTTATTHGRSLPPSSPHTVRTAWTSATSGILGTTHITEPSTVTSHTPAATTSTTQHSTPALSSPHPSSRTTESPPSPGTTTPGHTRGTSRTTATATPSKTRTSTLLPSSPTSAPITTVVTTGCEPQCAWSEWLDYSYPMPGPSGGDFDTYSNIRAAGGAVCEQPLGLECRAQAQPGVPLRELGQVVECSLDFGLVCRNREQVGKFKMCFNYEIRVFCCNYGHCPSTPATSSTATPSSTPGTTWILTKLTTTATTTESTGSTATPSSTPGTTWILTEPSTTATVTVPTGSTATASSTQATAGTPHVSTTATTPTVTSSKATPFSSPGTATALPALRSTATTPTATSFTAIPSSSLGTTWTRLSQTTTPTATMSTATPSSTPETAHTSTVLTTTATTTRATGSVATPSSTPGTAHTTKVPTTTTTGFTVTPSSSPGTARTPPVWISTTTTPTTSGSTVTPSSVPGTTHTPTVLTTTTTTVATGSMATPSSSTQTSGTPPSLITTATTITATGSTTNPSSTPGTTPIPPVLTTTATTPAATSSTVTPSSALGTTHTPPVPNTTATTHGRSLSPSSPHTVRTAWTSATSGTLGTTHITEPSTGTSHTPAATTGTTQHSTPALSSPHPSSRTTESPPSPGTTTPGHTTATSRTTATATPSKTRTSTLLPSSPTSAPITTVVTTGCEPQCAWSEWLDYSYPMPGPSGGDFDTYSNIRAAGGAVCEQPLGLECRAQAQPGVPLGELGQVVECSLDFGLVCRNREQVGKFKMCFNYEIRVFCCNYGHCPSTPATSSTAMPSSTPGTTWILTELTTTATTTASTGSTATPSSTPGTAPPPKVLTSPATTPTATSSKATSSSSPRTATTLPVLTSTATKSTATSVTPIPSSTLGTTGTLPEQTTTPVATMSTIHPSSTPETTHTSTVLTTKATTTRATSSTSTPSSTPGTTWILTELTTAATTTAATGPTATPSSTPGTTWILTELTTTATTTASTGSTATPSSTPGTTWILTEPSTTATVTVPTGSTATASSTQATAGTPHVSTTATTPTVTSSKATPSSSPGTATALPALRSTATTPTATSFTAIPSSSLGTTWTRLSQTTTPTATMSTATPSSTPETVHTSTVLTATATTTGATGSVATPSSTPGTAHTTKVPTTTTTGFTATPSSSPGTALTPPVWISTTTTPTTTTPTTSGSTVTPSSIPGTTHTARVLTTTTTTVATGSMATPSSSTQTSGTPPSLTTTATTITATGSTTNPSSTPGTTPITPVLTSTATTPAATSSKATSSSSPRTATTLPVLTSTATKSTATSFTPIPSSTLWTTWTVPAQTTTPMSTMSTIHTSSTPETTHTSTVLTTTATMTRATNSTATPSSTLGTTRILTELTTTATTTAATGSTATLSSTPGTTWILTEPSTIATVMVPTGSTATASSTLGTAHTPKVVTTMATMPTATASTVPSSSTVGTTRTPAVLPSSLPTFSVSTVSSSVLTTLRPTGFPSSHFSTPCFCRAFGQFFSPGEVIYNKTDRAGCHFYAVCNQHCDIDRFQGACPTSPPPVSSAPLSSPSPAPGCDNAIPLRQVNETWTLENCTVARCVGDNRVVLLDPKPVANVTCVNKHLPIKVSDPSQPCDFHYECECICSMWGGSHYSTFDGTSYTFRGNCTYVLMREIHARFGNLSLYLDNHYCTASATAAAARCPRALSIHYKSMDIVLTVTMVHGKEEGLILFDQIPVSSGFSKNGVLVSVLGTTTMRVDIPALGVSVTFNGQVFQARLPYSLFHNNTEGQCGTCTNNQRDDCLQRDGTTAASCKDMAKTWLVPDSRKDGCWAPTGTPPTASPAAPVSSTPTPTPCPPQPLCDLMLSQVFAECHNLVPPGPFFNACISDHCRGRLEVPCQSLEAYAELCRARGVCSDWRGATGGLCDLTCPPTKVYKPCGPIQPATCNSRNQSPQLEGMAEGCFCPEDQILFNAHMGICVQACPCVGPDGFPKFPGERWVSNCQSCVCDEGSVSVQCKPLPCDAQGQPPPCNRPGFVTVTRPRAENPCCPETVCVCNTTTCPQSLPVCPPGQESICTQEEGDCCPTFRCRPQLCSYNGTFYGVGATFPGALPCHMCTCLSGDTQDPTVQCQEDACNNTTCPQGFEYKRVAGQCCGECVQTACLTPDGQPVQLNETWVNSHVDNCTVYLCEAEGGVHLLTPQPASCPDVSSCRGSLRKTGCCYSCEEDSCQVRINTTILWHQGCETEVNITFCEGSCPGASKYSAEAQAMQHQCTCCQERRVHEETVPLHCPNGSAILHTYTHVDECGCTPFCVPAPMAPPHTRGFPAQEATAV

SEQ ID NO: 128565 - protein, 536 aa, Artificial Sequence
  derived and/or modified sequence
VFCCNYGHCPPRPPALRPCPPPLRGRPGSTELTTTATTTASTGSTATPSSTPGTAPPPKVLTSPATTPTATSSKATSSSSPRTATTLPVLTSTATKSTATSVTPIPSSTLGTTGTLPEQTTTPVATMSTIHPSSTPETTHTSTVLTTKATTTRATSSTSTPSSTPGTTWILTELTTAATTTAATGPTATPSSTPGTTWILTELTTTATTTASTGSTATPSSTPGTTWILTEPSTTATVTVPTGSTATASSTQATAGTPHVSTTATTPTVTSSKATPSSSPGTATALPALRSTATTHSYQLYSHPLLLPTTWTRLSQTTTPTATMSTATPSSTPETVHTSTVLTATATTTGPALWPPPPPPQEQLTLPKCRLPQPRHSHPLLQPRDGTHASSVDQHNHHTHNHHTHNQWLHGDPLLHPGDHPHRQSADHHHHNCTGSMATPSSSTQTSGTPPSLTTTATTITATGSTTNPSSTPGTTPITPVLTSTATTPAATSSKATSSSSPRTATTLPVLTSTATKSTATSFTPIPSPCGPRGPS

SEQ ID NO: 128566 - protein, 186 aa, Artificial Sequence
  derived and/or modified sequence
SSTPGTTWILTEPSTTATVTVPTGSTATASSTQATAGTPHVSTTATTPTVTSSKATPFSSPGTATALPALRSTATTPTATSFTAIPSSWAPPGPAYHRPPHPRPPCPQPHPPPLQRLSTPPQCLPPRPPRGHRLCGHPLLHPRNSSHYQSADYHNHFTATPSSSPGTARTLPVWISTTTTPTTRGS

SEQ ID NO: 128567 - protein, 319 aa, Artificial Sequence
  derived and/or modified sequence
TKATTTRATSSMSTPSSTPGTTWILTELTTAATTTAATPHGHPVLHPRDHLDPHRAQHYTVTVPTGSTATASSTRATAGTLKVLTSHHTHSHQLQSHSLLQSRDCNRPSSTEKHSHHTHSYQRYSHPLFLPTAWTRLSQTTTPTATMSTATPSSTPETVHTSTVLTTTTTTTRATLWPPPPPPQEQLTLPKCRLPQPRHSHPLLQPRDGTHASSVDQHNHHTHNQRLHGDPLLHPTTHTATVLTTTTTTPLVLWQHPPLAHRPVVPPSLTTTATTITATGSTTNPSSTPGTTPIPPVLTTTAHTCSHQQHSDSLLCPRD

SEQ ID NO: 128568 - protein, 668 aa, Artificial Sequence
  derived and/or modified sequence
MREIHARFGNLSLYLDNHYCTASATAAAARCPRALSIHYKSMDIVLTVTMVHGKEEGLILFDQIPVSSGFSKNGVLVSVLGTTTMRVDIPALGVSVTFNGQVFQARLPYSLFHNNTEGQCGTCTNNQRDDCLQRDGTTAASCKDMAKTWLVPDSRKDGCWAPTGTPPTASPAAPVSSTPTPTPCPPQPLCDLMLSQVFAECHNLVPPGPFFNACISDHCRGRLEVPCQSLEAYAELCRARGVCSDWRGATGGLCDLTCPPTKVYKPCGPIQPATCNSRNQSPQLEGMAEGCFCPEDQILFNAHMGICVQACPCVGPDGFPKFPGERWVSNCQSCVCDEGSVSVQCKPLPCDAQGQPPPCNRPGFVTVTRPRAENPCCPETVCVCNTTTCPQSLPVCPPGQESICTQEEGDCCPTFRCRPQLCSYNGTFYGVGATFPGALPCHMCTCLSGDTQDPTVQCQEDACNNTTCPQGFEYKRVAGQCCGECVQTACLTPDGQPVQLNETWVNSHVDNCTVYLCEAEGGVHLLTPQPASCPDVSSCRGSLRKTGCCYSCEEDSCQVRINTTILWHQGCETEVNITFCEGSCPGASKYSAEAQAMQHQCTCCQERRVHEETVPLHCPNGSAILHTYTHVDECGCTPFCVPAPMSPPACVWHPALRAPAAHLGLAPP

SEQ ID NO: 128569 - DNA, 414 bp, Artificial Sequence
  derived and/or modified sequence
atgagccagttccagggcaagggcccccgctggacagtgctgatcatgagcaaggtgggcctgcggggcggcctgagtgaccagatggccatgaaggtgctggaccccctgcggcaggccctggacagctccatgcagagcaacaacctgtgccagcacccccagcccctggccctgcacgtgtctgctgctgtggccagcgctggggcccaggccagcagcctgctgggccccctgccccacctgagcagctttgccttccagcctgcccacagcctgctgagcctgctgggcagccacggggctgaggtgtccaagaagatggccctgctggcccgggagaggagccctgcccacctggtggccttccctggccgcctgacagccaccccacctggcctgcccaccttctag

SEQ ID NO: 128570 - DNA, 87 bp, Artificial Sequence
  derived and/or modified sequence
atgacccccaacagcatgaccgagatggccctgcagcccggcaccaacagaagcaccgtgcagaccgagaacaccaccggcagctag

SEQ ID NO: 128571 - DNA, 17121 bp, Artificial Sequence
  derived and/or modified sequence
atgggtgccccttcagcctgcagaactttagtcctcgccttggcagccatgctcgttgtccctcaagcggaaacgcagggccctgttgaaccctcctgggaaaatgctggccacaccatggacgggggtgcgccgacaagttccccaacaaggcgggtgagcttcgtcccgcccgtgacagtgttcccttccctttctcctctgaaccccgcccacaatggacgtgtttgtagcacatggggtgactttcactacaagacctttgatggtgatgtgtttagattccccgggctttgtaattatgtgttttccgagcactgtcgtgcggcttatgaggacttcaatgtacaactccgccgagggcttgtcggaagtaggcccgtggtcacacgggtggtgatcaaggcccagggtctggtgctggaggcatcgaacggatcggtgttgatcaatgggcagcgggaagagctgccctacagccggacaggactcttggtcgaacagtctggagattacatcaaggtgagtatacggttggtgctcactttcctatggaatggtgaagacagcgcccttctcgaactggacccaaaatacgccaatcagacatgtgggctatgcggggactttaatggcctgcccgcattcaacgagttttacgcccataacgcacgtctaacacccttacagttcggcaacctgcagaagttggacgggcctaccgaacagtgccccgaccctctgccgttgcctgcaggaaattgcaccgatgaggaaggcatttgccataggacactgcttggtccagcgttcgctgagtgtcacgcacttgtcgattctacagcataccttgctgcttgcgcccaagacctttgtagatgtcccacttgcccctgtgcgacctttgtggaatatagtcgccaatgtgcacacgccggcggacagcctcggaattggagatgcccagaactctgcccccgcacctgtcctctgaatatgcaacaccaagaatgtggatccccttgtaccgatacgtgctctaacccccagcgcgcccagctgtgcgaggatcattgtgttgacggctgcttttgtccgcctgggtcaaccgttttggacgacatcacccatagcgggtgtctacccctcggtcagtgcccctgtacacacggtggcagaacatattctccgggaacctcctttaacaccacatgttcttcgtgcacttgcagtggtggactgtggcagtgtcaggacctgccatgtcctgggacttgtagcgtgcagggcggagcacacatctctacctatgacgagaagctctatgacctccacggggactgctcctatgtgctatctaaaaagtgcgcagattcttccttcaccgtcctagctgagctccgcaagtgtggcctgacagacaacgagaattgcctcaaagccgtgactctgtcgctggacggcggcgatactgccattcgggtccaagctgatgggggcgtatttctgaatagtatttatacacagctgcctctgtcagccgccaacatcaccctcttcaccccttcaagctttttcattgttgttcagacaggactgggtttacagttgctcgtccagctcgttcctctgatgcaagttttcgtacgcttggacccggcccaccagggccaaatgtgcggcctgtgcggcaatttcaatcagaaccaagccgatgacttcaccgccctcagtggagtggtcgaggccacaggggccgcctttgctaatacttggaaagctcaagcagcatgcgccaatgcaaggaacagcttcgaggacccttgcagccttagtgtcgagaacgagaactacgctcggcattggtgttctcggcttacagacccaaacagcgctttctcccggtgtcattcgattataaacccgaagccttttcattctaactgcatgtttgatacatgcaattgtgagcggtccgaagactgtctgtgcgccgccctatcgagttacgtccatgcctgcgccgcaaaaggcgttcaactgagtgattggcgggatggcgtctgtaccaagtacatgcagaactgccccaagtcacagaggtacgcctatgttgtggatgcctgccagccgacttgtagaggcttgtccgaggccgatgtgacctgtagcgtatccttcgtccccgtggacggttgcacttgccccgccggcactttcctcaacgacgctggcgcctgcgtgccagcgcaggaatgcccttgttatgcgcacggcaccgtgcttgcgcccggcgaagttgttcatgatgaaggagctgtttgctcctgcacgggcggcaaactgagctgccttggcgcgtctctccagaagtccacaggatgtgccgcgcccatggtatatctggactgtagtaattcgtcagccggtacccctggggctgaatgcctgagaagttgtcataccctagacgtgggttgtttcagtactcactgcgtgtctgggtgcgtctgtcccccagggcttgtcagcgacggcagcggaggatgcattgccgaagaggattgtccctgtgtccacaacgaggctacttacaaaccaggagagactataagagttgactgcaatacgtgtacatgccggaataggcgatgggagtgcagtcataggctttgcctgggaacgtgcgtggcatacggagatgggcattttattacttttgacggggatcgttacagcttcgaaggcagctgcgaatacatcctggcgcaggattactgcggcgacaataccactcacggcacttttcgcatcgtgaccgaaaatatcccttgcggaacaaccgggaccacatgcagcaaagcgatcaaacttttcgtggagtcttatgagttaattctgcaggaggggacatttaaagcagttgcccgtggccccggcggggacccaccctacaaaatcaggtacatgggtatttttctggttatcgagacccatggcatggccgtgtcttgggaccggaaaacctccgtgttcattcgactgcaccaggactataaaggcagggtgtgcgggttgtgcgggaattttgacgataatgcgatcaacgatttcgctaccagatctcgtagtgttgtgggcgatgctttggaattcggtaacagctggaaactgagcccaagctgtcctgatgcactagctccaaaggacccctgtacagccaatccttttcgaaagagctgggcccaaaaacagtgctccattctgcatggcccaacatttgcagcatgcagatcccaggtcgactctaccaaatattatgaagcttgcgttaatgacgcttgcgcgtgtgattcaggtggtgattgtgaatgtttttgtaccgccgtggctgcctacgcacaggcttgccatgatgctgggctctgcgtgtcatggaggactcctgatacttgtcctctgttctgcgacttttacaacccccacggagggtgtgaatggcattaccaaccatgtggtgctccctgcctaaagacttgtcggaatccctctggtcactgtcttgtggacctgcctgggctggaaggttgttacccaaagtgtccgccatcacagccattctttaacgaggaccagatgaagtgcgtcgcccagtgtggttgttatgacaaagatggcaattactacgacgtgggcgctcgcgtgcctacggccgagaactgccagagttgtaactgcacaccttctggtatacagtgcgcacacagcctcgaagcttgcacctgcacgtatgaagacaggacctatagctaccaggatgtgatttacaatactactgatggactgggtgcctgtctgatcgccatttgcggctcaaatggtacaattattcgtaaggccgttgcctgccctggtacccctgcaacgaccccattcacattcacaaccgcgtgggtgccacactctacaacatcaccagctctccccgtgagcaccgtgtgcgtgcgcgaggtatgtcggtggagcagctggtacaatgggcaccgtcccgaaccagggctcggaggaggggactttgagacttttgaaaacctccgccaaagggggtatcaggtgtgtccagtgcttgccgacattgagtgtcgggccgcccagttgccagatatgcccctggaagaactgggacaacaggttgattgtgaccgaatgcggggcctgatgtgcgccaatagccagcagagcccaccactctgccacgactacgagcttagagtcctgtgctgtgagtatgtcccgtgtgggccttcccccgctccagggactagtcctcaacctagtctgagcgctagtacagaacctgccgttcccacgcctacacagacaacggcaaccgagaagacaacgctgtgggtcaccccaagtatacgctcaaccgcagcccttacttcacaaaccggttcctcatccggacccgtcaccgttaccccctcagcacccggaacaactacctgccagcctcggtgccaatggactgaatggttcgacgaagactaccctaaatccgaacagctgggaggagacgtggagagctacgataagatccgcgctgccggcggtcacttatgtcaacaacctaaggatatcgaatgtcaggccgaaagcttcccaaactggactcttgcccaagtcggacagaaagtgcactgcgacgtacacttcggcctggtgtgccggaattgggagcaggaaggggttttcaagatgtgttacaattatcgcatacgagttctgtgctgctccgatgaccactgccggggacgggccaccactccacctcccaccacagagctggagaccgctactaccaccaccacccaggctctgttcagtaccccccagcctacatcaagtcccgggctgactcgtgcgcccccagcttcaaccacagcggtgcctacactgagcgagggactgaccagtcctagatatacgtcaacattgggaacagccacaaccggaggcccaaccacaccagcaggatcgacagagcccaccgtccccggcgtcgcaacaagtaccctaccaactcggtcagccctccccggcacaaccggctctttgggtacttggagaccttcgcagccacccaccttggctcccaccacgatggccacctctcgtgctagacccacaggcactgccagcaccgccagcaaggaacccctgactacttctctggcaccaactctgacgagcgagctcagtacgagccaagctgagacctctactccgcgaacagaaacaaccatgtctccactgacgaatactacaacctcccagggcactaccagatgccagccaaaatgtgagtggacggagtggttcgacgttgacttcccaacatcaggtgtcgctggcggcgacatggagaccttcgaaaatattagggctgctggaggaaagatgtgctgggctcctaagtctatagaatgccgcgccgagaattaccctgaggtgtcaatcgaccaagtgggacaggttctcacgtgctctctggaaacaggcctcacttgcaagaacgaggaccagactggacgattcaacatgtgtttcaactacaacgttcgtgtgctgtgctgtgacgattactcacattgtccctctacacctgcaacatcaagcaccgcaaccccctctagtacccccggaactacatggatcttaacaaaacccacaactactgcgaccactactgcatccactggctctacggcaaccccaacatctactctaaggaccgctccaccccccaaggtacttacaaccaccgcgactactccgaccgttacatcctctaaggccacccccagtagcagccctggcacggcaaccgccctgcccgccctccgctccaccgctacaacaccaacagctacaagcgtgacccctatcccatccagtagtctgggaacaacctggactagactctctcagaccacaacgccaactgctacaatgagcactgccaccccgagttctacgcctgagacagcccacacatccacagtcttgaccgccaccgctacaaccacgggagcgaccggttccgtagcgaccccttcttcaacgcccggaacagcccacacaacaaaagtgcccaccactaccaccacgggcttcaccgccactccttcttcatcaccgggcacagcactgacccctcccgtatggataagcacaactaccacaccgactactaggggttctacagtcacccccagttcaatccccggtaccacccataccgccactgtgcttacaaccacgacgactaccgtcgccacaggcagtatggccactccctcttccagtacgcagacctctggaactcccccttcccttacaaccacagccactacgataactgctacaggatctacaaccaatccttcttcaacccctgggacaaccccaattcctcccgtgctgaccacaaccgcgaccacccccgccgcaacttccaatacggtgactccaagctctgccttaggtaccactcatactcctcctgtaccgaatacaatggctaccacccacgggcggtctttgccgcctagtagccctcacacagtgcggaccgcatggacatctgccacaagtggcatcctgggcactacgcatataaccgaaccatctacagtcacatctcataccctggcggccaccacaggcacaacccaacatagtaccccagcactgtcctctccacaccctagttctcggaccacggagagccctcccagccctggtactaccactccaggccacaccaccgctacgtcacgtactacggccacggctaccccatctaaaacacgcacctcaactctgctgccgtcctcccccacatcagctccgatcaccacagtggtgacaatgggttgcgaaccccaatgcgcctggtcagagtggctcgactacagctatcccatgccagggccgtctgggggcgacttcgacacatacagtaatattcgcgcagccgggggtgctgtgtgtgaacagccactcggtcttgagtgtagggcacaggcccaacccggggtgccacttagagagctgggccaggtagtagagtgttctctggactttggcctggtctgcagaaatcgggaacaggtgggaaaatttaaaatgtgcttcaattatgagataagagtcttctgttgcaactacgggcactgccctagtactccagccacttcctctacggcgatgcccagctctacacctggcaccacctggatcctgaccgagttaacaacaactgcaaccactacagagtctacgggctccaccgccacaccttcttccacaccagccaccgccggtacccctcacgttagcactactgctactacacctactgtgacctcaagtaaggccaccccatttagctcgcccggcaccgcaacagcccttccagctctgaggtcaactgcaacaacaccgactgctacctctttcactgccattccgtctagctccctgggaactacatggacaagactttctcagacaaccactccaaccgctaccatgtctactgcaactccaagttcgactcccgagaccgtgcatacatctacagtgttgaccacgacagccaccaccactggcgccactgggtccgtggccacaccctccagtacacccggaacagcccacactaccaaagttttgacgacaacaaccactggctttaccgccacgccttctagcagcccaggaaccgcccgcactttacccgtctggataagcacaaccacaacacccactacaaggggcagcacggtgactccatccagcatacctggcactacccatactcctaccgtattgaccaccacaaccaccacagtggccacaggctcgatggccaccccctccagctccacccagacgagcggcactccaccatcccttaccactactgctactacaatcaccgcaacagggtcaactacaaacccttccagcacccctggaaccacccccattcccccagtgcttactacgacggccaccacacccgccgccacgagctctaccgtcacaccgagctcagcactggggactacccatactccccccgtacccaatactactgccacaacgcacggccgatccctgtctccttcttccccacataccgtgcggacagcttggacctcagccaccagcggaacacttgggaccactcatatcaccgaacccagtactggcacctcccatacaccagctgcaacaactggaaccactcaacatagcaccccagctctgagcagtccccatccttcaagccggaccacagagagtccacctagccccggcactacaactcccggacacactcgagccacctccagaaccacagccacggcgacacctagcaagactcggacaagcactctcctgccttcttcaccaacaagtgcaccaataacaacagtggtcacgatgggatgcgagccccagtgcgcttggagcgagtggttggactacagctaccccatgcctggtccctctgggggggatttcgatacttactctaatatccgagccgcaggcggggccgtgtgcgagcagcccctgggactcgaatgcagggcacaggcccagcctggggtgccacttagggagctcggacaggttgtggagtgcagcctggatttcggcctcgtatgtaggaaccgagaacaggttggtaagttcaagatgtgttttaactatgaaattcgtgtattctgctgcaactatgggcactgtcctagcacccctgctacttcttcgaccgcaactccctccagcacacccggaacaacctggatcctgacagaacagacgaccgccgcgaccacgaccgcgaccactggttccactgccattcccagttccacaccaggaacggcgcccccacccaaggtcctgacttccacggctaccacaccaaccgcaacgagcagcaaggcgacgtctagttcctctccacggaccgcaactaccctgccagtactaacttcgacggctaccaaatctaccgccacaagttttacacccattccaagctttacactaggaacgactgggaccttgccggaacagactaccactcccatggccaccatgtcaacaatccacccttcctctacaccagaaaccacccacacttccactgtcctcacaaccaaggccacgacgacccgggctacctcatcgatgagtacgccaagtagtacacccggcacgacctggatcttaaccgagctgaccaccgcggcaactaccaccgccgctactggacccacagctaccccatctagcactcctggcactacatggatcctgacagagcctagtactaccgcaacggtgaccgttcctaccggcagcaccgcaactgcctcctccaccagggcgaccgccggcacgctcaaagtgttgacctccacggccaccacccccaccgttatcagtagtcgggccactccctcatcatcaccaggtaccgcaactgcattgcccgccctgcgctcgacagccacgacacccaccgccacctcagtgaccgctatcccgtcctcttccctgggcaccgcttggacacggctatctcagacgaccacccctaccgccaccatgagtaccgcaacaccttcctccactccggaaacagttcacacctctactgtgctgacaacgacaacaaccaccactcgagccaccggcagcgtggctactcctagctccaccccaggaacggcacacaccactaaggtccctactaccaccacgacaggcttcaccgcgacaccgtcgtcctccccgggcactgccctcacaccccccgtatggatttctaccaccaccacaccgactaccaggggaagcaccgttaccccatcttctattcccgggaccactcacactgctacagttttgaccactacgactacaactgtggccaccgggtcaatggccaccccaagttcttctactcagacaagtggcacgcctcctagtttgaccacaaccgccacaacaatcactgcaacaggctcaaccaccaacccatcctcgactcctggaactaccccaatcccaccggtgttgaccactacagccactacccctgcagctacatcctcaactgtcaccccctcttctgctctgggcaccacccatacacctcctgtgcctaacaccactgcgaccacacacggccgtagcctgcctcccagcagcccccataccgttagaaccgcgtggacatcagcgacttccgggatacttggaactacacacatcacggagccctcaactgtaacgagtcacactccagccgcgaccacaagcactacacaacacagcaccccggccctgagttcgccacatcccagctctcgcaccactgagagtccaccctcgccaggcactacaacgccagggcacaccagaggcaccagtcgcaccactgccactgctactcccagcaagacccgaaccagcacgctcctgccctcttctccaacgtcagcacccattaccacagtagtcaccactggatgtgagccacagtgtgcctggtccgagtggctggactacagctatcctatgcccgggcccagcggcggcgactttgacacctattccaacatccgcgccgccggtggagctgtctgcgagcagccattaggtctggagtgtcgtgcgcaggctcagccgggtgtgcccctccgcgaactgggccaggtggtagagtgttcccttgactttgggctggtgtgtcggaaccgagaacaggtgggtaagtttaagatgtgttttaactatgagatccgcgtcttttgctgtaactatggccattgcccctccacccctgccaccagttcaacagctactccttcctcaaccccaggcacaacttggattctgacaaagctgacaacaaccgcaactacaacagagagtacggggagtacagcaaccccctcatctacgcctggagcaaccgcaggcactccgcatgttagtacaaccgccaccacacctacggtcacaagctccaaggctacgccgttcagtagccccggcacagctaccgctctgcccgccttacggagtacagcgacgaccccaaccgccacgtcttttacagccattccttctagtagcctggggaccacctggactaggctgtcccagacaaccaccccaaccgccaccatgtcaactgcaaccccgagctcgacaccagagacagcacatactagtacagtgctgaccacaacagccacgaccactcgggccacaggatcagtggctaccccttcttcaacacccgggacggcgcacaccaccaaagtccccacaacaacgactacgggtttcactgtgacgccctcctcttcaccgggcactgcacgcacccccccagtgtggatctccaccaccactacgccaaccacatccggcagcacagtgactccctcatctgttcctggaacaacgcacacaccaacggttcttaccactaccaccacaacagtagccaccggttctatggccactcctagtagtagcactcaaacaagcggtacgccaccaagcctcattacaacggccaccacaatcacagctacagggtccaccactaacccttcttccacgcccgggaccacaccaatacctccagtcttgacgaccaccgctacaacacccgcggccacctcaagcacggtcactccgagctcagcacttggcacaacccacactccacccgtacctaatactacagcgacgactcacggccgaagcctgtcgccctcaagcccgcatacagtgcgcacggcctggacatctgcaacatccggaacactgggcaccacccatataactgaaccatcgaccggaacatcccacacgccagctgcgacaacaggaacaactcagcacagcacgccagcactttcctcaccccatcccagctcaagaactacagagagccctccaagccccgggaccacgacaccgggtcatactaccgcaacaagccggacaactgccacagccactccgtctaaaacccgcaccagtacacttcttccatctagtcccacctctgcacctataacaacagtggtcacaactggatgcgagccacagtgcgcctggagcgaatggctcgattactcatacccgatgcccggaccatcagggggagatttcgatacctattctaacatcagggctgccggcggtgccgtgtgcgagcagccactggggctagagtgtagagcccaggctcagccaggcgtgcccctgggtgagctgggccaggttgtggagtgcagcctcgactttggcctggtctgccgcaaccgcgaacaggttggcaagttcaagatgtgtttcaattacgaaattagggtcttctgctgtaattatggccactgtccctcaacacctgcaactagctccactgcaatgccatcctcaacccccggcaccacctggattctgaccgaactgactacaactgcaacgacgactgcctcaaccggttcgaccgcgacacccagcagcactcccggaactgctcccccacccaaggtgctcacttcacctgcgacaacccctacagccacttcttccaaggcaacgagctcgtcctcacctcggaccgccacaaccctacctgtgcttaccagcaccgccactaaatccaccgctaccagcgtcaccccaatcccaagcagcacactggggacaactgggaccctcccggagcagaccacaaccccagtcgctactatgagcactattcaccccagctctaccccagagaccacgcacacatccactgtcctgaccactaaggctaccacaacccgcgcaactagctccactagcactccgagcagtacccccggtacgacatggattttgacagagctgacgactgccgccacaacaacagctgccacagggcccaccgcaaccccgagctctactcccggtactacatggattttgaccgagctgacaactactgccaccactactgcttcaaccggctcaaccgctacaccgtcaagtactcccggaacaacctggattctgacagaaccctctacaaccgcgaccgtgacggttcctacaggttctacagcaaccgcatcttccacacaggccacagctggtacaccgcatgtttctactacagccaccacccctaccgtgacatcttccaaggcaacaccttcctcctcaccaggcacggcgaccgccctgcccgccctgagatccaccgccactacccctactgccacctcctttactgccattccatcctcgtccttgggcactacgtggactcggctgtcacagactacgacccctacggccacgatgtccacagcaaccccctccagtacaccagaaaccgtccacacgagtactgtgctgaccgccaccgccaccactacaggcgccaccgggagtgtggcaacaccatcatcaacccccggaaccgcgcacactactaaggtacccaccacgacgaccacaggtttcaccgccacaccatcaagcagtcctggtaccgccttgacaccccccgtctggatctcgacgacgacaaccccaacaacgaccacacccacgacctctggtagcacagtgactccttcatctatccctggaactacccacacggcccgcgtgcttactaccacaacgacaactgtggctactggaagcatggctactcccagctcctctacacagacctccggcacacctccttctctgaccaccaccgccacaacgatcaccgctacgggctccacaacaaacccctccagcacgcccggcacgactcccattacccccgtgctgacatctacggcaacaaccccagcagccacatcaagcaaagcaacttcatcgagttctcccagaactgcgacaaccctgcccgttctcacttcgactgcaacaaagagcactgccacctcctttacaccgattcccagcagcacactttggaccacatggactgtccccgcccaaaccacaactcccatgtctaccatgtctacgatccatacttccagcacacctgaaaccacacacactagcaccgtgcttaccactacggcaaccatgactcgggccactaacagtacagccacccctagctccactctgggaaccactcgcatcttgacagagttaactaccacggcaaccacaaccgcagcaacgggttcaaccgcaacactgtcatctactccaggcaccacatggatcctgactgaaccctccactattgctacggtcatggtgccaactggaagtacagctaccgcctcatccaccctcggaacagcacatacccccaaggtcgtaactaccatggccactatgcccaccgccacggcttctacggtcccttcaagcagcactgtggggaccaccagaacccccgcagtgctcccatcttcgctgcccacttttagcgtgagcaccgtgtcttcctcagtgctgacaacgctgcggcccacaggttttccttcttctcactttagcacgccgtgcttttgtcgtgccttcggccagttcttctcacccggcgaagtgatatacaataaaacagaccgagccggctgtcatttctacgctgtgtgcaatcagcactgtgatattgaccgatttcagggggcgtgtcctaccagcccaccacccgtctccagcgcacctttatctagtccgtccccagcacccgggtgtgacaatgctataccccttcggcaagttaatgaaacatggaccctcgaaaactgcactgtggctcgttgtgtgggggacaatcgcgtggtgttattagaccccaaaccagtcgccaatgttacatgcgtgaataagcacctacctatcaaagtttctgaccctagtcagccatgtgactttcactatgaatgcgaatgcatttgctctatgtgggggggcagtcactatagcacatttgacggcaccagttataccttcaggggcaactgtacatatgtccttatgcgggaaattcacgccaggttcggcaacctatctctctatttggacaaccactactgtacagcaagcgctaccgccgccgcagctcgatgtccccgagccctgagcatccattacaaatcgatggatattgtgctgacagtgaccatggtgcacggtaaagaggagggcctgatcttgtttgaccagatacccgtgagtagcggattttccaaaaacggtgtgcttgtctcggtactcggtaccacaacgatgcgcgtggacatacctgcgttgggcgtttctgttacatttaacgggcaggtgttccaagctagactgccttattctttgttccacaacaacaccgaggggcagtgcgggacgtgcacaaataaccagagagatgattgtttgcaacgagatggaacaaccgccgccagttgcaaggacatggctaaaacctggctggtgcctgattctcgtaaagatggctgttgggctccgactggtacccctcctaccgcttccccggcagcaccggtcagcagcacccccaccccgacgccatgtccacctcagccactgtgtgatctcatgcttagccaggtattcgccgaatgtcacaatctcgtccccccaggacccttcttcaacgcttgtatatctgaccattgtcggggccggctggaggtcccatgccagtctctagaggcatacgcggaactgtgccgagcacgaggcgtgtgctccgactggcggggcgcaacaggcggactgtgcgacctcacctgcccccccacgaaagtgtataaaccttgcggcccaatccagcctgcaacgtgcaactcccgcaaccaatccccccaactggaggggatggcagaggggtgcttttgccccgaggaccaaattcttttcaacgcccatatggggatctgcgtgcaagcgtgtccctgcgtgggcccagatgggtttccgaagtttccgggagagcggtgggtctccaactgccagtcatgcgtatgtgatgagggaagcgtctcagtgcagtgtaagcctctcccgtgcgacgcacaaggccagccccctccgtgcaaccgacccggcttcgtgacagtcacccggccacgggcggagaatccatgctgtccagaaactgtgtgcgtctgcaacaccactacatgcccgcagagcctgcccgtctgcccccctggccaagaaagtatttgcacccaggaggagggggactgttgtcccacatttcgctgtagaccgcagttatgctcttacaatggaactttttatggagtcggggccactttcccgggggccctgccatgtcatatgtgtacctgtctttccggagacacccaggatcccacggttcagtgccaggaagatgcctgcaacaacaccacctgtccccaaggtttcgaatataagagagtggctggacaatgctgtggagagtgcgtccagaccgcatgcttgactcccgatggtcagcctgtgcaattgaatgaaacatgggtaaactcccacgtggacaattgtacggtgtacctctgtgaggctgaggggggcgtacatctactcaccccacagcctgcctcttgtcccgatgtgagttcatgtcggggctcgctaagaaagaccggatgctgctacagctgtgaagaggactcctgccaagtgcgaattaacacaactattctttggcaccaggggtgcgagaccgaagtgaatataacattctgcgaaggttcttgccccggagccagtaaatacagcgctgaggcacaagcaatgcagcatcagtgcacctgctgccaggagagaagagtgcatgaagaaaccgtgccactgcattgtcccaacggcagcgctattctgcatacctatacccatgtcgacgaatgtgggtgcacccctttctgcgtaccagctccgatggcaccacctcacaccaggggttttccagcccaggaggccaccgccgtctag

SEQ ID NO: 128572 - DNA, 16587 bp, Artificial Sequence
  derived and/or modified sequence
gcgcccaggatgggtgctccatccgcatgccgcactctagtcttggctcttgccgctatgcttgttgttccgcaggctggcaagtccccacctcttagacctctcagtcggaattctggggctggactcgatggaggagcgccaacctcctcaccaacccgcagagtcagctttgttccacctgtaacagtgtttcctagtctatcacgaaaacaaatgctcccccttcccgcgggcaaaggcgtcttcgcttccccgaaaggaggagggccagatctgggagtacaattgcccccagctctgaatccagctcacaacggtcgcgtgtgtagtacatggggagatttccactacaaaacttttgacggtgatgtgttcagatttccaggactgtgtaactacgtgttttccgaacattgccgagcggcctatgaggacttcaacgtccagctgcgtaggggcctcgtggggagccgtcctgtagtgacaagggtggttatcaaagcgcagggactagtgcttgaggcttcgaatggcagtgtcctaatcaacgggcagcgcgaggagctgccttactcacgaaccggcttactcgtagagcagagcggcgactatatcaaggtcagcattagactggtgttgactttcctctggaatggggaagactctgccttgcttgagctggaccctaagtatgctaatcagacctgcggactttgcggagacttcaacggtcttccggccttcaacgagttctacgcccacaacgctcgcttgaccccccttcagtttggcaacctgcagaaactggatggccccactgaacaatgccctgatcctctgccactgcctgctggtaactgtactgatgaagagggtatctgccatagaaccctcctaggccccgcttttgctgaatgccacgctctagtggactcgacagcctatctggccgcttgtgcacaggatctatgccggtgtcccacctgcccttgcgccaccttcgtggaatatagtcggcaatgcgcgcacgctggtggtcagccacgcaattggcgttgtccagagttgtgcccccgcacttgccctttaaacatgcagcatcaagaatgcgggagcccctgtactgatacttgcagtaacccccaaagggcgcagctgtgtgaggatcattgcgtcgacggatgtttttgcccgccggggcggtcatgtaccgttttggacgatattacgcacagtggatgcctgcctctaggacagtgtccttgtacccacggaggtaggacgtactcccctggaactagtttcaacacgacctgtagcagctgcacctgctcgggcgggctttggcagtgtcaggatctcccttgtccaggcacctgtagcgtgcaggggggggcgcatatctcaacgtatgacgagaagctgtacgaccttcatggggactgtagctatgtgttgagcaagaagtgcgccgattcatctttcacagtactggcagagctacgcaaatgtggactgaccgataacgagaactgtttgaaagctgtcactctgtctttggatggcggagacaccgccatccgggtacaggccgacgggggcgtgttccttaatagtatttacacacaactgcccctgtccgccgccaatattactttgttcacgccttcgagtttctttattgtcgttcagacaggcctgggtctgcagttacttgtgcagctggttcccctgatgcaggtttttgtgcgactggatcctgcccatcagggccagatgtgcggactgtgtggcaatttcaaccaaaaccaggccgacgatttcacagccctgtccggcgtggtcgaggccaccggcgctgcatttgcaaatacatggaaagcccaagccgcctgtgcgaatgctcgcaattctttcgaggacccttgttctctgagcgtcgaaaatgaaaattacgctcgccattggtgcagtcgtttgactgaccctaactccgcattttccaggtgccactccatcatcaatccaaaaccttttcatagtaactgtatgttcgatacttgtaattgcgagaggtcagaagactgtctctgtgctgccctgtcctcctacgtgcatgcttgcgctgccaagggggtccaactgtctgattggcgcgatggagtgtgtaccaagtatatgcaaaactgccctaagtcccaacgctacgcctatgtagtggacgcctgtcagccgacctgtcggggcttgagtgaagccgatgtgacttgtagcgtctctttcgttcctgtggatggctgtacttgccctgcaggtacgttcctcaacgacgccggggcatgcgtgccggcccaggagtgtccttgttacgcccatggcaccgtgctggctcccggcgaggtcgtgcacgacgaaggtgccgtctgctcctgcactgggggaaagctttcctgtctgggggcttctcttcaaaaatccactggctgcgcagcacccatggtgtacctggactgctcaaatagcagtgctggcacacccggtgccgagtgccttagaagttgccacaccctggatgtcgggtgtttctctactcattgtgtatccggttgcgtgtgtccgcccggattggtgtccgatggctcaggaggatgcattgcagaggaggactgcccctgtgttcataatgaggctacttacaaaccaggcgagactatcagggttgactgcaacacttgtacttgtaggaaccgacgctgggaatgttctcacaggctctgcctggggacctgtgtcgcctacggcgatggacatttcattacgttcgatggagaccggtacagcttcgaaggctcctgcgagtatatcctggcgcaggactactgtggagacaacaccacccatgggacattccgaattgttacagagaatattccatgtgggacaactggaactacctgttctaaggccattaaactttttgtggaggtgaggaccgcccccgccgtctctacccctgacccagccgcaaatgagccagctccccgcgaggcttccgtgggtttccgacagagactgccaccccttcagtcctacgagctaatcttacaagaagggacgttcaaagccgtcgctcgcggaccagggggtgaccctccctataaaatcagatatatggggatctttctggttattgaaacacacggtatggcggtaagctgggacagaaaaacttctgtcttcattcgacttcatcaggattacaagggaagagtttgcggcctctgcggcaattttgacgacaacgctatcaacgattttgctaccagaagccgatcagtggttggtgatgccctggagtttgggaacagctggaaactttcaccctcctgtcctgatgccctcgcccctaaggacccctgtactgccaatccattcagaaagtcatgggctcagaagcaatgttcaatccttcacggacccaccttcgcggcctgtagatctcaggtggacagcaccaagtactacgaagcgtgcgtcaacgacgcctgcgcatgtgactcagggggagactgcgaatgcttctgtacggctgtagccgcctatgcccaggcgtgccacgacgccggcctttgcgtgagctggagaacaccagacacttgtcctctgttttgtgatttctataatcctcacggaggctgtgagtggcattatcaaccgtgcggagccccatgtctgaagacttgcaggaaccctagcggtcactgcctagtcgatcttcctggtctggagggatgttacccaaaatgccctccgtcacagccattcttcaacgaggaccaaatgaaatgtgtcgcccagtgtggctgctatgacaaagatggcaactactacgacgtaggagctcgggtgcccacagccgagaattgccaatcatgtaattgtacaccgtccgggatccagtgcgcacacagcctcgaggcttgcacgtgcacctatgaggataggacatattcctaccaggacgtgatttacaacacgactgatggccttggtgcatgtctgatcgcaatttgtggaagcaacggtactattatcaggaaggccgtggcatgtcccggcactcccgccaccactccctttaccttcaccacagcctgggtgccacactctaccactagtcccgctctccccgtctcaactgtctgtgtgagggaagtgtgtaggtggtcttcttggtacaacggccacaggcctgagccaggactcggaggtggagacttcgagacctttgaaaacctccggcagcggggctaccaggtctgtccagtccttgcagatattgagtgtcgagcagcacagctcccggatatgcccctcgaggaattaggacagcaggtcgactgtgatcggatgcgcgggctgatgtgcgccaacagtcagcagagcccgccattgtgccatgattacgagcttagggtgctgtgttgtgagtacgtgccctgcggcccctcccctgcacccggtacaagccctcagccatctttatccgcttccactgaacccgccgtgcccacccccactcaaaccaccgctaccgagaaaaccacactgtgggttactccttcaatcaggagcactgccgctctgacctcgcagaccggaagttcaagcggtccggttaccgtaacaccttccgcccctgggactacgacctgtcaacctcgctgtcagtggaccgagtggtttgatgaagattaccctaagagtgaacagctgggaggagatgtggaaagctatgacaaaattagggctgccggaggacacctgtgtcagcagcctaaggacattgaatgtcaagcggagtccttccctaactggacccttgctcaggtgggacaaaaggtgcactgtgacgtgcatttcggactggtgtgtcggaattgggagcaggagggcgtcttcaaaatgtgttataactacagaatccgcgtcctgtgctgttcagatgaccactgcagaggccgggccacaacccctccccctaccaccgaactagaaacagctacaacgactacgacacaagccttgtttagtaccccccagcctacgtcttccccaggcctcacaagagcaccacctgccagcacgaccgctgtaccaacactatctgaaggactgacctcccctaggtatacttcaacacttggcaccgcgacaacaggcggtccaacaaccccagccggtagcacggagccaacggtgccaggcgtggcaacatccactctccccacaagaagtgctctgcccggtacaactggctctttgggcacatggagaccatctcagcccccaaccctggccccgacaactatggcaacctcacgggcacgccccactggaacagcatcaaccgcatccaaagagcccctcacaacctccctggcacctacgctaacctccgagttatctacatcccaagctgagacatctacaccacgtactgaaacaactatgtctcctcttacaaacacaacgacttcacaggggactacgcgatgccagccaaagtgtgagtggaccgagtggttcgatgtggacttccctacatccggggtggccggaggagacatggagaccttcgagaacatacgcgcggccgggggcaagatgtgctgggcaccaaagagcatcgaatgtcgcgccgagaattaccccgaagtgagtatagaccaagtgggacaggttctgacttgcagcctggagacagggctgacttgcaagaacgaggaccagacagggaggttcaacatgtgcttcaactataacgtgcgggtgctgtgctgcgacgattattcacactgcccgtccacaccagccaccagtagtactgccactcccagttcaacgcctgggaccacctggattctgactaaacccacaacgacagcgaccacgacagcctccaccggctcaacagccacgccaacttccaccttacgcacagcccccccaccaaaggttctgacgacaactgccactactccaacagtcacatcgagtaaagcaactccatcgtcgtccccaggaactgcgaccgcgctgccggctttgaggagcaccgctactacaccgacagcaaccagcgttaccccaatccccagctcatcactgggaactacatggacacggctgtctcagaccacaacccccactgccaccatgagcaccgccacacctagcagcacccccgagaccgcccacacatccaccgtactgactgcaacggctaccacaactggcgctaccgggtctgtggccactccttccagcacgcccgggacggcgcacaccaccaaagtgcccactaccaccacgacaggatttaccgcaacaccttcgtcaagtccaggtaccgcattaacacctccagtttggatctctacgacaacaacgccaacaactagaggcagcactgtgaccccctcctcaataccagggacaacacacaccgccaccgttctcaccaccacaacgacaacagtggccaccggctcgatggcgacaccaagctcgagcacccagaccagcggcaccacgcatacaccaccagtgccgaatacaatggctacaactcacgggagatccttgcctcccagctcaccacacaccgtgcggactgcgtggacctcggcaacttctggtattctcggtactacacacatcaccgagccatccacggtaacttctcatacactggccgctaccaccggaactacccagcacagtacacccgcattaagtagtcctcatcctagctctcggacaacagagtctccacccagccccgggacgacaactccaggccacactacagctacctctcggaccacagctaccgccaccccttccaaaacaagaacgagcactcttttgccatcttcccctaccagtgctccgatcacaacggttgtgacaatgggctgtgagccccagtgtgcatggtcagaatggttggactatagctaccccatgccaggtccctccggaggagattttgatacctacagcaacataagggctgctggtggagccgtgtgtgaacagccactgggacttgagtgtcgcgctcaggcccagcccggcgtgccactgagagaactgggtcaggttgttgagtgttctctggatttcggtttagtgtgtcggaaccgggagcaagtcggaaagttcaaaatgtgtttcaattacgaaatccgcgtgttctgttgtaactacggtcactgtccatccacacccgcaacaagctccacggcaatgccgagctccactccaggtaccacttggattcttaccgagcttacaactaccgcgaccaccacggagtcaactgggtcgacggccacgcccagtagcacgcctggaacaacctggatcctgacagagcctagcacaactgccaccgttaccgtgcccacgggctctaccgcaactgcaagtagcacacaggcgacggccggcaccccccacgtgtccaccactgccacgactccaaccgttacctccagcaaggccactcctttttcatccccagggaccgcaacggcactgccagcattaagatccaccgccacaactcccacagccacctcgtttacagctatcccttccagctcattaggcactacatggaccaggctgagccaaaccacgaccccaaccgccactatgtcaacagccaccccctcctctaccccggagactgtgcatacgagcacagtactaacaaccactgccaccactactggcgcaaccggctcggtcgccactccgagcagcactcccggcacagctcatacgaccaaagtgcttacaacaactacaaccggatttacagcgacaccctcctcctctccgggcaccgcccgtaccctgcccgtgtggatctccactacaacaacccccacgacgagaggttccacggttacaccctcaagtattccaggcactactcatacacccaccgtgcttactactaccactacaactgtggccactgggtcaatggctacccctagttcctccacccagactagcggcaccacccacacaccgcccgtgcctaacaccactgccactacacacggtaggtccttaagtccatcctccccacacaccgtaaggaccgcctggacttctgcaacatctggaacattaggcactacacacattaccgagccgtccaccgggacaagccataccccagccgccaccaccggcactacacagcatagtacccctgccctgtctagcccacacccatcatccagaacgaccgagtctcccccttccccgggcacaactacacctgggcacacccgggccacatcaaggacgacagctacagccacccctagtaagacccggacctctacgctgctccctagtagccctacaagtgctcctataacaactgtagtcaccatgggctgtgaaccacagtgtgcctggtctgagtggctcgattatagctatcccatgcccggcccgagcggcggggacttcgatacctattctaacatacgggctgccggcggcgccgtgtgcgaacaacctcttgggttggaatgtcgggcccaggcgcaacccggcgtgcctcttagagaactgggtcaggtggtcgaatgttccctcgactttggcctagtttgtcgcaacagggaacaggtgggtaagttcaagatgtgctttaattacgagattcgggttttctgctgcaattatggccactgcccttcgacacctgctaccagctcgaccgccactcctagttcaactcccggaactacgtggattctgactgagcaaaccaccgccgctacaacaacagcgacaaccggtagcaccgccattccctcgagtacacccggcactgcccctcctccaaaagtgttaaccagcactgccacgacccccacagcgactagtagcaaggcaaccagcagttcgtcacccagaaccgctaccactcttcccgtgctgacaagcactgccaccaaaagtacggccacatccttcacgcctatcccgtcattcaccttgggtacgacaggaaccttgccagagcaaactaccacccctatggccaccatgagcaccatacatccttcctctacccctgagactactcacacctctacagtcctgaccaccaaggccactacaacacgcgccacatcttcgatgtctacgccctcttccacacccggcacaacctggatcctcaccgaattgacaactgccgccacaactacggctgccaccggaccgactgccacacccagcagtacccccgggaccacctggattctcacagaaccatcaacaacagccacagtcaccgtgcccaccggtagcacagctactgcttcttcgacacgggctacagctggaacccttaaagtgctgacttctaccgcaactaccccgaccgtaatctccagccgggctacgccttcctccagccccgggactgctacagcactacctgccctccggtccacagccaccactcctaccgccacaagcgtaacagctatccctagtagttcactggggaccgcttggactaggctcagccagactacgactccaactgccactatgtcgactgctacaccttcatccactcccgagactgtgcacacctcaactgttcttaccactactactacaaccaccagggcaaccggatccgttgccacaccgtccagtacccccggtactgctcacactacgaaagtgccgacaactacaactactggattcactgccaccccgagctcatcccccggcaccgcactcacacctccagtttggatatccactacaacaactccgacaacacgcggttcaacggtcaccccctccagcatcccaggcacgactcatacagctacagtcttgacaacgacaactaccacggttgctacaggtagcatggcaacaccatcctcctccacgcagactagcggtacaactcacacaccccccgttccaaacacaacagctactactcacggtcgatccttgccccctagttccccccacacggtgagaaccgcctggacaagcgccacgagcgggatcctgggcactactcacattacggagccttctactgttacatcgcacacccccgcagccaccacttcaactacacagcactctacacccgccctctctagtccgcacccttcttcacgcactacagaatcaccaccttccccaggtacgaccacaccagggcacactagggggacaagcaggacgacagcgaccgccactccttctaagacaaggacctccaccctgctgccaagttctcccacaagtgccccgatcaccacggttgtcactactggttgtgaaccacaatgcgcatggtccgaatggcttgattattcatatcctatgccaggaccaagtggtggggatttcgacacttactcaaacatcagggctgcggggggtgctgtgtgcgagcagccgctggggctggagtgccgagcccaagcccaacccggcgtacctctgcgcgagctaggacaggtggtcgagtgctccctcgatttcggactggtatgcaggaacagagagcaggtgggcaaatttaaaatgtgtttcaactacgagatcagagttttctgctgcaactatggtcactgtccatctacacctgccactagtagcaccgccaccccctcaagcacccctggcaccacatggatactgaccaagctgactactaccgccactacgactgagtcaacaggctcaacggccacgccctcatcaacaccaggaactacttggattctgaccgaaccgtctacaactgccacagtgactgtgccaaccgggtctacagccacggcaagctccacacaagcaacagctggaacgccgcatgtgtctactacggccacaactccaaccgttacctcaagtaaggctacaccattttcctctcccggtaccgcaactgctttgcctgctctgaggtctacagccaccacacccactgctacttcgtttacagcaatcccctcctcatcactgggaaccacctggacccggctgtcccagacaactacccccacagccacgatgagtaccgcgaccccttccagtacaccggagacagcccacacaagtaccgtgctaactactactgctaccaccacacgtgccaccgggtctgtagctacacctagttcgacccccggaacagcacacacaactaaagtgcctacgacgaccacgacaggctttacagtcaccccctccagtagccccggtactgcgcgaactcctcccgtctggataagtactactacgacccctaccaccagcggttctaccgtgactccatcttcagtcccaggcacaacacacacacccacagtgctgacaacgacaacgactactgtcgccacaggcagtatggcgacgcccagttcctcaacacagacaagtggcaccactcatacccctccggtacctaataccaccgctacgactcatggcaggagtctgagcccttcaagccctcatacagtgcggactgcctggacctccgccacttctggcaccttgggtacaactcatatcaccgagcctagcaccgggacgtcccacacacctgccgcgactacagggaccactcaacattccacccctgcattgtcctcaccccatccaagtagcagaacgaccgaatctccacctagtcccgggaccacaactcccggtcacaccactgccacaagtagaacaacagccactgccaccccatcaaagactaggacgtctaccctcctgccctcatcgcctaccagcgcccctatcacgaccgttgttaccaccggttgcgaaccacagtgcgcatggagcgaatggctggattattcttatcctatgcccggtcccagtgggggagatttcgacacatatagcaatatccgcgcagccggcggcgccgtctgtgagcagccgctgggtttggaatgccgggcccaagcccagccgggggtcccgttgggtgaactgggtcaggtcgtggagtgctctctggacttcggattggtgtgccgcaatcgagagcaggtggggaaattcaaaatgtgtttcaattacgaaatcagagtgttctgctgcaactacggacattgtccaagcaccccagctactagctctaccgccatgcccagctcaacgccaggcacaacatggattctgaccgaactcactactaccgcaacaaccaccgccagcactggatcaactgcaaccccgtcatcaaccccaggaaccgcaccccctccaaaggtgctgacatctccagccacaacccctacggccacctcgtctaaggccacctcctcttcatctccaagaacggccaccacactcccagtgctgacatccaccgcgaccaaaagtactgcaacttccgtcaccccaatcccaagctcaactctgggaaccactggaacacttcctgagcagaccacaacacccgtagctacaatgtcgacgattcatccgtcttctacgcctgagactacgcatacttcaacagtacttactaccaaagcaactaccacgcgcgcaacatcctctacctctactccctcgagtacgccaggcactacttggatcttgacagagttgaccacggcagcaaccacgacagcagccactgggccaactgctactccgtcttcgactcccggaacaacatggattctgacggaactaacaaccacagccaccaccactgccagcaccggttccacagcaacgcctagttccacaccaggcacaacctggatcctgaccgaaccatccacaaccgccaccgttacggtccccactgggtctactgctaccgcctcaagtactcaagccacggctggcaccccccatgttagcacgacggcaactacgcctacagtgacttccagcaaggccacgcccagctcttcccccgggaccgcaacggctctgccagctttgcgcagtactgccacaactcccaccgccacttcatttacagccatccccagttccagtcttggcaccacctggactcggttgtctcagaccacaacaccaacggccaccatgtctacggccactccatcctcaactccagaaactgtccacacttccacagtgttgaccgcaacagctaccaccactggagcaacaggctctgtagccactcccagttctacccccggcaccgcacacacaaccaaggtgccaacgactaccacaacggggtttacagccactccctcttcctctcctggcacagccctcacccccccgaccacaacgccaatgagcactatgtctacgattcacaccagttctacacccgaaactacccatacttccacggtactaaccactacagcgactatgaccagagctacaaatagtaccgccacaccgtcttcaacgctcgggacaacacggatcctgactgagttgacaacaaccgcgacaactacggccgcaaccggatccacagccaccttgagttctacccccggcaccacgtggatacttactgaaccttctacaattgccactgttatggtgcctaccggttccaccgccacggcctcctctactctcggaacggcacatacacccaaggtggtcaccaccatggccactatgcctaccgctaccgcttcaacagtgcctagcagttctaccgtgggaacaacacggactccagcagtcctgccttcatccttgcctacctttagtgtatcgaccgtatcctcatccgttttgacaaccctgcgccccactgggttcccaagctcacactttagcacaccttgcttttgtcgggcattcgggcagttcttctcccccggggaagtgatctacaacaagacagacagggcaggatgccacttctatgcggtttgcaaccaacattgcgatatcgatcgatttcagggagcttgtcccacttctccccctcccgtgtcttccgcgccactgtcgtccccttctcctgcaccaggttgcgataatgcaattccattgcgccaggtcaatgaaacctggactcttgaaaactgcacggttgccaggtgtgtcggagataatcgagtggtgttgttggaccccaagcccgtcgctaacgttacttgcgtcaataagcatctgccgataaaagtgagcgaccctagtcagccctgtgatttccactacgagtgtgaatgtgagtgcgtgggaggccggggcattacccctggagccggtatttgctccatgtgggggggaagtcattattccacgttcgatgggacctcctataccttcagagggaattgtacctacgtcctcatgcgcgagattcacgcccgctttggcaacctgtccctgtatcttgacaaccattactgcactgctagcgccacagccgccgcagcccgttgcccacgtgcgctttctatacactataagtcaatggatattgttctgaccgtcaccatggtgcacggtaaagaagaggggctcatactcttcgaccagattcccgtctcgagtggcttctccaagaatggagtactggtttctgtacttgggacaactacaatgcgggtcgacattcccgctctgggtgtgagtgtcacattcaatggccaagtctttcaggccagactcccttacagtctatttcacaacaacactgaaggtcagtgcggaacctgcacgaacaatcagcgtgacgactgtctccagcgagatgggaccacagctgcctcatgcaaggacatggcaaagacttggttggtgcctgattccagaaaagatggctgttgggcgcccactggaaccccacccaccgcctctcccgccgcccctgtgtcttcaacacctacccctacaccctgccctccccagcctctgtgtgatctgatgctgtcccaggtgtttgccgaatgtcacaatttagtgccccccggaccatttttcaacgcgtgtattagcgatcactgcaggggtcggctagaggtcccttgccagagtctcgaagcctacgccgagttgtgcagagcgcgaggagtgtgttcagattggcggggcgcaactgggggcctttgtgatctaacatgcccccccacaaaggtgtataaaccatgcggcccaatacaaccagcaacatgtaactctcggaaccagagcccccagctcgagggcatggctgaagggtgcttctgcccagaagatcagatcctcttcaatgctcacatgggcatttgtgtccaagcctgcccatgtgttgggcccgatgggtttccaaaattccccggtgagaggtgggtaagcaattgccagtcctgcgtatgtgacgagggcagcgttagtgtgcaatgcaagcctctaccctgcgatgcccagggacaacctcctccatgcaacagaccggggtttgtgaccgttacaaggccaagggccgagaatccttgttgccccgaaactgtctgcgtgtgtaatactaccacatgcccacagagccttcccgtgtgccccccagggcaggagagcatctgtacccaggaggagggggattgttgcccaactttcagatgcaggccccagctgtgctcatacaacggaaccttctatggtgtgggcgccacctttccaggagccctgccctgccatatgtgcacgtgtctcagtggcgacactcaggatccaactgtccaatgccaggaagatgcctgcaacaatacaacctgcccgcaggggttcgaatataaaagagtggctgggcagtgttgcggcgaatgcgtccagactgcctgtctgacgcctgatggacagccggtccagctgaacgagacatgggtgaatagccacgtcgacaactgtaccgtgtacctctgtgaagcagaaggcggggtgcaccttctgacgccacagccggccagctgcccggacgttagttcttgccgaggtagcctgcggaaaaccggctgttgctactcgtgtgaagaggattcatgtcaggtgcgcattaatactacgattttgtggcatcaaggctgcgagactgaagtcaatatcaccttttgcgaaggttcctgccctggcgcgtccaagtatagcgccgaagctcaggccatgcagcaccaatgcacctgttgtcaggaacgccgggtgcatgaggaaacagttcctctgcattgccccaatggatccgctattctgcatacttacacccacgcggtgcaagtactgtgtggtctccttgcgtggggcctgcaggccggggggcatatcaggggcgctgtccaagatccacagcagcctctcaaggaccaagaggcatcagggaaggcgcgccagggcgggggctaccgacaaacagtggcctggggtgataagtccaacgctcgggcatggttacaaaagcccgtggtttgggtacagtccggtgctttcccaactccaggtcccgcttcggccctgtgcccatggtag

SEQ ID NO: 128573 - DNA, 17298 bp, Artificial Sequence
  derived and/or modified sequence
atgggtgcaccaagcgcgtgccgaacgcttgtacttgccctggccgcaatgctagttgttcctcaggccgaaacccagggcccagtcgaaccctcatgggagaacgctggacacactatggacgggggggcccccacgagttcgccaacaaggcgagtctcgtttgtaccacctgtgacggttttccccagcctgagtcctctgaatccagctcataatggccgcgtctgttccacctggggagattttcactacaaaacgtttgacggcgatgtcttccgattccccggactgtgcaattacgtgttctctgagcactgcagagcagcctacgaggacttcaatgtgcagttgagacgcggcctggttggcagtaggcccgtggttactcgagtagtgatcaaagcccagggcctggtccttgaagcgagcaatggcagcgtcctgatcaatggccagcgcgaggagttaccttactcgaggaccggcctgctggtggagcaatcgggcgactacataaaagttagcatccgactggttctcaccttcctgtggaatggagaggacagtgcacttctcgaattggacccaaagtatgccaatcagacctgtgggctgtgcggcgacttcaacggtctaccggctttcaatgagttctacgctcacaatgctaggctcacgcctctccagttcggaaatctccagaagctagacggacccactgagcaatgcccagatccactacctctgcccgctgggaactgcacagacgaggaggggatctgtcataggaccctacttggacctgccttcgctgaatgccacgccctggttgacagcacggcttatctggcggcctgcgcccaggacctctgcagatgccctacatgcccttgtgctacattcgtagaatactcccggcagtgtgctcatgccggagggcagccacgtaactggaggtgccctgagctttgtccacgtacctgccccctgaatatgcagcatcaggagtgcggctctccttgcaccgacacatgtagcaatcctcagagagcgcaattgtgcgaagaccactgcgtggacggatgcttctgtccccccggcagaagttgcaccgttttagacgacatcactcacagcggttgtctgcccctgggacagtgtccatgcactcatggcggacgcacttattcaccaggtactagctttaacactacctgctcttcttgtacgtgttcaggaggactctggcaatgccaagatttaccttgtccgggtacatgcagcgtccaggggggagcacacatttccacttatgatgagaaactttatgatttgcatggagattgctcctatgtgctctctaagaaatgtgctgactcctccttcactgtgctcgctgagctgaggaaatgcggcctgacagacaacgagaactgtctgaaggctgtaaccctatctctggacggcggagacacagccatcagagtgcaagccgacggtggggtttttttaaactcaatttacacccaactgcctctttccgcagccaacatcaccctatttaccccgtcaagttttttcattgtagtccagaccgggctgggtctgcagttgctcgtacagcttgtacctctaatgcaggtatttgtgcgtttggatcctgctcaccagggccaaatgtgcggcctctgcggtaatttcaaccagaaccaggccgacgattttacagctctctcaggtgtggtcgaggccaccggtgcagcctttgcaaacacttggaaggcccaggcagcttgtgcaaacgctcgcaattcctttgaggacccttgcagcctgagtgtagagaacgaaaactatgcacggcactggtgcagccgcctgacagatccaaacagcgcgttcagtcggtgtcatagcattatcaacccgaagcccttccattctaattgtatgttcgatacttgcaattgcgaacgctccgaagactgcctgtgcgccgcactgagctcctacgtgcacgcctgcgctgctaagggtgtgcagctgagcgattggagagatggtgtttgtacgaaatacatgcagaactgccccaagagtcagcgatatgcatatgttgtcgatgcatgtcagcccacttgtcggggcctcagcgaggctgatgtgacttgtagcgtgagcttcgtcccagtggatggatgtacttgtccggcgggcactttcctgaatgatgccggggcatgcgtccctgcccaagaatgtccatgttacgcccatgggaccgtcctggcacctggcgaggtggtacatgacgaaggcgcagtctgctcctgcacggggggcaagctgtcttgcctgggtgcgtctctgcaaaagtcaactgggtgcgctgcccccatggtgtatctcgactgctcaaatagcagtgccggtacaccaggagccgaatgcctgaggagttgtcacactctggatgtgggctgtttctctacccattgcgtatccgggtgtgtgtgtccacccggcctggtgtccgacggctccggtggttgtatagctgaggaagattgcccctgtgtgcacaatgaagctacgtacaagccaggagaaaccattcgcgtggattgcaatacatgcacatgccggaaccgaagatgggaatgttctcacaggttgtgtctgggcacgtgcgtggcctatggtgacggccactttatcacatttgatggtgacaggtatagttttgaaggaagctgcgagtatatcctcgcacaggattattgtggggacaacacgacccacggtactttcagaatcgtgacagagaacatcccatgcggtacgacaggaaccacctgtagtaaagccattaagttgttcgttgagtcatatgaactgatactgcaagaaggcacatttaaggccgtcgccaggggtccaggaggggatccaccctacaaaataaggtatatgggcattttcctggtgatcgaaacccacggcatggcggttagctgggacagaaagacctccgtgttcattagattgcatcaagactataagggtcgcgtttgcgggctttgtgggaatttcgatgataacgcaattaacgactttgcaacacgctctaggtcggtggtgggcgacgccctcgagttcgggaattcctggaagcttagcccttcctgccccgatgccctcgcacctaaagacccctgcacagcaaatccattccggaaaagctgggcccagaaacagtgcagcattctgcatggtcctactttcgctgcctgccggtcacaggtggacagcactaaatattatgaggcttgcgtcaatgatgcgtgcgcatgtgactccgggggcgactgtgaatgtttctgcaccgccgtggccgcctacgctcaggcatgccacgatgccggcttatgtgtgagttggaggactcctgatacatgcccactgttctgcgatttctataacccacacggcgggtgtgagtggcattaccagccatgtggggctccctgccttaaaacatgtcggaacccttcaggacattgtctggtagacttgcccggactggaggggtgttacccaaaatgccccccatcacagcccttttttaacgaggaccagatgaaatgcgtcgcccagtgcgggtgctatgacaaggacggtaattattacgatgtgggcgcacgggtgcccaccgccgagaattgccagagttgcaactgcactccttcagggattcagtgtgcccactccttagaagcctgcacttgtacttatgaggatcggacctattcttaccaggacgtaatatacaatactacagatgggctgggtgcctgcctgattgccatctgtggcagtaacggaactatcatacggaaagcggtagcatgccctggaactcctgcaacgactccattcactttcactacagcttgggtaccccactctactactagccccgccctgccggtgagcaccgtttgtgtgagagaagtgtgcagatggagttcctggtacaatggtcataggccagagcctggtcttggaggcggcgatttcgagactttcgaaaacttgcgtcaaaggggttaccaagtctgcccagttcttgccgatatagagtgtcgcgcggcacagctaccggacatgccactggaggaactcggccagcaggtggactgtgatcggatgagaggcttaatgtgcgctaattcacagcagtcacccccgctgtgtcatgactatgagctgagagtgttatgttgcgagtatgttccctgtggcccatctccagcacctggcacatcaccacagccttcattgtctgcaagtacagaacctgcagttccaactcccacccaaacgacagcaacagaaaagactaccctgtgggttacaccttcgattaggagcacagccgctctgacgagccagacagggagctcaagcgggccagtgaccgtcacgccatccgcgccgggcaccacaacctgtcaaccgagatgccagtggaccgaatggttcgacgaagactacccaaaatcagaacagttaggcggcgatgttgaatcttacgacaaaattcgagctgcaggcggtcacttatgtcagcagcctaaagatatcgaatgccaggccgagtcttttcctaactggactctggcccaggtcggccaaaaagttcattgtgatgtccacttcggactggtatgcaggaactgggagcaggagggcgtgtttaaaatgtgttacaactacagaattcgggttctatgctgtagtgacgatcattgcagggggagagctaccacccctcctcctacaacagaacttgagactgccaccaccactacaacccaggctctctttagtactccgcagccaactagctctccaggccttactcgggctcctcccgccagtaccaccgccgtgccaaccctgtccgagggacttactagccctcgctacacgagtaccctcggcacggcaactactgggggacccacaacacccgctgggagcaccgagcccacagtcccaggcgtcgctacgagcaccttgcccacccgcagcgccctacccggaacaacgggatcgctgggcacctggaggccttcacagccacctactctggcccctaccactatggcaacatcgagagcccgcccaaccggcacagccagtactgctagcaaggaacccctgaccactagcctggcacctactctcacctctgagctcagcacttcacaagctgagactagtacaccccgtaccgaaactaccatgagtcccctgaccaataccaccacatctcaggggacaaccaggtgccagccaaaatgcgagtggacggaatggtttgacgtagactttcctacctctggcgtcgctggcggcgatatggagacatttgagaacattagggccgctggtggaaagatgtgctgggcacccaaatcaatcgagtgtcgagctgaaaactatcccgaggtgtcaatcgatcaggtgggtcaggttttgacatgcagcctggagaccggtttaacgtgcaagaatgaagatcagacaggccgcttcaacatgtgtttcaactacaacgttagggtgctctgctgtgatgattactcgcactgtccgtccacacccgctacttcaagcactgccactcccagcagcacaccagggactacttggattctgacaaaacctaccaccaccgcaaccacgacagcttcgaccggcagcactgcaaccccgacatccactctgcggaccgcccctccgcccaaggtgttaacgaccaccgctacaacccctactgtgacatcaagcaaggccacaccatcttctagtcctggaaccgctactgcactgccagccttgcgctccacagccaccacccctacagctacaagcgtgactcccatccccagttcttcccttgggactacctggactcggctcagccagaccactactcccacggcaacgatgagtacagcaacccctagctccactccagagaccgcccacacctctaccgtacttacagctacagcaactacaaccggtgctaccggcagcgtggcaacaccaagcagtacaccaggcacagcacataccaccaaggtgcctacaacgacaactaccggctttaccgccactccttcaagttcaccggggacagccttgaccccccccgtgtggatcagtacgacgactacacctacaaccagaggcagtacagtaactccttctagcatccccggaacaacacatactgctaccgtgctaacaacaactaccactactgtcgccactggatcaatggccacaccttcgtcaagcacgcaaacctccggaactccacctagtctaacgactaccgcaacaactatcacagccacaggatcaacgaccaatccatcctctactcccggcacaactcccattcccccagtgttgacaactacggccacgacccctgccgccacaagcaatacagtaacacccagctcagctctgggaactacccacacgcctcccgtccccaacaccatggctactacccacgggagaagcctcccgccgtcgtcaccccataccgttagaacagcttggacttctgctacttccggcatcctgggaactacccatatcacggagccatcaacagtaacatcccacaccttggccgctactacaggcactactcagcacagcaccccagccctcagcagcccacacccctcgtcgcgaaccacagagtcacctccgtcacccggcacaactacccctggccacactacagctacaagccgcacaacagccactgccacgccaagtaaaacccgaactagcaccttgctccctagctcccccacaagtgcccccattacgaccgtggtcaccatgggctgtgagccacagtgcgcttggtccgagtggctggactactcgtaccctatgccggggccgagtgggggggacttcgacacgtattcgaacatccgcgctgcaggaggggccgtatgcgaacaacccttaggcttggagtgccgcgctcaagcccagcctggagtaccactgcgcgagctgggccaggtagtggaatgctcgctcgattttgggcttgtttgtaggaatagagagcaggtggggaaatttaagatgtgcttcaactacgaaatacgagtgttctgctgcaattacgggcactgcccatctacacctgctacctccagcaccgccatgcctagttccaccccagggacaacatggattttgactgagctaacgacgacggcaactactactgagagcaccggcagcactgccacaccaagcagcactccagggactacctggatcttaaccgaacccagcactaccgccacagtcactgtcccaacaggatctacagccacagcatctagcacacaggcgacagccggtactccacatgtgtccaccaccgccacaactccgactgttacttcttcaaaggcaacccctttctcatcacccggcactgccacggcactgcccgccctgcgctcaaccgctactactcccacagcaacatcatttactgctattccgtcctcatcactcggcaccacctggactcggctcagccaaacgacgacccccacagctacaatgagcaccgccacaccttcaagcaccccggaaacagtccatacaagtaccgttctcacgaccaccgcaaccactacgggggctacaggtagcgttgccacccctagctcgaccccaggcaccgcccacaccaccaaggtgctgacgaccaccacgacgggttttacggcaaccccttcctcatctcccggcaccgcccgaacactgcccgtgtggatcagcacaaccacaaccccaacaacccgcggaagtaccgtcacaccaagtagtattccagggactactcacacccctaccgttctgacaacaacaaccacgaccgttgcgacggggagtatggccactccctcttcttccacacaaaccagcggtacacccccaagcttaacgaccacagcaaccacaattaccgcaaccggaagtacgacaaacccttcttcaacccccgggaccaccccgataccgccagtactaacaacgactgccactacacccgccgctacatcttccaccgtaaccccgtcttctgcactgggcactactcataccccccccgtccccaacaccacggcaaccactcacggtcgatccctgagcccttcgagtcctcacaccgtcaggacagcatggactagtgccaccagtgggacactgggcacaactcacatcaccgagccttctacaggtaccagccacactcccgccgctaccactgggactacccaacactctaccccggcactctcatccccacaccctagttctcgtactaccgagagccccccaagtccaggaactaccacccctggccatacacgggcgaccagtaggaccacagctactgctaccccctccaagactcgcacgtctactctgctgccttcttcccccacgtctgcacctatcacgacagtggtcactatgggctgcgagccgcagtgcgcatggtctgagtggctagactatagttatccgatgcccgggccttctgggggagatttcgacacttactctaacattcgcgcagctggcggcgctgtgtgtgagcagcctctaggtctggagtgccgggcacaagcccaacccggggtccctctgagggagctgggacaagtcgtggagtgcagcctcgatttcggtttggtttgcaggaatagggaacaggtgggaaaattcaaaatgtgctttaactatgaaataagggttttctgttgcaattacggccactgtccatctacgcccgcgacaagctccaccgctacaccctcctctacgccaggaacaacttggattctaaccgaacaaaccaccgcagcaaccactacagcgaccaccgggagcaccgcgataccaagctcaacccccgggacagccccccctccaaaggtgctgacttcaacagcgactacgccaacagcaactagttccaaggctacctcctcttcgagcccacggacggcaacaactttaccggtgctaacttccaccgcaaccaagtccacagccactagctttacccccatcccctccttcacccttggtactacgggaacccttccagaacagactactactccaatggccacgatgtccacaatccaccccagtagcacaccggagacgacccacacaagtaccgtccttacaaccaaggccacaactacccgggccactagcagcatgtctacgccgtcctcaacaccgggtacaacgtggatactgactgagctaactactgcagcaacaactactgccgctactggtcctacagccacaccgagcagtacgccaggaactacctggattctgactgaaccatcgaccacagccaccgtgaccgttcccaccggaagtacagcgacggcatcctcaactagagctaccgcaggaacgcttaaagtgcttacgtccactgccaccacccccaccgtgatctcatctagagctactcccagttccagcccaggcaccgctactgcacttcccgcgttgcgatccacagccaccacccctaccgctacctcggttactgctatcccgtcctcatccctgggtaccgcatggaccaggttaagtcaaacgaccaccccaaccgcgacaatgtcaactgccacaccctccagtacccccgagacagtccataccagcaccgtgctgacaaccactaccaccacgactagagccaccggctcggtcgcaactccctctagcacgcctggcaccgcccacacaacaaaagtgccgacaacaaccactacagggtttactgcgacaccaagctctagccctggtacagcgctgactccacccgtttggatcagcaccacaaccactcccacaacgcgggggtctaccgtcacgccatcttctattcccggaacaacacacacagcgaccgtgttaacgacaacaactacaacggtggccacggggagcatggccacccctagtagctctacacagaccagcgggactccaccatctctgactactaccgccacaacaatcaccgcaactggttcaaccacaaatcctagcagtacgcccggcacaacaccaatcccaccagtcctgactacaacagctaccaccccagctgcaacctcatccaccgtgacacctagctcggccctcgggacgacccacacacctcccgtacctaacacaaccgccactactcacggacgttccttacccccaagttcacctcacacagtgagaaccgcatggacctcagcaacaagcgggatcctcggcactacccacattacagaaccctcgaccgtaaccagccatactccagccgctactactagtaccacccaacattctactcctgccctgtcaagcccccatccatccagcagaacgacagaaagtccgccctcccccggcactactacacccggccacactcggggtactagccgcacaacagccacagcgacaccaagcaagacccggacctctactttgctgccaagcagccccactagtgctccaatcacaaccgtggtgacaactggttgcgagcctcagtgtgcgtggagcgaatggctggattactcctaccctatgccgggaccttctggaggggacttcgatacttattccaacatacgtgctgctggaggagcagtatgtgagcagcccttaggtttagagtgtagagctcaagcccagccgggggtccccctgcgcgaactgggccaggtagtggaatgctcactagattttggacttgtgtgcagaaatagagagcaggtaggaaagtttaagatgtgtttcaattacgagatccgcgtcttctgttgtaattacggacattgcccatctacaccagccacctccagcaccgcaacccccagtagcacgccaggtacgacatggatcctcacaaaactcaccactacagccaccactacagaaagtacaggctctactgcaactcccagttccaccccaggaacaacatggattcttaccgagccatccaccaccgcgacagttaccgtgccaaccggtagtaccgctactgccagctccactcaggctacagcgggaacgccacacgtctctactaccgctacaacccccactgtgacaagctctaaagcaacccctttcagttctcccggtactgccaccgccctgccagcccttcgtagtaccgccaccactccgactgcaacgtcgttcacagccataccaagctctagtctaggcacaacatggacgcgactgagccagacgactacccccactgctacgatgtctaccgctaccccctcttctacaccagagacagctcatacttccacagtgctgacaaccacagctaccaccacccgggcgaccggttcagtcgccactccttcatccactcctggaaccgcacataccaccaaggttccaaccaccaccaccacaggcttcacagtcacaccaagctccagcccagggaccgcgaggaccccaccagtttggatatccaccactactacgcctaccacctctggaagcactgtaaccccgtcttccgtcccaggcactacccacactcccacagtcctgaccaccacaacaaccaccgttgcaacaggctctatggctaccccctcctcatcaacacagacaagcggcacaccacccagcctgattaccaccgccactactatcactgccactgggtccaccactaatcccagctccacacccgggactacccctatccctcctgtcctcacaactacagctaccacacccgcagctacaagcagcacggtgacgccatcctctgcgctgggcacgacccatacaccaccggtgcctaacacaacagctactacgcacggtcgctctctgtctccctccagtccacatacagtgcgtacagcctggaccagtgctacctcaggtactcttggcaccacacatatcacggaaccatcgaccgggacctctcataccccggctgctactaccggtacaacccagcattcgacccccgctttgtccagcccccaccccagctcccgtaccacagaaagtcctcccagcccaggtacaactacacccggtcataccaccgctacttccaggacaactgcaaccgccactccgtctaaaactagaactagcaccttgctcccaagctcacccaccagtgcgccaataacaaccgttgtgaccaccggctgtgagccacagtgtgcctggagtgagtggctggactacagctaccccatgccaggcccctccggtggcgactttgacacctacagtaatattagagctgcaggcggcgctgtgtgcgagcagcctctggggctggaatgtcgcgcacaggcacagccgggggttcctcttggggaacttggacaggtagttgagtgcagcctggacttcggcctggtgtgccgaaatcgcgagcaggtagggaaattcaagatgtgctttaattacgaaataagggtgttctgctgtaattatggacactgtcccagcaccccggctacaagttccacagcaatgcccagcagcacccccgggacaacctggattctcaccgagctaaccaccactgcaactaccacagcaagtaccgggagtaccgctacaccctcatccacccctggcactgctccacccccaaaggtactgacctctcccgctaccacccccaccgccacctcaagcaaggcaaccagttcgtcctcacccagaacggctaccactctcccagtgcttacgtctacggccactaaatccaccgccaccagcgtgacacctattccctcctccactcttgggacgacaggtactctccctgaacagaccaccacaccggtagcgacaatgtcaacaattcacccttcctctacccctgaaactacacatacctccacggtcctgaccactaaagccacaacgactagggcaaccagctctacttctaccccttccagcacacccggaaccacttggatcctgacggaactgacgacagcggccacaaccaccgccgcgacaggcccaacggccaccccctctagtactccaggcaccacatggatccttactgaattgacaaccacagccacaactacggcaagtacaggttcgactgctaccccctcctcaactcccggcaccacctggatcctcactgaaccttccaccactgccactgtgaccgtgcctacaggcagtacggcaaccgcctcatcgacacaggccactgccggaacaccccacgtcagcaccacagctaccacgcccactgtcacaagttcaaaagctacaccgtcttcttcacctggtacagccactgctttgcccgctctgcgcagtaccgctacgacgcccaccgctacaagttttaccgcaattcctagcagttctctgggtacaacttggaccaggctgtcccagaccactactcctaccgcaactatgagcaccgcaacccccagcagtacccccgaaaccgtgcatacatccacggtcctaactgccaccgctactaccaccggcgctactgggtctgttgctacacctagctccaccccaggcacggcacacaccacaaaggtccctaccactaccaccaccggtttcaccgccacaccatcaagttccccaggtaccgcgcttacccctcccgtatggatctcaaccacaacgactcccactaccaccacacccaccactagcggaagtacagtcacaccttctagcataccgggcaccacccacactgcccgcgttctgaccacaacaacgactaccgtggcgacgggaagcatggccactccatcctccagtacacaaacctccggaacccccccatctcttacaaccacagccacgacgatcactgcaacaggctccacaaccaatccttcgtctaccccaggcacaaccccaatcactcccgtattaacatctacggccacaacaccagcagcaacgtctagcaaagctacttccagtagtagcccccgaaccgcaaccaccctccctgtgcttacatctactgcaacaaaaagtacggccacgagctttaccccaatcccgtcctccaccctgtggacaacatggaccgtgccggcccagacgacaaccccaatgtcaacaatgtccacaatccacacttcctcaaccccggagaccacgcatacatctactgtcctaactaccacagccaccatgacgagggccaccaactctacggctacaccatcgtcaaccttgggaaccaccagaatactaactgagttgaccacgactgccacaaccacagctgctacggggtctacagctacactgtctagtacgcctggcacgacctggattttgacagagccgagcactatcgccactgtgatggtaccaaccggcagcaccgctaccgcaagcagcacactcggtaccgcccatactccgaaggtggtcacaactatggccacgatgcccacagccaccgcctctaccgtgccatcaagcagtacagtggggacgactcggacgcccgctgtcctgccatctagtctgcccaccttctctgtctcgaccgttagttcctctgtcttaacaaccctgaggcccaccggatttccaagtagccacttttccacaccttgtttttgccgggcatttggtcagttcttctccccaggcgaagtgatatataataagaccgatcgcgcgggctgccatttttatgccgtttgtaaccagcactgtgacatcgacaggttccaaggtgcttgccccacatctcccccccctgtgtccagtgcacctctcagctcaccctcacccgcacctggatgcgacaacgccattcccttgcgccaggtgaacgagacctggacactggaaaattgtacagtggcccgatgcgtgggcgacaatcgagtcgtgttactggacccaaaacctgttgcaaatgtcacctgcgttaacaagcacctccctataaaagtttctgaccccagccagccatgcgatttccactatgagtgcgaatgcatctgctctatgtggggcggctcacactactccacttttgatgggaccagctataccttcaggggtaattgcacttacgtgctcatgagagagattcatgcccgcttcggaaacttgtcactgtacctggacaatcattactgcacggctagtgccaccgcagccgcagccaggtgtccaagggccttgagcattcactataagtcaatggacatcgtgcttacggtgactatggtgcacgggaaggaagaggggctgattctttttgatcagatcccagttagtagcgggttttccaagaacggcgtgctcgtgtcagtgctggggactacaacgatgcgcgtcgatattccagccctgggagtgtcggtgacttttaacggccaggtgtttcaagcacgcttaccgtactctctcttccacaacaataccgagggacagtgtgggacctgcaccaacaatcagcgcgacgattgtctgcagagggatggcaccactgcggcaagctgcaaggacatggcaaagacatggctagtacctgacagccgcaaggatggatgctgggcacccactgggaccccgccaactgccagccctgccgcaccagtgtcctcaacgcccacacctactccttgtccccctcagcccctttgtgatttaatgctctcccaagttttcgccgagtgccataacttagtgcctccagggccattctttaacgcatgcattagcgatcactgccgcgggcgactagaggtaccttgccaaagtttggaagcttacgcggaactgtgccgtgcccgcggcgtgtgctctgattggcgtggggccacagggggactgtgtgatctgacctgtccccctacaaaggtctataagccttgcgggccgatccagccagcaacctgcaattcacggaaccagtccccccaactggagggaatggctgaaggttgcttttgcccggaagatcaaattctcttcaacgcccatatgggcatctgcgtgcaggcctgcccgtgtgttggtcccgatggcttccccaaatttcccggggaacgctgggtgtcaaattgccagagctgtgtgtgcgacgaaggcagtgtgagcgtacaatgcaaacctctaccatgtgacgctcagggacagccgcctccctgcaaccgcccagggttcgtgaccgtaacccggcctagagcagaaaacccatgttgtcccgagacggtgtgcgtctgtaataccactacgtgccctcagagtctgcccgtgtgcccacccggccaggagtccatctgcactcaggaggaaggcgattgttgtcccaccttccgttgtcgccctcagttgtgtagctacaacggaactttttacggcgttggggccacatttcctggcgccctgccatgtcacatgtgtacatgcctgagtggtgatactcaagaccctacagtgcagtgtcaagaggatgcgtgcaataatactacttgcccgcagggcttcgagtacaagagggtggcaggccagtgctgtggggagtgcgtccagacagcctgcctgactcctgacggacagccagtccagcttaacgaaacttgggtgaactcgcacgtggataactgtactgtgtacctatgcgaagctgaaggaggggtgcatcttctgaccccacagccagcatcatgtcccgacgtgagctcctgccgcgggtccctacgcaaaacagggtgctgctattcgtgtgaggaagactcgtgtcaggtgagaatcaatactaccattttatggcaccagggctgtgaaactgaggtgaacatcaccttctgcgagggctcatgtcccggcgcctcaaagtattcggctgaagcccaggccatgcagcatcaatgcacatgttgccaagagaggcgggtccacgaggagacagtgcctctgcattgccctaacggaagcgcaatcttgcacacatatacccacgtggatgagtgcggatgtacaccattctgtgtcccagcccccatggcaccacctcacactcgaggatttcctgcgcaggaagctaccgcagtgtag

SEQ ID NO: 128574 - DNA, 17289 bp, Artificial Sequence
  derived and/or modified sequence
atgggcgcccctagcgcctgcagaaccctggtgctggcactggcagccatgctggttgtgccccaggctgagacccaggggccagtggagcctagctgggagaatgccggtcatacaatggatggtggggccccaaccagtagccctacgcggcgcgtatcatttgtaccacctgtgacagtgttcccgtccctcagtccactaaaccctgcacataatggccgggtgtgttctacgtggggcgatttccattacaagacatttgacggggatgttttcagattccctgggttgtgcaattacgtgttttctgagcactgccgggcagcctacgaagatttcaacgttcaactgcggcgcggactcgtcggctccagacctgtcgtcactagagtggtcattaaggctcagggcctagttttagaggcctctaatgggagcgtattaattaatgggcagcgtgaagagctgccctactcaagaaccgggctgcttgtggaacagtccggcgattatatcaaggtcagcattcgactggtgctgacattcttgtggaacggggaggactcggctctcctggaacttgacccgaagtatgccaaccaaacatgcggcctgtgtggcgacttcaacgggttgccagcatttaatgaattctacgcccacaatgcacgtctgacccccttacaattcggtaatctacagaaactcgatggtcccacggagcagtgccccgatccactgcccctgcctgcaggaaactgcacagatgaggagggaatctgtcaccgaaccttgctgggccctgctttcgccgaatgccacgcccttgtggatagtactgcatatctggcggcttgtgcccaggacttgtgtagatgccctacctgcccttgtgccacctttgtcgaatatagccggcagtgtgcccacgcgggagggcaacccaggaactggaggtgtcccgagctgtgccctcggacttgtccactgaacatgcagcatcaggagtgcgggagcccgtgcacggacacatgttccaatccacagcgagctcagctttgcgaagaccattgcgttgatgggtgcttttgcccccctgggacggtcctggatgacatcacccactctggctgtctgcccctcggacaatgcccctgtacacacgggggaagaacatattcccctggaaccagtttcaacaccacatgcagtagttgcacatgcagcgggggactctggcaatgtcaggatttaccttgtcctggtacatgtagtgtgcagggtggagcgcatatctctacctacgacgaaaaactgtatgacctgcacggagactgctcctatgtcctgtcaaagaaatgtgctgactcatcctttaccgtgctggcagaactgcgcaagtgtggcctgactgacaacgagaactgccttaaggctgtaactctatcactggacggcggggataccgctattcgcgttcaggctgatgggggggtcttccttaactccatctacactcagcttccccttagcgccgccaatattactttattcaccccttctagcttctttatcgtcgtgcagaccgggttgggattacaactactcgttcagcttgtcccactgatgcaggtgtttgtgaggcttgatccagcccaccagggccagatgtgcgggttatgcggcaactttaaccaaaaccaggctgacgatttcacggccctgagcggagtcgttgaggcgactggcgccgcctttgccaatacctggaaagctcaggctgcatgcgctaacgcacgtaattctttcgaggatccttgctccctgtccgttgagaacgaaaactacgctagacattggtgcagtcgcctcacggatcctaattcagctttttcccgctgtcacagcattataaacccaaagccattccattcaaattgcatgtttgacacatgtaattgtgagcggtccgaagattgtctgtgcgctgccctgtcttcttatgtgcatgcctgcgccgctaagggggtgcagctgagtgactggcgcgatggagtatgcaccaagtatatgcagaactgccccaagagccaacggtatgcctacgtcgtggatgcatgccagcccacctgtcggggactgtccgaggcagacgtcacctgctctgtatcatttgtaccagtggacgggtgtacctgcccggccggcacatttctgaacgatgcaggagcctgcgtgcccgcccaggaatgtccatgttacgctcacggcactgtgcttgctcccggcgaggtggtgcacgacgaaggcgcggtgtgctcttgcactggtggcaagctgagttgcttgggggcctctcttcagaagtctactggctgtgcagcccctatggtttacctagactgtagcaacagctcagccgggacaccaggcgctgaatgcctgcggtcctgtcacacacttgatgtaggatgtttctcaactcattgtgtctcgggatgtgtgtgcccaccagggcttgtgagcgacggatctggcgggtgcatcgccgaggaagattgtccatgcgttcataatgaggctacgtacaaaccaggggaaactattcgggtggattgcaacacttgtacatgcagaaaccgccggtgggagtgctcccaccgattatgtctggggacatgcgtcgcctatggcgatggccacttcataacctttgacggggaccggtacagcttcgaagggtcgtgtgaatacatccttgcccaggattactgtggcgataacactactcacggcacgtttaggatcgtgacagagaatattccttgcggcaccaccggcactacttgctcgaaagccatcaagctattcgtggagagctacgagttgattttgcaggaaggcacattcaaagctgtcgctcggggtcccggaggcgaccccccctacaagatcagatatatgggcatttttctcgtcatagagactcatggaatggctgtgtcttgggataggaagacgagtgtcttcattcggctgcatcaggactataaagggagagtttgtggcctttgtggaaacttcgatgataacgccatcaatgacttcgcaacacgcagtaggtccgttgtgggagacgccctggagttcggtaacagttggaagctaagcccctcatgccccgacgccttggctcccaaagatccctgtacagccaatccgttccgtaaatcctgggcacagaagcagtgtagtattcttcatggccccacattcgcagcctgccggtcacaggtcgacagtactaagtactatgaggcctgtgttaacgacgcttgtgcatgcgattctggaggggattgcgagtgcttttgtacagctgtcgctgcatatgctcaggcgtgccacgacgccgggctgtgcgtgagctggcgcactccagatacatgcccactgttttgcgatttttataacccccatggagggtgcgaatggcattaccagccctgcggtgctccttgccttaagacctgtcgaaatcccagcggccactgcttggttgatctgccagggctggaaggttgttaccccaaatgcccaccaagccagccatttttcaatgaagaccagatgaagtgcgtcgcccaatgtggctgctacgataaggacgggaactactatgacgtgggagcgcgcgtgcctaccgccgaaaattgtcagtcgtgcaattgtacgccttcaggcatccagtgcgcccatagcttagaggcgtgtacttgtacatacgaagataggacttacagttatcaggatgtgatttacaataccaccgatggcctcggtgcttgcctaatagcaatctgtggcagcaacggcacgatcattcgaaaagctgttgcatgtcctggcacacctgctactacaccattcacctttacgaccgcctgggttccccattccaccacatctcctgccctgcccgttagcaccgtctgcgtgcgggaggtttgccggtggtccagctggtataacggccacagacccgaacctggtctgggggggggcgatttcgagacctttgaaaatctgcggcagcgtggctatcaggtgtgccctgtgctcgctgatattgagtgcagggcagctcagttacccgacatgcctctggaagaactgggacagcaggtggattgcgatagaatgcgggggttgatgtgcgcgaattcacagcagtccccccctctgtgtcatgactacgagctgcgggtgttatgttgcgaatatgtcccttgtggcccttcaccagctcccggcaccagcccacagccatctctcagtgcttctaccgagccggcggttccgaccccaacacagaccacagctaccgaaaagaccactctttgggttactcccagcataagaagcacagcagctctgacctcccagacaggtagtagttccgggcccgtgacggtgaccccctctgccccagggaccactacttgtcagccaagatgtcagtggacggaatggttcgacgaagactacccgaagtcagaacaactgggaggcgacgtggaaagttacgacaagatccgcgctgccgggggccatctgtgtcagcagccaaaggatatcgagtgccaggcagagtcctttcctaactggacgctagcccaggtcggacaaaaagtgcattgcgatgtgcatttcgggctcgtgtgcaggaactgggagcaggagggagttttcaaaatgtgttataactatagaattcgcgtgttgtgctgttcagatgatcattgtcgaggacgggccacaaccccgccacccactactgagctagaaaccgccacaacaaccaccacccaggcgctcttcagtaccccacaacctaccagcagccctgggttaaccagggcaccaccagcttccaccactgccgttcctactttgtccgaaggattgacgtccccgaggtatacttccaccctaggcacagcaacgactggaggccccaccacccctgctggctctacagagcctactgtgcctggcgtggcgacctcaacactacccaccaggagtgctctgcctggcacaaccggctctctgggcacatggcgccctagccagcctcctacacttgcgcccactaccatggctaccagtagggcaaggccaacaggtaccgcctccacagccagcaaagagcccctgacaacatcactggcaccaaccttgacttcagaactgagcacatcacaggcagaaacatctactcccagaactgagaccactatgagtcctttaacaaacaccacaacaagccagggtactactagatgtcaacccaagtgcgagtggactgaatggttcgacgtagacttcccaacctcaggtgttgctggtggagatatggagacatttgagaatattcgagccgccgggggaaagatgtgttgggcaccaaagagcatcgagtgtagggcggaaaactacccggaggtgagcattgaccaggtggggcaagtcctgacctgtagcctggagaccggattgacgtgtaaaaatgaggatcagactgggaggttcaatatgtgctttaactacaacgtgagggttctttgttgtgatgactacagtcactgcccgtccaccccagcaacttcgtccaccgccaccccctcgtcaacacccggcacaacatggatcctgaccaaaccaaccaccaccgctaccacaacagcaagcacaggatctacagccacacctacttccacacttcggaccgctccccccccaaaggtgctcaccaccacggccacaacgccaaccgtgacttccagcaaagcaacgccaagctcttctccaggcactgcgacggccttgccagctctgcgaagcactgctactacacctacagcaacttcggtgaccccaattccctccagctctctcggcacaacgtggacccggctgtcgcagacgactacgccgaccgcaaccatgtctacagcaacaccttccagtactccagaaaccgcacatacttccaccgtgctgacggccaccgctacgactacgggggccaccggctctgtagccaccccttcaagcactccagggacagcccatacgaccaaagtgccaaccacaacgactactggtttcactgcaactcctagcagtagcccagggaccgctctgacgccacccgtatggatcagcacgaccactacccccacaactcggggaagtaccgttactcccagcagcatacctggtacaacgcatactgccacagtccttactacaaccactacgaccgtggccaccggctcaatggccactcccagctcctccactcagacatcaggtacgcccccctccttgaccacaactgcgacaacgatcacagccactggatccaccactaatccctcatccactcccggaacaacccccattccgcctgtgctgacaaccaccgcaaccacgcctgcggcgactagcaatacagttaccccttcatcggccttagggactactcatactccacccgtgcctaacacgatggctaccacacacggccgatcacttccacccagcagcccacatacagtccggacagcttggacctccgccacttcaggcatcctcggcactactcacatcactgaaccaagcacagtaacaagccatacgcttgccgccactaccgggaccacacagcactcgaccccagcactgtcctccccacatccgtcttccagaacgaccgaatctcccccatcacccggcactacaaccccagggcatacaactgccacctcacggaccacggccaccgccacgcccagcaaaacacgcacttccaccctgctcccctcgtccccaaccagcgcacctattactactgtggtcacgatggggtgtgaacctcagtgcgcatggtccgagtggctggattatagctatcccatgccaggcccctcaggcggagattttgatacatattccaatatcagagccgccggaggcgccgtttgtgagcagcctctcgggcttgagtgcagagcccaggcccagcctggtgtcccactgagagagctcgggcaagtggtggagtgtagtcttgacttcggcctggtctgtcgcaatagggaacaggtgggaaaatttaaaatgtgctttaattacgagatcagggtattctgttgtaactatggacattgtcctagcacccccgctacttccagtacagctatgccgtcctcaacccccgggacaacctggattcttacagagctcacaacaacagccactacaaccgaaagtacagggagtactgcaaccccctcatcaacccccgggacaacatggatcctgactgagccaagcactaccgcgacagtgactgtgcccaccggctctacggctactgccagttctacccaagctacggctgggacaccccacgtgtccacaactgccacgactccgaccgttacgtcttcaaaagcaacccccttctcatcgcccggtacagcaaccgcactgcccgcactaaggagcactgccaccaccccaaccgccaccagttttaccgctattccaagcagctctctggggaccacttggacacggctatcccaaacaaccacaccaacggccactatgtcaaccgctaccccgagctcaaccccagagaccgtgcacacttcgactgtgctgaccacgacagcaacaaccactggcgccactggttcagttgcgacacccagctctacaccagggaccgctcacaccacaaaggttctgacaacgacaacgactggattcaccgctacaccatccagttctccagggacagcaaggaccctgccagtgtggatcagcacaactaccacgccaactactagaggcagtactgttaccccttcgtccataccgggcacaacgcacacaccaacggttctcactaccaccaccacgacggtagcaactggatctatggcgaccccaagctccagcacccaaaccagcggaaccccacctagcctcaccacaacagccacaaccatcactgcaacaggaagtaccaccaacccatccagcacccccgggaccaccccaatccctccagtgctaaccactaccgcgacaacacccgctgcaacgagttcaacggtgacacctagctctgccctcggtactacacacactccaccggtcccaaataccaccgccaccacacacggtcggtcgctgtctccttcgtccccccacaccgttcgcaccgcttggacatcagcaacctcaggcaccctcggaaccacacacatcacagaaccttcaacgggcacctcccacacacctgccgcaaccacaggcaccactcagcactccacacctgcactctcttcgccacacccatcttcacggaccacagaatcccccccctcccctgggaccacaacccccggacataccagggcaacttcacggaccaccgcgactgccactccgagcaagacgcgaaccagtaccttgctcccctcctctccaacatccgctcctatcacaacagtggtaacgatgggctgcgaacctcagtgtgcgtggtctgagtggctagattactcatacccgatgccagggccgagtggaggcgattttgacacttactcaaatattcgcgctgctggcggcgcagtgtgcgagcagcccctcggcttggagtgcagagcccaagctcagcctggggtgccgctgcgagaactaggccaggtggtggaatgcagcttggatttcggcctggtgtgtaggaaccgcgagcaagtcggcaaatttaaaatgtgtttcaactacgagatccgcgtgttttgttgcaattacggccattgtccaagcactcccgctactagctctactgctaccccctcctccactcctggtacaacatggatccttacagaacagaccacggccgccactaccacagcaaccacagggtcaactgccattccatcctctacgccaggtactgcacctcctccaaaagtgcttacatctacagctacaactccaacagcgacatcttctaaggcaacctcaagttctagcccccgaaccgctactacattacccgtgctgacaagcaccgcgaccaagagcacagctacaagctttactcccataccgtctttcacgctcggcactacagggacactgccagaacagactacaacacccatggctacaatgagcacaatacacccaagttccactcccgaaaccacacacacaagcaccgtgctcacaacgaaggccacgaccacgcgcgcgacctcaagcatgtcaacgccctcttccacgcccgggactacatggatcttaactgagctgacaacggccgctacaacgacggctgctacagggccaacagcaacacccagcagcaccccagggacaacctggatattgactgagccctcaactactgcaaccgtgacagtgccaactggaagtaccgccacggcctccagcactcgagcgaccgccgggaccctgaaagtcctgacctcgaccgctaccaccccgaccgtgatttccagcagagctacaccctctagttcccccggtaccgcgacagcgttgccggccctcagaagcactgcaaccacaccaactgctaccagcgtcacagctataccctctagtagccttggtacagcatggacacgcctctcgcaaactactactcccacagcaaccatgtctacggccactccctcctccactccagaaaccgtccatacatcaaccgtcctgacaacaaccactaccactacccgggccacagggtcagtggcaacaccaagctctacccccggaacagcccatactaccaaggtgccgacgaccacaaccaccgggtttactgccactccatcatcgagtcccggaaccgctctgactccaccagtgtggattagcactactacaactccaactacacgcggctcaaccgttacaccgtcaagcattcctggcacaacccatactgccacagtactgactacaaccaccacgaccgtcgcaaccgggagcatggccacacctagctccagcactcaaacctctggaactccaccatctctcaccaccacagcaaccaccatcacagccacagggagcaccactaatcctagctctactccagggaccacgccaattcctccagttctcacgaccactgctactacgcccgcagctacctcttcaaccgtgacgccaagtagcgctctgggaaccactcatacccctcccgtccccaacactacagctacaacacacggcagaagtctcccaccatccagcccacacactgtcagaaccgcctggacgtctgccactagtggaatcctcggcacaacacacatcacggagccctccaccgtcacgtctcatactcctgctgccaccacttcaacaacccagcactctacccctgccctcagttcaccacaccctagtagtcgaactactgagtctcctcccagccccggcacgaccactcctgggcatactaggggcaccagccgcactactgccactgccacaccctcgaagacaaggacatctacactgctcccctcgtcccccacgagtgcacctattactacggtggtgaccaccggctgcgagcctcagtgcgcgtggagtgagtggctcgactatagctaccctatgcccggtccgagcggaggggactttgacacatacagcaatatcagagcggctggaggggcggtttgcgaacagccccttggtttagagtgccgtgcccaagcccaacccggggtgccgcttagggagctcggccaggtggtcgagtgtagcctggattttggactagtctgtaggaatcgcgagcaggtgggtaagttcaagatgtgctttaattacgaaatcagggttttctgctgtaactatggacattgtcccagcaccccggcgacctcaagcaccgcaacgccctcttctaccccgggcaccacatggattctaaccaaattgacaactacagcgactactaccgagtctaccgggtctaccgctaccccatcttccactcccggaactacttggatcctaaccgagccaagcactacagccaccgtgactgttccaactgggtctactgctactgcatctagcacacaggccaccgccgggacaccacacgtctctacgacagccacaaccccaactgtgacaagctccaaagccacaccattctcaagcccaggaactgctactgcgctgccagctttgcgaagtacagccacgactcctactgctacatctttcacggcaattcctagcagttctcttggaaccacctggaccagactgagtcagaccacgactccaacggccacgatgtctactgctacacctagctctaccccagagacagctcacacctccacagtactgaccacaacggctaccacaactcgtgccacagggagcgtcgcaacccccagctctaccccggggactgcacataccacaaaagtgcctactaccacaactaccggttttaccgtaaccccaagttcaagccctggaaccgccagaacaccacccgtgtggatttcaaccaccaccacacctactacctccggtagcactgtgactccctcttcagtgccaggaaccacccacacccccactgtattaactactacaacaacaaccgtggcaacagggagcatggccacaccatctagttcaacacagactagcggtaccccccccagtctgatcactaccgcaactactatcactgctacagggtctaccactaatccttcttcaaccccaggcacgacacctattcctcctgtgctcaccaccaccgccacaacacccgcagcaaccagcagcacagtaacaccaagttcagctctcggaacaactcacaccccgcccgtacctaatactactgcgaccacccacggtaggagcctctcgcctagcagcccacacaccgtgaggaccgcttggacatctgcgacctccggaaccctaggtaccacccacattacagagcccagtactggcacttctcacactcccgcagccaccacaggtaccactcagcattcgactcctgccctgagttcaccccatccctcctctcgcactaccgaaagtccccccagccccggaactaccactccaggtcatacaaccgccaccagtcggactacagccacagccacgcctagcaaaacaagaacgtcaaccctgctgccttcttcccctacgtctgcccctattacaaccgttgtcacgacagggtgcgagcctcaatgtgcatggagtgaatggctggactactcttaccccatgccaggaccatcagggggcgacttcgacacttattctaacatcagggccgccggcggagctgtgtgcgagcagccgctggggctagaatgcagggcccaggcacaacctggcgtacccctcggcgagctggggcaagttgtggaatgttccttggacttcggtctggtttgcagaaacagggaacaggtgggcaagttcaaaatgtgtttcaactacgagatcagggtgttctgctgcaattatgggcactgccccagcacacctgcaacctcaagcactgctatgccctccagcaccccaggaaccacgtggattctgaccgagctgacaacaacagcgacaacaaccgccagtaccgggtccaccgctacacccagcagtacacccggtactgctccacctcccaaagtccttacatctcctgccaccactcccacagcaacttctagcaaggcaaccagttccagcagtcctcggaccgcaactaccctcccagtgctgacttccacagctacgaagagtacggccacctccgtgacacctattccatccagtacccttgggaccaccggcactcttcccgagcagacaacaacccccgttgcaacaatgtcaactatacatccttcctccacacccgagacgacccacacatccacagtgctgacaaccaaggctacaactacccgcgctaccagctctacatctacaccgtcctctacgcccggtactacctggatactgactgaactgacaaccgctgctaccacgaccgctgcaacaggtccaactgccacgccctcttcaaccccaggcactacctggatcctcactgaattaacgactacggcaactacgaccgcatctaccgggagcaccgccactccttctagcactcccggcacaacatggattctcacagaaccatctactaccgctaccgtcactgtgcccacaggttctactgcaactgcctcatcgacacaagcaaccgctggtacaccccatgtatccaccaccgcgaccacgccgactgtgacttccagtaaggcaacgcctagctcttcaccagggaccgcaacagccttgcccgcgttgagatctaccgcgaccacccctactgctacgagcttcaccgctattccatccagtagcctgggtacaacctggacgcgcctgagccagacaacaacccccactgccaccatgagcaccgctactcccagttctacccctgagaccgtacacacttcgaccgtactcaccgcaacagccaccaccacgggggccacgggaagtgtggccaccccttcgtccacccctggtaccgcgcatactaccaaggtacctactacaaccacgactggcttcaccgccacacctagcagttctcccggaactgcgctcacgccccccgtgtggatatccacaacgacaactccaaccactaccacgcctactaccagtggcagcaccgtgactccctctagtatccccggtaccacccataccgcaagggtcttgacaactactacaacgactgtcgctaccgggtctatggcgacaccttcatctagcactcagacttcaggcactccaccttcattaacaacaactgccacaaccataaccgctacgggaagcactaccaacccgtccagcacacccgggactacaccaatcacacccgtccttacctccaccgccactacgcctgctgcaacgtcaagcaaagcgacctcaagctcctctccaagaacagctaccacattacctgtgctgactagcacagcgaccaagagcactgcgaccagtttcactcctataccctcctctacactctggaccacttggactgtcccagcacagaccaccactccaatgtccaccatgtcaaccattcacacatcttccacaccagagacaacacatacctcaactgttctgacaaccaccgccaccatgacaagggcaaccaattcaactgccactccgtcgtccaccctggggaccactaggattctcacagaactgaccacaactgcgaccacaacggcagcgacagggtccaccgccacactttctagtacacccggaactacctggatcttaaccgaaccgtccaccattgctaccgtgatggtgcctacaggcagcacagcaaccgcaagttcgaccctagggacggcccatacccccaaagtggtaactaccatggccaccatgcctacagccaccgctagtacggtcccatcatcctccactgtcggcacaactcgtaccccagctgtgttgcccagcagcctgcctacattctcagtttccactgtatcatctagcgttttaacaacgctgcgccctaccggatttcccagctcgcattttagtactccctgcttctgtagggccttcggccagtttttctctccaggcgaagtgatctacaacaaaaccgatcgagctgggtgccatttctatgcagtgtgcaaccaacattgcgacatcgacaggttccaaggcgcatgtcctaccagtcccccaccagtgtcttcggctcccctctcctccccttcacctgctcccggctgcgacaacgccatacccttaaggcaagtgaatgagacatggaccctagagaactgtacggtggcccgctgtgttggcgacaatagagtggtcctcctggaccctaaacccgttgcgaatgtcacatgtgtgaataagcacctcccaatcaaggtctcagacccctcacagccctgtgactttcattatgagtgtgagtgcatctgctccatgtggggcgggtcccactacagtacatttgatggcacatcatacactttccgtggcaattgtacatacgtcctgatgagagagattcacgcacggttcggaaatctgtcgctgtacctggacaaccactactgcaccgcctcggccaccgcggctgctgcccggtgcccacgggctctgtcgatacactacaagagcatggacatcgtgttgacggtgaccatggtccacggtaaggaggaggggttgatcctgtttgaccagatccccgtaagctcaggatttagcaagaacggagttctggtatctgtgctaggtactactactatgagagtagatataccggcacttggcgtgtcagtaacctttaatggacaagttttccaggctcgtctgccgtattctctgtttcataataatacagaggggcagtgcgggacttgtaccaacaatcagcgggacgactgtctgcagagggatggaactaccgctgcatcatgcaaagatatggccaagacatggctcgtgcctgatagccgtaaagacggttgctgggctccaaccgggacacctcccactgcttctccagctgcccctgttagttcaaccccgacgccaacaccttgcccacctcaacctctatgcgaccttatgctttcacaagtcttcgcagaatgccataatctggtgccccccgggccctttttcaatgcgtgtatcagtgatcattgtcgtggcaggctggaggtcccctgtcaatcactagaggcttacgctgaactgtgccgcgcccggggggtgtgctccgattggcggggggcaacagggggactgtgtgatctcacgtgcccgcccacaaaagtgtacaagccttgtggcccaatccaacccgccacctgcaacagcagaaatcagagcccacagttggagggcatggccgaaggttgtttttgccccgaagatcagattctcttcaatgcccatatgggtatatgcgtgcaagcttgcccctgcgtggggcctgacgggttccctaagttccccggagagcggtgggtatctaattgtcagagttgtgtttgcgacgaaggctccgtgtccgtccagtgtaaaccgctaccttgcgatgctcaaggacagcctcctccttgcaacaggcctgggttcgttacagtcactcgtcctagagcagaaaatccttgttgtccagaaactgtgtgcgtttgtaacactacaacatgtccacagtcgttacccgtatgtcctcctggccaggaatctatctgcacacaggaagagggcgattgctgcccaacctttcggtgccggccacagctgtgtagttacaacgggactttctacggagtcggcgccactttccctggggcactcccttgccacatgtgcacttgtctgagcggggatacacaagaccccaccgtgcaatgtcaggaggacgcctgtaataatactacttgtcctcagggcttcgaatataagcgcgtggctggacagtgttgcggcgagtgcgtgcagactgcctgtctcaccccagatgggcagccagtgcagctgaatgagacatgggttaactcacatgtcgacaattgcacagtgtatttgtgtgaggccgaggggggagtgcatctgttgaccccacagccggctagttgtccagatgtctcatcgtgtagggggtccctcaggaaaacagggtgttgttactcctgcgaggaggattcctgtcaggtgcgaattaatacaacgatcctttggcaccaggggtgtgagacagaggttaatattaccttctgcgaggggtcttgtccgggagcgtcaaaatacagcgctgaggcgcaggcaatgcagcaccagtgtacatgctgtcaagagaggcgagtacacgaagagacagtgcccttgcattgcccaaacggcagcgctattctgcatacatacacgcacgtggacgagtgtggttgtacacccttttgtgtcccagcgccgatggctccacctcatacccgcggcttccccgcccaggaggctaccgccgtgtag

SEQ ID NO: 128575 - DNA, 561 bp, Artificial Sequence
  derived and/or modified sequence
tctagcactcccggcactacttggattttaactgaaccatcgaccaccgctaccgtcacagttccaacaggctcgacggccaccgcctccagtacacaggccaccgcaggaacaccccacgtttctactactgcaaccacccccaccgtgacgtctagcaaagcaacaccctttagcagcccaggaaccgcgaccgccttgcctgcactgaggtccacagccactacacctacagccacttcctttactgccatccccagctcctgggccccccccggacctgcttatcaccgcccaccacaccccaggcctccctgtcctcaaccacacccccccccattgcagcggctgagtacgccacctcaatgtctgcctccaagaccaccccgcggccacaggttatgtggccacccacttctgcatccacggaactcttctcactaccagtcagcagactaccacaatcattttactgctaccccctcaagcagcccgggcaccgctaggacactgcctgtctggatttccacgactaccacccccactacacggggaagctag

SEQ ID NO: 128576 - DNA, 2007 bp, Artificial Sequence
  derived and/or modified sequence
atgcgagaaatccacgcaaggtttgggaatctaagtttgtacttggacaatcactactgcaccgcgagcgccactgcggcagcagcccgttgcccacgggctctgagcattcattataaaagcatggatattgtgctgacagtgactatggtccacggtaaagaagaggggcttattctgtttgaccagatccctgtttccagcgggtttagtaaaaacggagtgctggtctccgtattaggcacaaccactatgcgagttgatatccctgcattgggagttagcgtcaccttcaatggtcaagttttccaggcaagactcccatactctctcttccacaacaacaccgaaggacagtgcgggacctgcaccaataatcagagggatgattgtttacagagagacggcacaaccgctgcaagctgtaaagacatggccaagacttggctggttccggatagtcgcaaggacgggtgctgggcccctacagggactccccctactgcctcccctgctgcaccagtgagttctacccctaccccaacaccgtgccccccgcagccgttatgcgacttgatgctgagtcaggtcttcgcagaatgccacaacctcgtgccccccgggccttttttcaacgcctgcatctccgaccactgccgggggcgtctcgaagtgccttgccagtcattagaagcttatgccgagctttgcagggcccggggcgtctgttcagattggcgaggggccaccggcgggctgtgtgatctgacttgccctcctactaaggtatataaaccttgcgggcctatacagcccgcaacttgtaactcaaggaatcagagtccccagctcgagggtatggcggaaggctgcttctgccctgaggatcagattctcttcaatgctcacatgggcatctgtgtgcaagcctgtccgtgcgtgggacctgatggattccccaagttccccggcgagcggtgggtgtctaattgccaaagctgtgtgtgtgacgagggatctgtgtccgtccagtgcaagccgctgccttgtgacgcccagggtcagcccccaccctgcaaccgacctgggtttgttaccgtcaccagacccagagccgaaaatccctgctgtcccgagaccgtgtgcgtatgcaatactacaacttgcccccaatccctgcctgtgtgtccccccggacaggaatccatttgtacccaagaggagggagactgctgccctacatttcgatgccggccacagctctgttcttataacgggacattctacggcgttggcgcgacgttccccggcgctctgccatgccacatgtgtacctgcctgtcaggtgacacacaggacccaactgttcagtgtcaagaagatgcctgcaacaatactacttgtcctcaaggctttgaatacaaaagagttgctggccagtgctgtggcgagtgtgtgcagaccgcttgccttacccctgacggccagccggtgcagttgaatgaaacctgggtgaactcccatgtggacaactgcaccgtctatctgtgcgaggcggaggggggcgtgcacttgctgactccccagcccgcatcctgcccagacgtgtcgtcatgtcggggctctctacgcaagactggctgctgctatagctgcgaggaggatagttgccaggtgaggatcaatacaactatcctctggcatcagggctgcgaaacagaagtgaatatcactttttgtgaagggtcctgcccaggcgcctccaagtatagtgcggaggcccaggcaatgcaacaccaatgcacatgttgccaggaaagacgggtgcacgaggaaaccgtgcctctgcactgtcccaacggatctgcgattctacacacctatacccatgtcgatgagtgtggctgcacccctttctgcgtgccagcccctatgtccccccctgcttgtgtgtggcaccctgcccttagagcacccgccgctcatcttgggctagcccccccatag

SEQ ID NO: 128577 - DNA, 17121 bp, Artificial Sequence
  derived and/or modified sequence
atgggcgcccccagcgcctgcaggaccctggtgctggccctggccgccatgctggtggtgccccaggccgagacccagggccctgtggagcccagctgggagaatgccggccacaccatggatggaggagcccccaccagcagccccaccaggagagtgtcctttgtgccccctgtgaccgtcttccccagcctgagccccctgaacccagcccacaacggccgggtgtgcagcacctggggagacttccactacaagacctttgatggagatgtgttccgcttccctggcctgtgcaactacgtgttcagcgagcactgcagagctgcctatgaggacttcaacgtgcagctgcggcggggcctggtgggcagcaggcctgtggtgaccagggtggtgatcaaggcccagggcctggtgctggaggccagcaatggatctgtgctgatcaatggccagcgggaggagctgccctacagcaggacaggcctgctggtggagcagagcggggactacatcaaggtgtccatccggctggtgctgaccttcctgtggaatggagaggacagcgccctgctggagctggaccccaagtatgccaaccagacctgtggcctgtgtggggacttcaacggcctgcctgccttcaatgagttctacgcccacaatgcccggctgacccccctgcagtttggaaacctgcagaagctggatggccccacagagcagtgcccagaccccctgcccctgcctgctggcaactgcacagatgaggagggcatctgccacaggaccctgctgggccctgcctttgctgaatgtcatgccctggtggacagcacagcctacctggccgcctgtgcccaggacctgtgccgctgccccacctgcccctgtgccacctttgtggagtacagccggcagtgtgcccacgccggcggccagcccaggaactggcgctgcccagagctgtgccccaggacctgccccctgaacatgcagcaccaggagtgtggcagcccctgcacagacacctgcagcaacccccagagggcccagctgtgtgaggaccactgtgtggatggctgcttctgccccccaggcagcacagtgctggatgacatcacccacagcggctgcctgcccctgggccagtgcccctgcacccacggcggccgcacctacagccctggcaccagcttcaacaccacctgcagcagctgcacctgcagcggcggcctgtggcagtgccaggacctgccctgccccggcacctgcagcgtgcagggcggggcccacatcagcacctatgatgagaagctgtatgacctgcatggagactgcagctatgtgctgagcaagaagtgtgccgacagcagcttcaccgtgctggccgagctgaggaaatgtggcctgacagacaatgaaaactgcctgaaggctgtgaccctgagcctggatggaggagacacagccatccgggtgcaggctgatggcggcgtcttcctgaacagcatctacacccagctgcccctgtctgctgccaacatcaccctcttcacccccagcagcttcttcatcgtggtgcagacaggcctgggcctgcagctgctggtgcagctggtgcccctgatgcaggtgtttgtgcggctggaccctgcccaccagggccagatgtgtggcctgtgtggcaacttcaaccagaaccaggctgatgacttcaccgccctgagcggcgtggtggaggccaccggggccgcctttgccaacacctggaaggcccaggccgcctgtgccaatgccaggaacagctttgaggacccctgcagcctgtctgtggagaatgaaaattatgcccggcactggtgcagccggctgacagaccccaacagcgccttcagccgctgccacagcatcatcaaccccaagcccttccacagcaactgcatgtttgacacctgcaactgtgagaggtctgaggactgcctgtgtgccgccctgagcagctatgtgcacgcctgtgccgccaagggcgtgcagctgagtgactggagagatggagtgtgcaccaagtacatgcagaactgccccaagagccagagatatgcctacgtggtggatgcctgccagcccacctgccggggcctgtctgaggctgatgtgacctgcagcgtgtcctttgtgcctgtggatggctgcacctgcccagctggcaccttcctgaatgatgctggggcctgtgtgcctgcccaggagtgcccctgctacgcccacggcaccgtgctggcccctggagaggtggtgcatgatgagggcgctgtgtgcagctgcaccggcggcaagctgagctgcctgggcgccagcctgcagaagagcacaggctgtgccgcccccatggtgtacctggactgcagcaacagcagcgctggcaccccaggagcagaatgtctgcggagctgccacaccctggatgtgggctgcttcagcacccactgtgtgtctggctgtgtgtgccccccaggcctggtgtctgatggcagcggcggctgcatcgccgaggaggactgcccctgtgtgcacaatgaggccacctacaagccaggagagaccatccgggtggactgcaacacctgcacctgcaggaacagacgctgggagtgcagccaccggctgtgcctgggcacctgtgtggcctatggagatggccacttcatcacctttgatggagaccgctacagctttgagggcagctgtgagtacatcctggcccaggactactgtggggacaacaccacccacggcaccttccgcatcgtgacagagaacatcccctgtggcaccaccggcaccacctgcagcaaggccatcaagctgtttgtggagagctatgagctgatcctgcaggagggcaccttcaaggctgtggcccggggccctggaggagaccccccctacaagatccgctacatgggcatcttcctggtgattgagacccacggcatggctgtgtcctgggacaggaagaccagcgtcttcatccggctgcaccaggactacaagggccgggtgtgtggcctgtgtggcaactttgatgacaatgccatcaatgactttgccaccaggagccgctctgtggtgggagatgccctggagtttggaaacagctggaagctgagccccagctgcccagatgccctggcccccaaggacccctgcacagccaaccccttcaggaagtcctgggcccagaagcagtgcagcatcctgcacggccccacctttgctgcctgccgcagccaggtggacagcaccaagtactatgaggcctgtgtgaatgatgcctgtgcctgtgacagcggcggggactgtgagtgcttctgcacagctgtggccgcctatgcccaggcctgccatgatgctggcctgtgtgtgtcctggaggaccccagacacctgccccctcttctgtgacttctacaacccccacggcggctgtgagtggcactaccagccctgtggggccccctgcctgaagacctgcaggaaccccagcggccactgcctggtggacctgcccggcctggagggctgctaccccaagtgcccccccagccagcccttcttcaatgaagaccagatgaagtgtgtggcccagtgtggctgctatgacaaggatggcaactactatgatgtgggcgcccgggtgcccacagctgagaactgccagagctgcaactgcaccccatctggcatccagtgtgcccacagcctggaggcctgcacctgcacctatgaggacaggacctacagctaccaggatgtgatctacaacaccacagatggcctgggcgcctgcctgattgccatctgtggcagcaatggcaccatcatcaggaaggctgtggcctgccccggcaccccagccaccacccccttcaccttcaccacagcctgggtgccccacagcaccaccagccctgccctgcctgtgtccacagtgtgtgtgcgggaggtgtgccgctggagctcctggtacaacggccacaggcctgagcccggcctgggcggcggggactttgagacctttgagaacctgcggcagaggggctaccaggtgtgccctgtgctggccgacatcgagtgcagagctgcccagctgcctgacatgcccctggaggagctgggccagcaggtggactgtgacaggatgaggggcctgatgtgtgccaacagccagcagagcccccccctgtgccacgactatgagctgcgggtgctgtgctgtgaatatgtgccctgtggccccagccctgcccctggcaccagcccccagcccagcctgagcgccagcacagagcctgctgtgcccacccccacccagaccacagccacagagaagaccaccctgtgggtgacccccagcatccgcagcacagctgccctgaccagccagacaggcagcagcagcggccctgtgacagtgaccccatctgcccctggcaccaccacctgccagccccgctgccagtggacagagtggtttgatgaggactaccccaagtctgagcagctgggcggagatgtggagagctatgacaagatccgggctgctgggggccacctgtgccagcagcccaaggacatcgagtgccaggccgagagcttccccaactggaccctggcccaggtgggccagaaggtgcactgtgatgtgcacttcggcctggtgtgcaggaactgggagcaggagggcgtcttcaagatgtgctacaactaccgcatccgggtgctgtgctgcagtgatgaccactgccggggccgggccaccaccccaccacccaccacagagctggagacagccaccaccaccaccacccaggccctcttcagcaccccccagcccaccagcagccctggcctgacccgggcccccccagccagcaccacagctgtgcccaccctgtctgagggcctgaccagcccccgctacaccagcaccctgggcacagccaccaccggcggccccaccaccccagctggcagcacagagcccaccgtgcctggggtggccaccagcaccctgcccaccaggtctgccctgcccggcaccaccggcagcctgggcacctggaggcccagccagccccccaccctggcccccaccaccatggccaccagccgggcccggcccactggaacagccagcacagccagcaaggagcccctgaccaccagcctggcccccaccctgaccagcgagctgagcaccagccaggccgagaccagcacccccaggacagagaccaccatgagccccctgaccaacaccaccaccagccagggcaccacccgctgccagcccaagtgtgagtggacagagtggtttgatgtggacttccccaccagcggcgtggccggcggggacatggagacctttgagaacatccgggccgccggcggcaagatgtgctgggcccccaagagcattgagtgcagagctgagaactacccagaggtgtccattgaccaggtgggccaggtgctgacctgcagcctggagaccggcctgacctgcaagaatgaagaccagacaggccgcttcaacatgtgcttcaactacaacgtgcgggtgctgtgctgtgatgactacagccactgccccagcaccccagccaccagcagcacagccacccccagcagcaccccaggcaccacctggatcctgaccaagcccaccaccacagccaccaccacagccagcacaggcagcacagccacccccaccagcaccctgaggacagcccccccacccaaggtgctgaccaccacagccaccacccccaccgtgaccagcagcaaggccacccccagcagcagccctggaacagccacagccctgcctgccctgcggagcacagccaccacccccacagccacctctgtgacccccatccccagcagcagcctgggcaccacctggacccggctgagccagaccaccacccccacagccaccatgagcacagccacccccagcagcaccccagagacagcccacaccagcacagtgctgacagccacagccaccaccactggagccaccggctctgtggccacccccagcagcaccccaggcacagcccacaccaccaaggtgcccaccaccaccaccaccggcttcaccgccacccccagcagcagccctggaacagccctgaccccacctgtgtggatcagcaccaccaccacccccaccacccggggcagcacagtgacccccagcagcatccctggcaccacccacacagccaccgtgctgaccaccaccaccaccaccgtggccaccggctccatggccacccccagcagcagcacccagaccagcggcaccccacccagcctgaccaccacagccaccaccatcacagccaccggcagcaccaccaaccccagcagcaccccaggcaccacccccatcccccctgtgctgaccaccacagccaccaccccagctgccaccagcaacacagtgacccccagcagcgccctgggcaccacccacaccccacctgtgcccaacaccatggccaccacccacggccgcagcctgccccccagcagcccccacacagtgaggacagcctggaccagcgccaccagcggcatcctgggcaccacccacatcacagagcccagcacagtgaccagccacaccctggccgccaccaccggcaccacccagcacagcaccccagccctgagcagcccccaccccagcagcaggaccacagagagcccccccagccctggcaccaccaccccaggccacaccacagccaccagcaggaccacagccacagccacccccagcaagaccaggaccagcaccctgctgcccagcagccccaccagcgcccccatcaccaccgtggtgaccatgggctgtgagccccagtgtgcctggagcgagtggctggactacagctaccccatgcctggccccagcggcggggactttgacacctacagcaacatccgggccgccggcggcgctgtgtgtgagcagcccctgggcctggagtgccgggcccaggcccagcccggggtgcccctgcgggagctgggccaggtggtggagtgcagcctggactttggcctggtgtgcaggaaccgggagcaggtgggcaagttcaagatgtgcttcaactatgagatccgggtcttctgctgcaactacggccactgccccagcaccccagccaccagcagcacagccatgcccagcagcaccccaggcaccacctggatcctgacagagctgaccaccacagccaccaccacagagagcacaggcagcacagccacccccagcagcaccccagccacagctggcacccctcatgtgtccaccacagccaccacccccaccgtgaccagcagcaaggccacccccttcagcagccctggaacagccacagccctgcctgccctgcggagcacagccaccacccccacagccaccagcttcaccgccatccccagcagcagcctgggcaccacctggacccggctgagccagaccaccacccccacagccaccatgagcacagccacccccagcagcaccccagagaccgtgcacaccagcacagtgctgaccaccacagccaccaccactggagccaccggctctgtggccacccccagcagcaccccaggcacagcccacaccaccaaggtgctgaccaccaccaccaccggcttcaccgccacccccagcagcagccctggaacagcccggaccctgcctgtgtggatcagcaccaccaccacccccaccacccggggcagcacagtgacccccagcagcatccctggcaccacccacacccccaccgtgctgaccaccaccaccaccaccgtggccaccggctccatggccacccccagcagcagcacccagaccagcggcaccccacccagcctgaccaccacagccaccaccatcacagccaccggcagcaccaccaaccccagcagcaccccaggcaccacccccatcccccctgtgctgaccaccacagccaccaccccagctgccaccagcagcacagtgacccccagcagcgccctgggcaccacccacaccccacctgtgcccaacaccacagccaccacccacggccgcagcctgagccccagcagcccccacacagtgaggacagcctggaccagcgccaccagcggcaccctgggcaccacccacatcacagagcccagcacaggcaccagccacaccccagctgccaccaccggcaccacccagcacagcaccccagccctgagcagcccccaccccagcagcaggaccacagagagcccccccagccctggcaccaccaccccaggccacacccgggccaccagcaggaccacagccacagccacccccagcaagaccaggaccagcaccctgctgcccagcagccccaccagcgcccccatcaccaccgtggtgaccatgggctgtgagccccagtgtgcctggagcgagtggctggactacagctaccccatgcctggccccagcggcggggactttgacacctacagcaacatccgggccgccggcggcgctgtgtgtgagcagcccctgggcctggagtgccgggcccaggcccagcccggggtgcccctgcgggagctgggccaggtggtggagtgcagcctggactttggcctggtgtgcaggaaccgggagcaggtgggcaagttcaagatgtgcttcaactatgagatccgggtcttctgctgcaactacggccactgccccagcaccccagccaccagcagcacagccacccccagcagcaccccaggcaccacctggatcctgacagagcagaccacagctgccaccaccacagccaccaccggcagcacagccatccccagcagcaccccaggcacagcccccccacccaaggtgctgaccagcacagccaccacccccacagccaccagcagcaaggccaccagcagcagcagccccaggacagccaccaccctgcctgtgctgaccagcacagccaccaagagcacagccaccagcttcacccccatccccagcttcaccctgggcaccaccggcaccctgcctgagcagaccaccacccccatggccaccatgagcaccatccaccccagcagcaccccagagaccacccacaccagcacagtgctgaccaccaaggccaccaccacccgggccaccagctccatgagcacccccagcagcaccccaggcaccacctggatcctgacagagctgaccacagctgccaccaccacagctgccaccggccccacagccacccccagcagcaccccaggcaccacctggatcctgacagagcccagcaccacagccaccgtgacagtgcccaccggcagcacagccacagccagcagcacccgggccacagctggcaccctgaaggtgctgaccagcacagccaccacccccaccgtcatcagcagccgggccacccccagcagcagccctggaacagccacagccctgcctgccctgcggagcacagccaccacccccacagccacctctgtgacagccatccccagcagcagcctgggcacagcctggacccggctgagccagaccaccacccccacagccaccatgagcacagccacccccagcagcaccccagagaccgtgcacaccagcacagtgctgaccaccaccaccaccaccacccgggccaccggctctgtggccacccccagcagcaccccaggcacagcccacaccaccaaggtgcccaccaccaccaccaccggcttcaccgccacccccagcagcagccctggaacagccctgaccccacctgtgtggatcagcaccaccaccacccccaccacccggggcagcacagtgacccccagcagcatccctggcaccacccacacagccaccgtgctgaccaccaccaccaccaccgtggccaccggctccatggccacccccagcagcagcacccagaccagcggcaccccacccagcctgaccaccacagccaccaccatcacagccaccggcagcaccaccaaccccagcagcaccccaggcaccacccccatcccccctgtgctgaccaccacagccaccaccccagctgccaccagcagcacagtgacccccagcagcgccctgggcaccacccacaccccacctgtgcccaacaccacagccaccacccacggccgcagcctgccccccagcagcccccacacagtgaggacagcctggaccagcgccaccagcggcatcctgggcaccacccacatcacagagcccagcacagtgaccagccacaccccagctgccaccaccagcaccacccagcacagcaccccagccctgagcagcccccaccccagcagcaggaccacagagagcccccccagccctggcaccaccaccccaggccacacccggggcaccagcaggaccacagccacagccacccccagcaagaccaggaccagcaccctgctgcccagcagccccaccagcgcccccatcaccaccgtggtgaccaccggctgtgagccccagtgtgcctggagcgagtggctggactacagctaccccatgcctggccccagcggcggggactttgacacctacagcaacatccgggccgccggcggcgctgtgtgtgagcagcccctgggcctggagtgccgggcccaggcccagcccggggtgcccctgcgggagctgggccaggtggtggagtgcagcctggactttggcctggtgtgcaggaaccgggagcaggtgggcaagttcaagatgtgcttcaactatgagatccgggtcttctgctgcaactacggccactgccccagcaccccagccaccagcagcacagccacccccagcagcaccccaggcaccacctggatcctgaccaagctgaccaccacagccaccaccacagagagcacaggcagcacagccacccccagcagcacccctggggccacagctggcaccccccacgtgtccaccacagccaccacccccaccgtgaccagcagcaaggccacccccttcagcagccctggaacagccacagccctgcctgccctgcggagcacagccaccacccccacagccaccagcttcaccgccatccccagcagcagcctgggcaccacctggacccggctgagccagaccaccacccccacagccaccatgagcacagccacccccagcagcaccccagagacagcccacaccagcacagtgctgaccaccacagccaccaccacccgggccactggatctgtggccacccccagcagcaccccaggcacagcccacaccaccaaggtgcccaccaccaccaccaccggcttcaccgtgacccccagcagcagccctggaacagcccggaccccacctgtgtggatcagcaccaccaccacccccaccaccagcggcagcacagtgacccccagctctgtgcccggcaccacccacacccccaccgtgctgaccaccaccaccaccaccgtggccaccggctccatggccacccccagcagcagcacccagaccagcggcaccccacccagcctcatcaccacagccaccaccatcacagccaccggcagcaccaccaaccccagcagcaccccaggcaccacccccatcccccctgtgctgaccaccacagccaccaccccagctgccaccagcagcacagtgacccccagcagcgccctgggcaccacccacaccccacctgtgcccaacaccacagccaccacccacggccgcagcctgagccccagcagcccccacacagtgaggacagcctggaccagcgccaccagcggcaccctgggcaccacccacatcacagagcccagcacaggcaccagccacaccccagctgccaccaccggcaccacccagcacagcaccccagccctgagcagcccccaccccagcagcaggaccacagagagcccccccagccctggcaccaccaccccaggccacaccacagccaccagcaggaccacagccacagccacccccagcaagaccaggaccagcaccctgctgcccagcagccccaccagcgcccccatcaccaccgtggtgaccaccggctgtgagccccagtgtgcctggagcgagtggctggactacagctaccccatgcctggccccagcggcggggactttgacacctacagcaacatccgggctgctggaggagctgtgtgtgagcagcccctgggcctggagtgccgggcccaggcccagcccggggtgcccctgggggagctgggccaggtggtggagtgcagcctggactttggcctggtgtgcaggaaccgggagcaggtgggcaagttcaagatgtgcttcaactatgagatccgggtcttctgctgcaactacggccactgccccagcaccccagccaccagcagcacagccatgcccagcagcaccccaggcaccacctggatcctgacagagctgaccaccacagccaccaccacagccagcacaggcagcacagccacccccagcagcaccccaggcacagcccccccacccaaggtgctgaccagccctgccaccacccccacagccaccagcagcaaggccaccagcagcagcagccccaggacagccaccaccctgcctgtgctgaccagcacagccaccaagagcacagccacctctgtgacccccatccccagcagcaccctgggcaccaccggcaccctgcctgagcagaccaccacccctgtggccaccatgagcaccatccaccccagcagcaccccagagaccacccacaccagcacagtgctgaccaccaaggccaccaccacccgggccaccagcagcaccagcacccccagcagcaccccaggcaccacctggatcctgacagagctgaccacagctgccaccaccacagctgccaccggccccacagccacccccagcagcaccccaggcaccacctggatcctgacagagctgaccaccacagccaccaccacagccagcacaggcagcacagccacccccagcagcaccccaggcaccacctggatcctgacagagcccagcaccacagccaccgtgacagtgcccaccggcagcacagccacagccagcagcacccaggccacagctggcaccccccacgtgtccaccacagccaccacccccaccgtgaccagcagcaaggccacccccagcagcagccctggaacagccacagccctgcctgccctgcggagcacagccaccacccccacagccaccagcttcaccgccatccccagcagcagcctgggcaccacctggacccggctgagccagaccaccacccccacagccaccatgagcacagccacccccagcagcaccccagagaccgtgcacaccagcacagtgctgacagccacagccaccaccaccggggccactggatctgtggccacccccagcagcaccccaggcacagcccacaccaccaaggtgcccaccaccaccaccaccggcttcaccgccacccccagcagcagccctggaacagccctgaccccacctgtgtggatcagcaccaccaccacccccaccaccaccacccccaccaccagcggcagcacagtgacccccagcagcatccctggcaccacccacacagcccgggtgctgaccaccaccaccaccaccgtggccaccggctccatggccacccccagcagcagcacccagaccagcggcaccccacccagcctgaccaccacagccaccaccatcacagccaccggcagcaccaccaaccccagcagcaccccaggcaccacccccatcacccctgtgctgaccagcacagccaccaccccagctgccaccagcagcaaggccaccagcagcagcagccccaggacagccaccaccctgcctgtgctgaccagcacagccaccaagagcacagccaccagcttcacccccatccccagcagcaccctgtggaccacctggacagtgcctgcccagaccaccacccccatgagcaccatgagcaccatccacaccagcagcaccccagagaccacccacaccagcacagtgctgaccaccacagccaccatgacccgggccaccaacagcacagccacccccagcagcaccctgggcaccacccgcatcctgacagagctgaccaccacagccaccaccacagctgccaccggcagcacagccaccctgagcagcaccccaggcaccacctggatcctgacagagcccagcaccatcgccaccgtgatggtgcccaccggcagcacagccacagccagcagcaccctgggcacagcccacacccccaaggtggtgaccaccatggccaccatgcccacagccacagccagcacagtgcccagcagcagcacagtgggcaccaccaggaccccagctgtgctgcccagcagcctgcccaccttctctgtgtccacagtgagcagctctgtgctgaccaccctgcggcccaccggcttccccagcagccacttcagcaccccctgcttctgccgggccttcggccagttcttcagccctggagaggtgatctacaacaagacagacagagctggctgccacttctatgctgtgtgcaaccagcactgtgacatcgaccgcttccagggcgcctgccccaccagccccccacctgtgtcctctgcccccctgagcagccccagccctgcccctggctgtgacaatgccatccccctgcggcaggtgaatgagacctggaccctggagaactgcaccgtggcccgctgtgtgggggacaacagagtggtgctgctggaccccaagcctgtggccaacgtgacctgtgtgaacaagcacctgcccatcaaggtgtctgaccccagccagccctgtgacttccactatgaatgtgagtgcatctgcagcatgtggggcggcagccactacagcacctttgatggcaccagctacaccttccggggcaactgcacctacgtgctgatgagggagatccacgccaggtttggaaacctgagcctgtacctggacaaccactactgcacagccagcgccacagctgctgctgcccgctgcccccgggccctgagcatccactacaagtccatggacatcgtgctgactgtgaccatggtgcacggcaaggaggagggcctcatcctgtttgaccagatccctgtgagcagcggcttcagcaagaatggagtgctggtgtctgtgctgggcaccaccaccatgagggtggacatcccagccctgggcgtgtctgtgaccttcaacggccaggtgttccaggcccggctgccctacagcctcttccacaacaacacagagggccagtgtggcacctgcaccaacaaccagagagatgactgcctgcagagagatggcaccacagctgccagctgcaaggacatggccaagacctggctggtgcctgacagcaggaaggatggctgctgggcccccaccggcaccccacccacagccagccctgctgcccctgtgagcagcacccccacccccaccccctgccccccccagcccctgtgtgacctgatgctgagccaggtgtttgctgagtgccacaacctggtgcccccaggccccttcttcaatgcctgcatcagtgaccactgccggggccgcctggaggtgccctgccagagcctggaggcctatgcagagctgtgccgggcccggggcgtgtgcagcgactggaggggggccactggaggcctgtgtgacctgacctgcccccccaccaaggtgtacaagccctgtggccccatccagcctgccacctgcaacagcaggaaccagagcccccagctggagggcatggccgagggctgcttctgcccagaggaccagatcctcttcaatgcccacatgggcatctgtgtgcaggcctgcccctgtgtgggcccagatggcttccccaagtttcctggagagcgctgggtgagcaactgccagagctgtgtgtgtgatgagggctctgtgtctgtgcagtgcaagcccctgccctgtgatgcccagggccagcccccaccctgcaacagacctggctttgtgacagtgacccggcccagggctgagaacccctgctgcccagagaccgtgtgtgtgtgcaacaccaccacctgcccccagagcctgcctgtgtgccccccaggccaggagagcatctgcacccaggaggagggggactgctgccccaccttccgctgccggccccagctgtgcagctacaacggcaccttctacggcgtgggcgccaccttccctggggccctgccctgccacatgtgcacctgcctgagcggggacacccaggaccccaccgtgcagtgccaggaggatgcctgcaacaacaccacctgcccccagggctttgagtacaagagggtggccggccagtgctgcggagaatgtgtgcagacagcctgcctgaccccagatggccagcctgtgcagctgaatgagacctgggtgaacagccacgtggacaactgcaccgtgtacctgtgtgaggccgagggcggcgtgcacctgctgaccccccagcctgccagctgcccagatgtgagcagctgccggggcagcctgaggaagacaggctgctgctacagctgtgaggaggacagctgccaggtgcgcatcaacaccaccatcctgtggcaccagggctgtgaaacagaggtgaacatcaccttctgtgagggcagctgccctggggccagcaagtacagcgctgaggcccaggccatgcagcaccagtgcacctgctgccaggagcggcgggtgcatgaggagaccgtgcccctgcactgccccaatggaagtgccatcctgcacacctacacccacgtggatgaatgtggctgcacccccttctgtgtgcctgcccccatggccccaccccacacccggggcttccctgcccaggaggccacagctgtgtag

SEQ ID NO: 128578 - DNA, 16587 bp, Artificial Sequence
  derived and/or modified sequence
gcccccaggatgggcgcccccagcgcctgcaggaccctggtgctggccctggccgccatgctggtggtgccccaggccggcaagagcccccccctgcggcccctgagcagaaattctggagctggcctggatggaggagcccccaccagcagccccacccggcgggtgtcctttgtgccccctgtgacagtgttccccagcctgagcaggaagcagatgctgcccctgcctgctgggaagggcgtgtttgccagccccaagggcggcggccctgacctgggcgtgcagctgcccccagccctgaacccagcccacaacggccgggtgtgcagcacctggggagacttccactacaagacctttgatggagatgtgttccgcttccctggcctgtgcaactacgtgttttctgagcactgccgggccgcctatgaggacttcaacgtgcagctgcggcggggcctggtgggcagcaggcctgtggtgaccagggtggtgatcaaggcccagggcctggtgctggaggccagcaatggatctgtgctgatcaatggccagcgggaggagctgccctacagcaggacaggcctgctggtggagcagagcggggactacatcaaggtgtccatccggctggtgctgaccttcctgtggaatggagaagattctgccctgctggagctggaccccaagtatgccaaccagacctgtggcctgtgtggggacttcaacggcctgcctgccttcaatgagttctacgcccacaatgcccggctgacccccctgcagtttggaaacctgcagaagctggatggccccacagagcagtgcccagaccccctgcccctgcctgctggcaactgcacagatgaggagggcatctgccacaggaccctgctgggccctgcctttgctgagtgccacgccctggtggacagcacagcctacctggccgcctgtgcccaggacctgtgccgctgccccacctgcccctgtgccacctttgtggagtacagccggcagtgtgcccatgctgggggccagcccaggaactggcgctgcccagagctgtgccccaggacctgccccctgaacatgcagcaccaggagtgtggcagcccctgcacagacacctgcagcaacccccagagggcccagctgtgtgaggaccactgtgtggatggctgcttctgccccccaggccgcagctgcaccgtgctggatgacatcacccacagcggctgcctgcccctgggccagtgcccctgcacccatggaggccgcacctacagccctggcaccagcttcaacaccacctgcagcagctgcacctgcagcggcggcctgtggcagtgccaggacctgccctgccccggcacctgcagcgtgcagggcggggcccacatcagcacctatgatgagaagctgtatgacctgcacggggactgcagctatgtgctgagcaagaagtgtgccgacagcagcttcaccgtgctggccgagctgaggaaatgtggcctgacagacaatgaaaactgcctgaaggctgtgaccctgagcctggatggaggagacacagccatccgggtgcaggctgatggaggagtcttcctgaacagcatctacacccagctgcccctgtctgctgccaacatcaccctcttcacccccagcagcttcttcatcgtggtgcagacaggcctgggcctgcagctgctggtgcagctggtgcccctgatgcaggtgtttgtgcggctggaccctgcccaccagggccagatgtgtggcctgtgtggcaacttcaaccagaaccaggctgatgacttcaccgccctgtctggagtggtggaggccactggagctgcctttgccaacacctggaaggcccaggccgcctgtgccaatgccagaaattcctttgaggacccctgcagcctgtctgtggagaatgaaaattatgcccggcactggtgcagccggctgacagaccccaacagcgccttcagccgctgccacagcatcatcaaccccaagcccttccacagcaactgcatgtttgacacctgcaactgtgagaggtctgaggactgcctgtgtgccgccctgagcagctatgtgcacgcctgtgccgccaagggcgtgcagctgagtgactggagagatggagtgtgcaccaagtacatgcagaactgccccaagagccagagatatgcctacgtggtggatgcctgccagcccacctgccggggcctgtctgaggctgatgtgacctgcagcgtgtcctttgtgcctgtggatggctgcacctgcccagctggcaccttcctgaatgatgctggggcctgtgtgcctgcccaggagtgcccctgctacgcccatggaacagtgctggcccctggagaggtggtgcatgatgaaggagctgtgtgcagctgcacaggaggcaagctgagctgcctgggcgccagcctgcagaagagcacaggctgtgccgcccccatggtgtacctggactgcagcaacagcagcgctggcaccccaggagctgagtgcctgcggagctgccacaccctggatgtgggctgcttcagcacccactgtgtgtctggctgtgtgtgccccccaggcctggtgtctgatggcagcggcggctgcatcgccgaggaggactgcccctgtgtgcacaatgaggccacctacaagccaggagagaccatccgggtggactgcaacacctgcacctgcaggaacagacgctgggagtgcagccaccggctgtgcctgggcacctgtgtggcctatggagatggccacttcatcacctttgatggagaccgctacagctttgagggcagctgtgagtacatcctggcccaggactactgtggggacaacaccacccacggcaccttcagaattgtgacagagaacatcccctgtggcaccaccggcaccacctgcagcaaggccatcaagctgtttgtggaggtgaggacagccccagctgtgtccaccccagaccctgctgccaatgaaccagccccccgggaggcctctgtgggcttccggcagaggctgccccccctgcagagctatgagctgatcctgcaggagggcaccttcaaggctgtggcccggggccctggaggagaccccccctacaagatccgctacatgggcatcttcctggtgattgagacccacggcatggctgtgtcctgggacaggaagacctctgtgttcatccggctgcaccaggactacaagggccgggtgtgtggcctgtgtggcaactttgatgacaatgccatcaatgactttgccaccaggagccgctctgtggtgggagatgccctggagtttggaaacagctggaagctgagccccagctgcccagatgccctggcccccaaggacccctgcacagccaaccccttcaggaagtcctgggcccagaagcagtgcagcatcctgcacggccccacctttgctgcctgccgcagccaggtggacagcaccaagtactatgaggcctgtgtgaatgatgcctgtgcctgtgacagcggcggggactgtgagtgcttctgcacagctgtggccgcctatgcccaggcctgccatgatgctggcctgtgtgtgtcctggaggaccccagacacctgccccctcttctgtgacttctacaacccccatggaggctgtgagtggcactaccagccctgtggggccccctgcctgaagacctgcaggaaccccagcggccactgcctggtggacctgcccggcctggagggctgctaccccaagtgcccccccagccagcccttcttcaatgaagaccagatgaagtgtgtggcccagtgtggctgctatgacaaggatggcaactactatgatgtgggcgcccgggtgcccacagctgagaactgccagagctgcaactgcacccccagcggcatccagtgtgcccacagcctggaggcctgcacctgcacctatgaggacaggacctacagctaccaggacgtcatctacaacaccacagatggcctgggcgcctgcctgattgccatctgtggcagcaatggcaccatcatcaggaaggctgtggcctgccccggcaccccagccaccacccccttcaccttcaccacagcctgggtgccccacagcaccaccagccctgccctgcctgtgtccacagtgtgtgtgcgggaggtgtgccgctggagctcctggtacaacggccacaggcctgagcccggcctgggcggcggggactttgagacctttgagaacctgcggcagaggggctaccaggtgtgccctgtgctggccgacattgaatgtcgggccgcccagctgcctgacatgcccctggaggagctgggccagcaggtggactgtgacaggatgaggggcctgatgtgtgccaacagccagcagagcccccccctgtgccacgactatgagctgcgggtgctgtgctgtgaatatgtgccctgtggccccagccctgcccctggcaccagcccccagcccagcctgagcgccagcacagagcctgctgtgcccacccccacccagaccacagccacagagaagaccaccctgtgggtgacccccagcatccgcagcacagctgccctgaccagccagacaggcagcagcagcggccctgtgacagtgacccccagcgcccctggcaccaccacctgccagccccgctgccagtggacagagtggtttgatgaggactaccccaagtctgagcagctgggcggagatgtggagagctatgacaagatccgggccgccggcggccacctgtgccagcagcccaaggacatcgagtgccaggccgagagcttccccaactggaccctggcccaggtgggccagaaggtgcactgtgatgtgcacttcggcctggtgtgcaggaactgggagcaggagggcgtcttcaagatgtgctacaactaccgcatccgggtgctgtgctgcagtgatgaccactgccggggccgggccaccaccccaccacccaccacagagctggagacagccaccaccaccaccacccaggccctcttcagcaccccccagcccaccagcagccctggcctgacccgggcccccccagccagcaccacagctgtgcccaccctgtctgagggcctgaccagcccccgctacaccagcaccctgggcacagccaccactggaggccccaccaccccagctggcagcacagagcccaccgtgcctggggtggccaccagcaccctgcccaccaggtctgccctgcccggcaccaccggcagcctgggcacctggaggcccagccagccccccaccctggcccccaccaccatggccaccagccgggcccggcccaccggcacagccagcacagccagcaaggagcccctgaccaccagcctggcccccaccctgaccagcgagctgagcaccagccaggccgagaccagcacccccaggacagagaccaccatgagccccctgaccaacaccaccaccagccagggcaccacccgctgccagcccaagtgtgagtggacagagtggtttgatgtggacttccccaccagcggcgtggccggcggggacatggagacctttgagaacatccgggctgctgggggcaagatgtgctgggcccccaagagcattgaatgtagagctgagaactacccagaggtgtccattgaccaggtgggccaggtgctgacctgcagcctggagaccggcctgacctgcaagaatgaagaccagacaggccgcttcaacatgtgcttcaactacaacgtgcgggtgctgtgctgtgatgactacagccactgccccagcaccccagccaccagcagcacagccacccccagcagcaccccaggcaccacctggatcctgaccaagcccaccaccacagccaccaccacagccagcacaggcagcacagccacccccaccagcaccctgaggacagcccccccacccaaggtgctgaccaccacagccaccacccccaccgtgaccagcagcaaggccacccccagcagcagccctggaacagccacagccctgcctgccctgcggagcacagccaccacccccacagccacctctgtgacccccatccccagcagcagcctgggcaccacctggacccggctgagccagaccaccacccccacagccaccatgagcacagccacccccagcagcaccccagagacagcccacaccagcacagtgctgacagccacagccaccaccaccggggccactggatctgtggccacccccagcagcaccccaggcacagcccacaccaccaaggtgcccaccaccaccaccaccggcttcaccgccacccccagcagcagccctggaacagccctgaccccacctgtgtggatcagcaccaccaccacccccaccacccggggcagcacagtgacccccagcagcatccctggcaccacccacacagccaccgtgctgaccaccaccaccaccaccgtggccaccggctccatggccacccccagcagcagcacccagaccagcggcaccacccacaccccacctgtgcccaacaccatggccaccacccacggccgcagcctgccccccagcagcccccacacagtgaggacagcctggaccagcgccaccagcggcatcctgggcaccacccacatcacagagcccagcacagtgaccagccacaccctggccgccaccaccggcaccacccagcacagcaccccagccctgagcagcccccaccccagcagcaggaccacagagagcccccccagccctggcaccaccaccccaggccacaccacagccaccagcaggaccacagccacagccacccccagcaagaccaggaccagcaccctgctgcccagcagccccaccagcgcccccatcaccaccgtggtgaccatgggctgtgagccccagtgtgcctggagcgagtggctggactacagctaccccatgcctggccccagcggcggggactttgacacctacagcaacatccgggccgccggcggcgctgtgtgtgagcagcccctgggcctggagtgccgggcccaggcccagcccggggtgcccctgcgggagctgggccaggtggtggagtgcagcctggactttggcctggtgtgcaggaaccgggagcaggtgggcaagttcaagatgtgcttcaactatgagatccgggtcttctgctgcaactacggccactgccccagcaccccagccaccagcagcacagccatgcccagcagcaccccaggcaccacctggatcctgacagagctgaccaccacagccaccaccacagagagcacaggcagcacagccacccccagcagcaccccaggcaccacctggatcctgacagagcccagcaccacagccaccgtgacagtgcccaccggcagcacagccacagccagcagcacccaggccacagctggcaccccccacgtgtccaccacagccaccacccccaccgtgaccagcagcaaggccacccccttcagcagccctggaacagccacagccctgcctgccctgcggagcacagccaccacccccacagccaccagcttcaccgccatccccagcagcagcctgggcaccacctggacccggctgagccagaccaccacccccacagccaccatgagcacagccacccccagcagcaccccagagaccgtgcacaccagcacagtgctgaccaccacagccaccaccaccggggccactggatctgtggccacccccagcagcaccccaggcacagcccacaccaccaaggtgctgaccaccaccaccaccggcttcaccgccacccccagcagcagccctggaacagcccggaccctgcctgtgtggatcagcaccaccaccacccccaccacccggggcagcacagtgacccccagcagcatccctggcaccacccacacccccaccgtgctgaccaccaccaccaccaccgtggccaccggctccatggccacccccagcagcagcacccagaccagcggcaccacccacaccccacctgtgcccaacaccacagccaccacccacggccgcagcctgagccccagcagcccccacacagtgaggacagcctggaccagcgccaccagcggcaccctgggcaccacccacatcacagagcccagcacaggcaccagccacaccccagctgccaccaccggcaccacccagcacagcaccccagccctgagcagcccccaccccagcagcaggaccacagagagcccccccagccctggcaccaccaccccaggccacacccgggccaccagcaggaccacagccacagccacccccagcaagaccaggaccagcaccctgctgcccagcagccccaccagcgcccccatcaccaccgtggtgaccatgggctgtgagccccagtgtgcctggagcgagtggctggactacagctaccccatgcctggccccagcggcggggactttgacacctacagcaacatccgggccgccggcggcgctgtgtgtgagcagcccctgggcctggagtgccgggcccaggcccagcccggggtgcccctgcgggagctgggccaggtggtggagtgcagcctggactttggcctggtgtgcaggaaccgggagcaggtgggcaagttcaagatgtgcttcaactatgagatccgggtcttctgctgcaactacggccactgccccagcaccccagccaccagcagcacagccacccccagcagcaccccaggcaccacctggatcctgacagagcagaccacagctgccaccaccacagccaccaccggcagcacagccatccccagcagcaccccaggcacagcccccccacccaaggtgctgaccagcacagccaccacccccacagccaccagcagcaaggccaccagcagcagcagccccaggacagccaccaccctgcctgtgctgaccagcacagccaccaagagcacagccaccagcttcacccccatccccagcttcaccctgggcaccaccggcaccctgcctgagcagaccaccacccccatggccaccatgagcaccatccaccccagcagcaccccagagaccacccacaccagcacagtgctgaccaccaaggccaccaccacccgggccaccagctccatgagcacccccagcagcaccccaggcaccacctggatcctgacagagctgaccacagctgccaccaccacagctgccaccggccccacagccacccccagcagcaccccaggcaccacctggatcctgacagagcccagcaccacagccaccgtgacagtgcccaccggcagcacagccacagccagcagcacccgggccacagctggcaccctgaaggtgctgaccagcacagccaccacccccaccgtcatcagcagccgggccacccccagcagcagccctggaacagccacagccctgcctgccctgcggagcacagccaccacccccacagccacctctgtgacagccatccccagcagcagcctgggcacagcctggacccggctgagccagaccaccacccccacagccaccatgagcacagccacccccagcagcaccccagagaccgtgcacaccagcacagtgctgaccaccaccaccaccaccacccgggccaccggctctgtggccacccccagcagcaccccaggcacagcccacaccaccaaggtgcccaccaccaccaccaccggcttcaccgccacccccagcagcagccctggaacagccctgaccccacctgtgtggatcagcaccaccaccacccccaccacccggggcagcacagtgacccccagcagcatccctggcaccacccacacagccaccgtgctgaccaccaccaccaccaccgtggccaccggctccatggccacccccagcagcagcacccagaccagcggcaccacccacaccccacctgtgcccaacaccacagccaccacccacggccgcagcctgccccccagcagcccccacacagtgaggacagcctggaccagcgccaccagcggcatcctgggcaccacccacatcacagagcccagcacagtgaccagccacaccccagctgccaccaccagcaccacccagcacagcaccccagccctgagcagcccccaccccagcagcaggaccacagagagcccccccagccctggcaccaccaccccaggccacacccggggcaccagcaggaccacagccacagccacccccagcaagaccaggaccagcaccctgctgcccagcagccccaccagcgcccccatcaccaccgtggtgaccaccggctgtgagccccagtgtgcctggagcgagtggctggactacagctaccccatgcctggccccagcggcggggactttgacacctacagcaacatccgggctgctggaggagctgtgtgtgagcagcccctgggcctggagtgccgggcccaggcccagcccggggtgcccctgcgggagctgggccaggtggtggagtgcagcctggactttggcctggtgtgcaggaaccgggagcaggtgggcaagttcaagatgtgcttcaactatgagatccgggtcttctgctgcaactacggccactgccccagcaccccagccaccagcagcacagccacccccagcagcaccccaggcaccacctggatcctgaccaagctgaccaccacagccaccaccacagagagcacaggcagcacagccacccccagcagcaccccaggcaccacctggatcctgacagagcccagcaccacagccaccgtgacagtgcccaccggcagcacagccacagccagcagcacccaggccacagctggcacccctcatgtgtccaccacagccaccacccccaccgtgaccagcagcaaggccacccccttcagcagccctggaacagccacagccctgcctgccctgcggagcacagccaccacccccacagccaccagcttcaccgccatccccagcagcagcctgggcaccacctggacccggctgagccagaccaccacccccacagccaccatgagcacagccacccccagcagcaccccagagacagcccacaccagcacagtgctgaccaccacagccaccaccacccgggccaccggctctgtggccacccccagcagcaccccaggcacagcccacaccaccaaggtgcccaccaccaccaccaccggcttcaccgtgacccccagcagcagccctggaacagcccggaccccacctgtgtggatcagcaccaccaccacccccaccaccagcggcagcacagtgacccccagctctgtgcccggcaccacccacacccccaccgtgctgaccaccaccaccaccaccgtggccaccggctccatggccacccccagcagcagcacccagaccagcggcaccacccacaccccacctgtgcccaacaccacagccaccacccacggccgcagcctgagccccagcagcccccacacagtgaggacagcctggaccagcgccaccagcggcaccctgggcaccacccacatcacagagcccagcacaggcaccagccacaccccagctgccaccaccggcaccacccagcacagcaccccagccctgagcagcccccaccccagcagcaggaccacagagagcccccccagccctggcaccaccaccccaggccacaccacagccaccagcaggaccacagccacagccacccccagcaagaccaggaccagcaccctgctgcccagcagccccaccagcgcccccatcaccaccgtggtgaccaccggctgtgagccccagtgtgcctggagcgagtggctggactacagctaccccatgcctggccccagcggcggggactttgacacctacagcaacatccgggctgctggaggagctgtgtgtgagcagcccctgggcctggagtgccgggcccaggcccagcccggggtgcccctgggggagctgggccaggtggtggagtgcagcctggactttggcctggtgtgcaggaaccgggagcaggtgggcaagttcaagatgtgcttcaactatgagatccgggtcttctgctgcaactacggccactgccccagcaccccagccaccagcagcacagccatgcccagcagcaccccaggcaccacctggatcctgacagagctgaccaccacagccaccaccacagccagcacaggcagcacagccacccccagcagcaccccaggcacagcccccccacccaaggtgctgaccagccctgccaccacccccacagccaccagcagcaaggccaccagcagcagcagccccaggacagccaccaccctgcctgtgctgaccagcacagccaccaagagcacagccacctctgtgacccccatccccagcagcaccctgggcaccaccggcaccctgcctgagcagaccaccacccctgtggccaccatgagcaccatccaccccagcagcaccccagagaccacccacaccagcacagtgctgaccaccaaggccaccaccacccgggccaccagcagcaccagcacccccagcagcaccccaggcaccacctggatcctgacagagctgaccacagctgccaccaccacagctgccaccggccccacagccacccccagcagcaccccaggcaccacctggatcctgacagagctgaccaccacagccaccaccacagccagcacaggcagcacagccacccccagcagcaccccaggcaccacctggatcctgacagagcccagcaccacagccaccgtgacagtgcccaccggcagcacagccacagccagcagcacccaggccacagctggcaccccccacgtgtccaccacagccaccacccccaccgtgaccagcagcaaggccacccccagcagcagccctggaacagccacagccctgcctgccctgcggagcacagccaccacccccacagccaccagcttcaccgccatccccagcagcagcctgggcaccacctggacccggctgagccagaccaccacccccacagccaccatgagcacagccacccccagcagcaccccagagaccgtgcacaccagcacagtgctgacagccacagccaccaccaccggggccactggatctgtggccacccccagcagcaccccaggcacagcccacaccaccaaggtgcccaccaccaccaccaccggcttcaccgccacccccagcagcagccctggaacagccctgaccccacccaccaccacccccatgagcaccatgagcaccatccacaccagcagcaccccagagaccacccacaccagcacagtgctgaccaccacagccaccatgacccgggccaccaacagcacagccacccccagcagcaccctgggcaccacccgcatcctgacagagctgaccaccacagccaccaccacagctgccaccggcagcacagccaccctgagcagcaccccaggcaccacctggatcctgacagagcccagcaccatcgccaccgtgatggtgcccaccggcagcacagccacagccagcagcaccctgggcacagcccacacccccaaggtggtgaccaccatggccaccatgcccacagccacagccagcacagtgcccagcagcagcacagtgggcaccaccaggaccccagctgtgctgcccagcagcctgcccaccttctctgtgtccacagtgagcagctctgtgctgaccaccctgcggcccaccggcttccccagcagccacttcagcaccccctgcttctgccgggccttcggccagttcttcagccctggagaggtgatctacaacaagacagaccgggccggctgccacttctatgctgtgtgcaaccagcactgtgacatcgaccgcttccagggcgcctgccccaccagccccccacctgtgagcagcgcccccctgagcagccccagccctgcccctggctgtgacaatgccatccccctgcggcaggtgaatgagacctggaccctggagaactgcaccgtggcccgctgtgtgggggacaacagagtggtgctgctggaccccaagcctgtggccaacgtgacctgtgtgaacaagcacctgcccatcaaggtgtctgaccccagccagccctgtgacttccactatgaatgtgaatgtgaatgtgtgggcggccggggcatcacccctggggccggcatctgcagcatgtggggcggcagccactacagcacctttgatggcaccagctacaccttccggggcaactgcacctacgtgctgatgagggagatccacgccaggtttggaaacctgagcctgtacctggacaaccactactgcacagccagcgccacagctgctgctgcccgctgcccccgggccctgagcatccactacaagtccatggacatcgtgctgactgtgaccatggtgcacggcaaggaggagggcctcatcctgtttgaccagatccctgtgagcagcggcttcagcaagaatggagtgctggtgtctgtgctgggcaccaccaccatgagggtggacatcccagccctgggcgtgtctgtgaccttcaacggccaggtgttccaggcccggctgccctacagcctcttccacaacaacacagagggccagtgtggcacctgcaccaacaaccagagagatgactgcctgcagagagatggcaccacagctgccagctgcaaggacatggccaagacctggctggtgcctgacagcaggaaggatggctgctgggcccccaccggcaccccacccacagccagccctgctgcccctgtgagcagcacccccacccccaccccctgccccccccagcccctgtgtgacctgatgctgagccaggtgtttgctgagtgccacaacctggtgcccccaggccccttcttcaatgcctgcatcagtgaccactgccggggccgcctggaggtgccctgccagagcctggaggcctatgcagagctgtgccgggcccggggcgtgtgcagcgactggaggggggccactggaggcctgtgtgacctgacctgcccccccaccaaggtgtacaagccctgtggccccatccagcctgccacctgcaacagcaggaaccagagcccccagctggagggcatggccgagggctgcttctgcccagaggaccagatcctcttcaatgcccacatgggcatctgtgtgcaggcctgcccctgtgtgggcccagatggcttccccaagtttcctggagagcgctgggtgagcaactgccagagctgtgtgtgtgatgagggctctgtgtctgtgcagtgcaagcccctgccctgtgatgcccagggccagcccccaccctgcaacagacctggctttgtgacagtgacccggcccagggctgagaacccctgctgcccagagaccgtgtgtgtgtgcaacaccaccacctgcccccagagcctgcctgtgtgccccccaggccaggagagcatctgcacccaggaggagggggactgctgccccaccttccgctgccggccccagctgtgcagctacaacggcaccttctacggcgtgggcgccaccttccctggggccctgccctgccacatgtgcacctgcctgagcggggacacccaggaccccaccgtgcagtgccaggaggatgcctgcaacaacaccacctgcccccagggctttgagtacaagagggtggccggccagtgctgcggagaatgtgtgcagacagcctgcctgaccccagatggccagcctgtgcagctgaatgagacctgggtgaacagccacgtggacaactgcaccgtgtacctgtgtgaggccgagggcggcgtgcacctgctgaccccccagcctgccagctgcccagatgtgagcagctgccggggcagcctgaggaagacaggctgctgctacagctgtgaggaggacagctgccaggtgcgcatcaacaccaccatcctgtggcaccagggctgtgaaacagaggtgaacatcaccttctgtgagggcagctgccctggggccagcaagtacagcgctgaggcccaggccatgcagcaccagtgcacctgctgccaggagcggcgggtgcatgaggagaccgtgcccctgcactgccccaatggaagtgccatcctgcacacctacacccatgctgtgcaggtgctgtgtggcctgctggcctggggcctgcaggccggcggccacatcagaggagctgtgcaggacccccagcagcccctgaaggaccaggaggccagcggcaaggcccggcagggcggcggctaccggcagacagtggcctggggagacaagagcaatgcccgggcctggctgcagaagcctgtggtgtgggtgcagagcggggccttccccaccccaggccctgccagcgccctgtgcccctggtag

SEQ ID NO: 128579 - DNA, 17298 bp, Artificial Sequence
  derived and/or modified sequence
atgggcgcccccagcgcctgcaggaccctggtgctggccctggccgccatgctggtggtgccccaggccgagacccagggccctgtggagcccagctgggagaatgccggccacaccatggatggaggagcccccaccagcagccccaccaggagagtgtcctttgtgccccctgtgaccgtcttccccagcctgagccccctgaacccagcccacaacggccgggtgtgcagcacctggggagacttccactacaagacctttgatggagatgtgttccgcttccctggcctgtgcaactacgtgttcagcgagcactgcagagctgcctatgaggacttcaacgtgcagctgcggcggggcctggtgggcagcaggcctgtggtgaccagggtggtgatcaaggcccagggcctggtgctggaggccagcaatggatctgtgctgatcaatggccagcgggaggagctgccctacagcaggacaggcctgctggtggagcagagcggggactacatcaaggtgtccatccggctggtgctgaccttcctgtggaatggagaggacagcgccctgctggagctggaccccaagtatgccaaccagacctgtggcctgtgtggggacttcaacggcctgcctgccttcaatgagttctacgcccacaatgcccggctgacccccctgcagtttggaaacctgcagaagctggatggccccacagagcagtgcccagaccccctgcccctgcctgctggcaactgcacagatgaggagggcatctgccacaggaccctgctgggccctgcctttgctgaatgtcatgccctggtggacagcacagcctacctggccgcctgtgcccaggacctgtgccgctgccccacctgcccctgtgccacctttgtggagtacagccggcagtgtgcccacgccggcggccagcccaggaactggcgctgcccagagctgtgccccaggacctgccccctgaacatgcagcaccaggagtgtggcagcccctgcacagacacctgcagcaacccccagagggcccagctgtgtgaggaccactgtgtggatggctgcttctgccccccaggccgcagctgcaccgtgctggatgacatcacccacagcggctgcctgcccctgggccagtgcccctgcacccacggcggccgcacctacagccctggcaccagcttcaacaccacctgcagcagctgcacctgcagcggcggcctgtggcagtgccaggacctgccctgccccggcacctgcagcgtgcagggcggggcccacatcagcacctatgatgagaagctgtatgacctgcatggagactgcagctatgtgctgagcaagaagtgtgccgacagcagcttcaccgtgctggccgagctgaggaaatgtggcctgacagacaatgaaaactgcctgaaggctgtgaccctgagcctggatggaggagacacagccatccgggtgcaggctgatggcggcgtcttcctgaacagcatctacacccagctgcccctgtctgctgccaacatcaccctcttcacccccagcagcttcttcatcgtggtgcagacaggcctgggcctgcagctgctggtgcagctggtgcccctgatgcaggtgtttgtgcggctggaccctgcccaccagggccagatgtgtggcctgtgtggcaacttcaaccagaaccaggctgatgacttcaccgccctgagcggcgtggtggaggccaccggggccgcctttgccaacacctggaaggcccaggccgcctgtgccaatgccaggaacagctttgaggacccctgcagcctgtctgtggagaatgaaaattatgcccggcactggtgcagccggctgacagaccccaacagcgccttcagccgctgccacagcatcatcaaccccaagcccttccacagcaactgcatgtttgacacctgcaactgtgagaggtctgaggactgcctgtgtgccgccctgagcagctatgtgcacgcctgtgccgccaagggcgtgcagctgagtgactggagagatggagtgtgcaccaagtacatgcagaactgccccaagagccagagatatgcctacgtggtggatgcctgccagcccacctgccggggcctgtctgaggctgatgtgacctgcagcgtgtcctttgtgcctgtggatggctgcacctgcccagctggcaccttcctgaatgatgctggggcctgtgtgcctgcccaggagtgcccctgctacgcccacggcaccgtgctggcccctggagaggtggtgcatgatgagggcgctgtgtgcagctgcaccggcggcaagctgagctgcctgggcgccagcctgcagaagagcacaggctgtgccgcccccatggtgtacctggactgcagcaacagcagcgctggcaccccaggagcagaatgtctgcggagctgccacaccctggatgtgggctgcttcagcacccactgtgtgtctggctgtgtgtgccccccaggcctggtgtctgatggcagcggcggctgcatcgccgaggaggactgcccctgtgtgcacaatgaggccacctacaagccaggagagaccatccgggtggactgcaacacctgcacctgcaggaacagacgctgggagtgcagccaccggctgtgcctgggcacctgtgtggcctatggagatggccacttcatcacctttgatggagaccgctacagctttgagggcagctgtgagtacatcctggcccaggactactgtggggacaacaccacccacggcaccttccgcatcgtgacagagaacatcccctgtggcaccaccggcaccacctgcagcaaggccatcaagctgtttgtggagagctatgagctgatcctgcaggagggcaccttcaaggctgtggcccggggccctggaggagaccccccctacaagatccgctacatgggcatcttcctggtgattgagacccacggcatggctgtgtcctgggacaggaagaccagcgtcttcatccggctgcaccaggactacaagggccgggtgtgtggcctgtgtggcaactttgatgacaatgccatcaatgactttgccaccaggagccgctctgtggtgggagatgccctggagtttggaaacagctggaagctgagccccagctgcccagatgccctggcccccaaggacccctgcacagccaaccccttcaggaagtcctgggcccagaagcagtgcagcatcctgcacggccccacctttgctgcctgccgcagccaggtggacagcaccaagtactatgaggcctgtgtgaatgatgcctgtgcctgtgacagcggcggggactgtgagtgcttctgcacagctgtggccgcctatgcccaggcctgccatgatgctggcctgtgtgtgtcctggaggaccccagacacctgccccctcttctgtgacttctacaacccccacggcggctgtgagtggcactaccagccctgtggggccccctgcctgaagacctgcaggaaccccagcggccactgcctggtggacctgcccggcctggagggctgctaccccaagtgcccccccagccagcccttcttcaatgaagaccagatgaagtgtgtggcccagtgtggctgctatgacaaggatggcaactactatgatgtgggcgcccgggtgcccacagctgagaactgccagagctgcaactgcaccccatctggcatccagtgtgcccacagcctggaggcctgcacctgcacctatgaggacaggacctacagctaccaggatgtgatctacaacaccacagatggcctgggcgcctgcctgattgccatctgtggcagcaatggcaccatcatcaggaaggctgtggcctgccccggcaccccagccaccacccccttcaccttcaccacagcctgggtgccccacagcaccaccagccctgccctgcctgtgtccacagtgtgtgtgcgggaggtgtgccgctggagctcctggtacaacggccacaggcctgagcccggcctgggcggcggggactttgagacctttgagaacctgcggcagaggggctaccaggtgtgccctgtgctggccgacatcgagtgcagagctgcccagctgcctgacatgcccctggaggagctgggccagcaggtggactgtgacaggatgaggggcctgatgtgtgccaacagccagcagagcccccccctgtgccacgactatgagctgcgggtgctgtgctgtgaatatgtgccctgtggccccagccctgcccctggcaccagcccccagcccagcctgagcgccagcacagagcctgctgtgcccacccccacccagaccacagccacagagaagaccaccctgtgggtgacccccagcatccgcagcacagctgccctgaccagccagacaggcagcagcagcggccctgtgacagtgaccccatctgcccctggcaccaccacctgccagccccgctgccagtggacagagtggtttgatgaggactaccccaagtctgagcagctgggcggagatgtggagagctatgacaagatccgggctgctgggggccacctgtgccagcagcccaaggacatcgagtgccaggccgagagcttccccaactggaccctggcccaggtgggccagaaggtgcactgtgatgtgcacttcggcctggtgtgcaggaactgggagcaggagggcgtcttcaagatgtgctacaactaccgcatccgggtgctgtgctgcagtgatgaccactgccggggccgggccaccaccccaccacccaccacagagctggagacagccaccaccaccaccacccaggccctcttcagcaccccccagcccaccagcagccctggcctgacccgggcccccccagccagcaccacagctgtgcccaccctgtctgagggcctgaccagcccccgctacaccagcaccctgggcacagccaccaccggcggccccaccaccccagctggcagcacagagcccaccgtgcctggggtggccaccagcaccctgcccaccaggtctgccctgcccggcaccaccggcagcctgggcacctggaggcccagccagccccccaccctggcccccaccaccatggccaccagccgggcccggcccactggaacagccagcacagccagcaaggagcccctgaccaccagcctggcccccaccctgaccagcgagctgagcaccagccaggccgagaccagcacccccaggacagagaccaccatgagccccctgaccaacaccaccaccagccagggcaccacccgctgccagcccaagtgtgagtggacagagtggtttgatgtggacttccccaccagcggcgtggccggcggggacatggagacctttgagaacatccgggccgccggcggcaagatgtgctgggcccccaagagcattgagtgcagagctgagaactacccagaggtgtccattgaccaggtgggccaggtgctgacctgcagcctggagaccggcctgacctgcaagaatgaagaccagacaggccgcttcaacatgtgcttcaactacaacgtgcgggtgctgtgctgtgatgactacagccactgccccagcaccccagccaccagcagcacagccacccccagcagcaccccaggcaccacctggatcctgaccaagcccaccaccacagccaccaccacagccagcacaggcagcacagccacccccaccagcaccctgaggacagcccccccacccaaggtgctgaccaccacagccaccacccccaccgtgaccagcagcaaggccacccccagcagcagccctggaacagccacagccctgcctgccctgcggagcacagccaccacccccacagccacctctgtgacccccatccccagcagcagcctgggcaccacctggacccggctgagccagaccaccacccccacagccaccatgagcacagccacccccagcagcaccccagagacagcccacaccagcacagtgctgacagccacagccaccaccactggagccaccggctctgtggccacccccagcagcaccccaggcacagcccacaccaccaaggtgcccaccaccaccaccaccggcttcaccgccacccccagcagcagccctggaacagccctgaccccacctgtgtggatcagcaccaccaccacccccaccacccggggcagcacagtgacccccagcagcatccctggcaccacccacacagccaccgtgctgaccaccaccaccaccaccgtggccaccggctccatggccacccccagcagcagcacccagaccagcggcaccccacccagcctgaccaccacagccaccaccatcacagccaccggcagcaccaccaaccccagcagcaccccaggcaccacccccatcccccctgtgctgaccaccacagccaccaccccagctgccaccagcaacacagtgacccccagcagcgccctgggcaccacccacaccccacctgtgcccaacaccatggccaccacccacggccgcagcctgccccccagcagcccccacacagtgaggacagcctggaccagcgccaccagcggcatcctgggcaccacccacatcacagagcccagcacagtgaccagccacaccctggccgccaccaccggcaccacccagcacagcaccccagccctgagcagcccccaccccagcagcaggaccacagagagcccccccagccctggcaccaccaccccaggccacaccacagccaccagcaggaccacagccacagccacccccagcaagaccaggaccagcaccctgctgcccagcagccccaccagcgcccccatcaccaccgtggtgaccatgggctgtgagccccagtgtgcctggagcgagtggctggactacagctaccccatgcctggccccagcggcggggactttgacacctacagcaacatccgggccgccggcggcgctgtgtgtgagcagcccctgggcctggagtgccgggcccaggcccagcccggggtgcccctgcgggagctgggccaggtggtggagtgcagcctggactttggcctggtgtgcaggaaccgggagcaggtgggcaagttcaagatgtgcttcaactatgagatccgggtcttctgctgcaactacggccactgccccagcaccccagccaccagcagcacagccatgcccagcagcaccccaggcaccacctggatcctgacagagctgaccaccacagccaccaccacagagagcacaggcagcacagccacccccagcagcaccccaggcaccacctggatcctgacagagcccagcaccacagccaccgtgacagtgcccaccggcagcacagccacagccagcagcacccaggccacagctggcaccccccacgtgtccaccacagccaccacccccaccgtgaccagcagcaaggccacccccttcagcagccctggaacagccacagccctgcctgccctgcggagcacagccaccacccccacagccaccagcttcaccgccatccccagcagcagcctgggcaccacctggacccggctgagccagaccaccacccccacagccaccatgagcacagccacccccagcagcaccccagagaccgtgcacaccagcacagtgctgaccaccacagccaccaccaccggggccactggatctgtggccacccccagcagcaccccaggcacagcccacaccaccaaggtgctgaccaccaccaccaccggcttcaccgccacccccagcagcagccctggaacagcccggaccctgcctgtgtggatcagcaccaccaccacccccaccacccggggcagcacagtgacccccagcagcatccctggcaccacccacacccccaccgtgctgaccaccaccaccaccaccgtggccaccggctccatggccacccccagcagcagcacccagaccagcggcaccccacccagcctgaccaccacagccaccaccatcacagccaccggcagcaccaccaaccccagcagcaccccaggcaccacccccatcccccctgtgctgaccaccacagccaccaccccagctgccaccagcagcacagtgacccccagcagcgccctgggcaccacccacaccccacctgtgcccaacaccacagccaccacccacggccgcagcctgagccccagcagcccccacacagtgaggacagcctggaccagcgccaccagcggcaccctgggcaccacccacatcacagagcccagcacaggcaccagccacaccccagctgccaccaccggcaccacccagcacagcaccccagccctgagcagcccccaccccagcagcaggaccacagagagcccccccagccctggcaccaccaccccaggccacacccgggccaccagcaggaccacagccacagccacccccagcaagaccaggaccagcaccctgctgcccagcagccccaccagcgcccccatcaccaccgtggtgaccatgggctgtgagccccagtgtgcctggagcgagtggctggactacagctaccccatgcctggccccagcggcggggactttgacacctacagcaacatccgggctgctggaggagctgtgtgtgagcagcccctgggcctggagtgccgggcccaggcccagcccggggtgcccctgcgggagctgggccaggtggtggagtgcagcctggactttggcctggtgtgcaggaaccgggagcaggtgggcaagttcaagatgtgcttcaactatgagatccgggtcttctgctgcaactacggccactgccccagcaccccagccaccagcagcacagccacccccagcagcaccccaggcaccacctggatcctgacagagcagaccacagctgccaccaccacagccaccaccggcagcacagccatccccagcagcaccccaggcacagcccccccacccaaggtgctgaccagcacagccaccacccccacagccaccagcagcaaggccaccagcagcagcagccccaggacagccaccaccctgcctgtgctgaccagcacagccaccaagagcacagccaccagcttcacccccatccccagcttcaccctgggcaccaccggcaccctgcctgagcagaccaccacccccatggccaccatgagcaccatccaccccagcagcaccccagagaccacccacaccagcacagtgctgaccaccaaggccaccaccacccgggccaccagctccatgagcacccccagcagcaccccaggcaccacctggatcctgacagagctgaccacagctgccaccaccacagctgccaccggccccacagccacccccagcagcaccccaggcaccacctggatcctgacagagcccagcaccacagccaccgtgacagtgcccaccggcagcacagccacagccagcagcacccgggccacagctggcaccctgaaggtgctgaccagcacagccaccacccccaccgtcatcagcagccgggccacccccagcagcagccctggaacagccacagccctgcctgccctgcggagcacagccaccacccccacagccacctctgtgacagccatccccagcagcagcctgggcacagcctggacccggctgagccagaccaccacccccacagccaccatgagcacagccacccccagcagcaccccagagaccgtgcacaccagcacagtgctgaccaccaccaccaccaccacccgggccactggatctgtggccacccccagcagcaccccaggcacagcccacaccaccaaggtgcccaccaccaccaccaccggcttcaccgccacccccagcagcagccctggaacagccctgaccccacctgtgtggatcagcaccaccaccacccccaccacccggggcagcacagtgacccccagcagcatccctggcaccacccacacagccaccgtgctgaccaccaccaccaccaccgtggccaccggctccatggccacccccagcagcagcacccagaccagcggcaccccacccagcctgaccaccacagccaccaccatcacagccaccggcagcaccaccaaccccagcagcaccccaggcaccacccccatcccccctgtgctgaccaccacagccaccaccccagctgccaccagcagcacagtgacccccagcagcgccctgggcaccacccacaccccacctgtgcccaacaccacagccaccacccacggccgcagcctgccccccagcagcccccacacagtgaggacagcctggaccagcgccaccagcggcatcctgggcaccacccacatcacagagcccagcacagtgaccagccacaccccagctgccaccaccagcaccacccagcacagcaccccagccctgagcagcccccaccccagcagcaggaccacagagagcccccccagccctggcaccaccaccccaggccacacccggggcaccagcaggaccacagccacagccacccccagcaagaccaggaccagcaccctgctgcccagcagccccaccagcgcccccatcaccaccgtggtgaccaccggctgtgagccccagtgtgcctggagcgagtggctggactacagctaccccatgcctggccccagcggcggggactttgacacctacagcaacatccgggctgctggaggagctgtgtgtgagcagcccctgggcctggagtgccgggcccaggcccagcccggggtgcccctgcgggagctgggccaggtggtggagtgcagcctggactttggcctggtgtgcaggaaccgggagcaggtgggcaagttcaagatgtgcttcaactatgagatccgggtcttctgctgcaactacggccactgccccagcaccccagccaccagcagcacagccacccccagcagcaccccaggcaccacctggatcctgaccaagctgaccaccacagccaccaccacagagagcacaggcagcacagccacccccagcagcaccccaggcaccacctggatcctgacagagcccagcaccacagccaccgtgacagtgcccaccggcagcacagccacagccagcagcacccaggccacagctggcacccctcatgtgtccaccacagccaccacccccaccgtgaccagcagcaaggccacccccttcagcagccctggaacagccacagccctgcctgccctgcggagcacagccaccacccccacagccaccagcttcaccgccatccccagcagcagcctgggcaccacctggacccggctgagccagaccaccacccccacagccaccatgagcacagccacccccagcagcaccccagagacagcccacaccagcacagtgctgaccaccacagccaccaccacccgggccaccggctctgtggccacccccagcagcaccccaggcacagcccacaccaccaaggtgcccaccaccaccaccaccggcttcaccgtgacccccagcagcagccctggaacagcccggaccccacctgtgtggatcagcaccaccaccacccccaccaccagcggcagcacagtgacccccagctctgtgcccggcaccacccacacccccaccgtgctgaccaccaccaccaccaccgtggccaccggctccatggccacccccagcagcagcacccagaccagcggcaccccacccagcctcatcaccacagccaccaccatcacagccaccggcagcaccaccaaccccagcagcaccccaggcaccacccccatcccccctgtgctgaccaccacagccaccaccccagctgccaccagcagcacagtgacccccagcagcgccctgggcaccacccacaccccacctgtgcccaacaccacagccaccacccacggccgcagcctgagccccagcagcccccacacagtgaggacagcctggaccagcgccaccagcggcaccctgggcaccacccacatcacagagcccagcacaggcaccagccacaccccagctgccaccaccggcaccacccagcacagcaccccagccctgagcagcccccaccccagcagcaggaccacagagagcccccccagccctggcaccaccaccccaggccacaccacagccaccagcaggaccacagccacagccacccccagcaagaccaggaccagcaccctgctgcccagcagccccaccagcgcccccatcaccaccgtggtgaccaccggctgtgagccccagtgtgcctggagcgagtggctggactacagctaccccatgcctggccccagcggcggggactttgacacctacagcaacatccgggccgccggcggcgctgtgtgtgagcagcccctgggcctggagtgccgggcccaggcccagcccggggtgcccctgggggagctgggccaggtggtggagtgcagcctggactttggcctggtgtgcaggaaccgggagcaggtgggcaagttcaagatgtgcttcaactatgagatccgggtcttctgctgcaactacggccactgccccagcaccccagccaccagcagcacagccatgcccagcagcaccccaggcaccacctggatcctgacagagctgaccaccacagccaccaccacagccagcacaggcagcacagccacccccagcagcaccccaggcacagcccccccacccaaggtgctgaccagccctgccaccacccccacagccaccagcagcaaggccaccagcagcagcagccccaggacagccaccaccctgcctgtgctgaccagcacagccaccaagagcacagccacctctgtgacccccatccccagcagcaccctgggcaccaccggcaccctgcctgagcagaccaccacccctgtggccaccatgagcaccatccaccccagcagcaccccagagaccacccacaccagcacagtgctgaccaccaaggccaccaccacccgggccaccagcagcaccagcacccccagcagcaccccaggcaccacctggatcctgacagagctgaccacagctgccaccaccacagctgccaccggccccacagccacccccagcagcaccccaggcaccacctggatcctgacagagctgaccaccacagccaccaccacagccagcacaggcagcacagccacccccagcagcaccccaggcaccacctggatcctgacagagcccagcaccacagccaccgtgacagtgcccaccggcagcacagccacagccagcagcacccaggccacagctggcacccctcatgtgtccaccacagccaccacccccaccgtgaccagcagcaaggccacccccagcagcagccctggaacagccacagccctgcctgccctgcggagcacagccaccacccccacagccaccagcttcaccgccatccccagcagcagcctgggcaccacctggacccggctgagccagaccaccacccccacagccaccatgagcacagccacccccagcagcaccccagagaccgtgcacaccagcacagtgctgacagccacagccaccaccactggagccaccggctctgtggccacccccagcagcaccccaggcacagcccacaccaccaaggtgcccaccaccaccaccaccggcttcaccgccacccccagcagcagccctggaacagccctgaccccacctgtgtggatcagcaccaccaccacccccaccaccaccacccccaccaccagcggcagcacagtgacccccagcagcatccctggcaccacccacacagcccgggtgctgaccaccaccaccaccaccgtggccaccggctccatggccacccccagcagcagcacccagaccagcggcaccccacccagcctgaccaccacagccaccaccatcacagccaccggcagcaccaccaaccccagcagcaccccaggcaccacccccatcacccctgtgctgaccagcacagccaccaccccagctgccaccagcagcaaggccaccagcagcagcagccccaggacagccaccaccctgcctgtgctgaccagcacagccaccaagagcacagccaccagcttcacccccatccccagcagcaccctgtggaccacctggacagtgcctgcccagaccaccacccccatgagcaccatgagcaccatccacaccagcagcaccccagagaccacccacaccagcacagtgctgaccaccacagccaccatgacccgggccaccaacagcacagccacccccagcagcaccctgggcaccacccgcatcctgacagagctgaccaccacagccaccaccacagctgccaccggcagcacagccaccctgagcagcaccccaggcaccacctggatcctgacagagcccagcaccatcgccaccgtgatggtgcccaccggcagcacagccacagccagcagcaccctgggcacagcccacacccccaaggtggtgaccaccatggccaccatgcccacagccacagccagcacagtgcccagcagcagcacagtgggcaccaccaggaccccagctgtgctgcccagcagcctgcccaccttctctgtgtccacagtgagcagctctgtgctgaccaccctgcggcccaccggcttccccagcagccacttcagcaccccctgcttctgccgggccttcggccagttcttcagccctggagaggtgatctacaacaagacagaccgggccggctgccacttctatgctgtgtgcaaccagcactgtgacatcgaccgcttccagggcgcctgccccaccagccccccacctgtgagcagcgcccccctgagcagccccagccctgcccctggctgtgacaatgccatccccctgcggcaggtgaatgagacctggaccctggagaactgcaccgtggcccgctgtgtgggggacaacagagtggtgctgctggaccccaagcctgtggccaacgtgacctgtgtgaacaagcacctgcccatcaaggtgtctgaccccagccagccctgtgacttccactatgaatgtgagtgcatctgcagcatgtggggcggcagccactacagcacctttgatggcaccagctacaccttccggggcaactgcacctacgtgctgatgagggagatccacgcccgcttcggcaacctgagcctgtacctggacaaccactactgcacagccagcgccacagctgctgctgcccgctgcccccgggccctgagcatccactacaagtccatggacatcgtgctgactgtgaccatggtgcacggcaaggaggagggcctcatcctgtttgaccagatccctgtgagcagcggcttcagcaagaatggagtgctggtgtctgtgctgggcaccaccaccatgagggtggacatcccagccctgggcgtgtctgtgaccttcaacggccaggtgttccaggcccggctgccctacagcctcttccacaacaacacagagggccagtgtggcacctgcaccaacaaccagagagatgactgcctgcagagagatggcaccacagctgccagctgcaaggacatggccaagacctggctggtgcctgacagcaggaaggatggctgctgggcccccaccggcaccccacccacagccagccctgctgcccctgtgagcagcacccccacccccaccccctgccccccccagcccctgtgtgacctgatgctgagccaggtgtttgctgagtgccacaacctggtgcccccaggccccttcttcaatgcctgcatcagtgaccactgccggggccgcctggaggtgccctgccagagcctggaggcctatgcagagctgtgccgggcccggggcgtgtgcagcgactggaggggggccaccggcggcctgtgtgacctgacctgcccccccaccaaggtgtacaagccctgtggccccatccagcctgccacctgcaacagcaggaaccagagcccccagctggagggcatggccgagggctgcttctgcccagaggaccagatcctcttcaatgcccacatgggcatctgtgtgcaggcctgcccctgtgtgggcccagatggcttccccaagtttcctggagagcgctgggtgagcaactgccagagctgtgtgtgtgatgagggctctgtgtctgtgcagtgcaagcccctgccctgtgatgcccagggccagcccccaccctgcaaccggcccggctttgtgacagtgacccggcccagggctgagaacccctgctgcccagagaccgtgtgtgtgtgcaacaccaccacctgcccccagagcctgcctgtgtgccccccaggccaggagagcatctgcacccaggaggagggggactgctgccccaccttccgctgccggccccagctgtgcagctacaacggcaccttctatggagtgggcgccaccttccctggggccctgccctgccacatgtgcacctgcctgagcggggacacccaggaccccaccgtgcagtgccaggaggatgcctgcaacaacaccacctgcccccagggctttgagtacaagagggtggccggccagtgctgcggggagtgtgtgcagacagcctgcctgaccccagatggccagcctgtgcagctgaatgagacctgggtgaacagccacgtggacaactgcaccgtgtacctgtgtgaggccgagggcggcgtgcacctgctgaccccccagcctgccagctgcccagatgtgagcagctgccggggcagcctgaggaagacaggctgctgctacagctgtgaggaggacagctgccaggtgcgcatcaacaccaccatcctgtggcaccagggctgtgaaacagaggtgaacatcaccttctgtgagggcagctgccctggggccagcaagtacagcgctgaggcccaggccatgcagcaccagtgcacctgctgccaggagaggagagtgcatgaggagaccgtgcccctgcactgccccaacggcagcgccatcctgcacacctacacccacgtggatgaatgtggctgcacccccttctgtgtgcctgcccccatggccccaccccacacccggggcttccctgcccaggaggccacagctgtgtag

SEQ ID NO: 128580 - DNA, 17289 bp, Artificial Sequence
  derived and/or modified sequence
atgggcgcccccagcgcctgcaggaccctggtgctggccctggccgccatgctggtggtgccccaggccgagacccagggccctgtggagcccagctgggagaatgccggccacaccatggatggaggagcccccaccagcagccccaccaggagagtgtcctttgtgccccctgtgaccgtcttccccagcctgagccccctgaacccagcccacaacggccgggtgtgcagcacctggggagacttccactacaagacctttgatggagatgtgttccgcttccctggcctgtgcaactacgtgttcagcgagcactgcagagctgcctatgaggacttcaacgtgcagctgcggcggggcctggtgggcagcaggcctgtggtgaccagggtggtgatcaaggcccagggcctggtgctggaggccagcaatggatctgtgctgatcaatggccagcgggaggagctgccctacagcaggacaggcctgctggtggagcagagcggggactacatcaaggtgtccatccggctggtgctgaccttcctgtggaatggagaggacagcgccctgctggagctggaccccaagtatgccaaccagacctgtggcctgtgtggggacttcaacggcctgcctgccttcaatgagttctacgcccacaatgcccggctgacccccctgcagtttggaaacctgcagaagctggatggccccacagagcagtgcccagaccccctgcccctgcctgctggcaactgcacagatgaggagggcatctgccacaggaccctgctgggccctgcctttgctgaatgtcatgccctggtggacagcacagcctacctggccgcctgtgcccaggacctgtgccgctgccccacctgcccctgtgccacctttgtggagtacagccggcagtgtgcccacgccggcggccagcccaggaactggcgctgcccagagctgtgccccaggacctgccccctgaacatgcagcaccaggagtgtggcagcccctgcacagacacctgcagcaacccccagagggcccagctgtgtgaggaccactgtgtggatggctgcttctgccccccaggcaccgtgctggatgacatcacccacagcggctgcctgcccctgggccagtgcccctgcacccatggaggccgcacctacagccctggcaccagcttcaacaccacctgcagcagctgcacctgcagcggcggcctgtggcagtgccaggacctgccctgccccggcacctgcagcgtgcagggcggggcccacatcagcacctatgatgagaagctgtatgacctgcacggggactgcagctatgtgctgagcaagaagtgtgccgacagcagcttcaccgtgctggccgagctgaggaaatgtggcctgacagacaatgaaaactgcctgaaggctgtgaccctgagcctggatggaggagacacagccatccgggtgcaggctgatggaggagtcttcctgaacagcatctacacccagctgcccctgtctgctgccaacatcaccctcttcacccccagcagcttcttcatcgtggtgcagacaggcctgggcctgcagctgctggtgcagctggtgcccctgatgcaggtgtttgtgcggctggaccctgcccaccagggccagatgtgtggcctgtgtggcaacttcaaccagaaccaggctgatgacttcaccgccctgtctggagtggtggaggccactggagctgcctttgccaacacctggaaggcccaggccgcctgtgccaatgccagaaattcctttgaggacccctgcagcctgtctgtggagaatgaaaattatgcccggcactggtgcagccggctgacagaccccaacagcgccttcagccgctgccacagcatcatcaaccccaagcccttccacagcaactgcatgtttgacacctgcaactgtgagaggtctgaggactgcctgtgtgccgccctgagcagctatgtgcacgcctgtgccgccaagggcgtgcagctgagtgactggagagatggagtgtgcaccaagtacatgcagaactgccccaagagccagagatatgcctacgtggtggatgcctgccagcccacctgccggggcctgtctgaggctgatgtgacctgcagcgtgtcctttgtgcctgtggatggctgcacctgcccagctggcaccttcctgaatgatgctggggcctgtgtgcctgcccaggagtgcccctgctacgcccatggaacagtgctggcccctggagaggtggtgcatgatgaaggagctgtgtgcagctgcacaggaggcaagctgagctgcctgggcgccagcctgcagaagagcacaggctgtgccgcccccatggtgtacctggactgcagcaacagcagcgctggcaccccaggagctgagtgcctgcggagctgccacaccctggatgtgggctgcttcagcacccactgtgtgtctggctgtgtgtgccccccaggcctggtgtctgatggcagcggcggctgcatcgccgaggaggactgcccctgtgtgcacaatgaggccacctacaagccaggagagaccatccgggtggactgcaacacctgcacctgcaggaacagacgctgggagtgcagccaccggctgtgcctgggcacctgtgtggcctatggagatggccacttcatcacctttgatggagaccgctacagctttgagggcagctgtgagtacatcctggcccaggactactgtggggacaacaccacccacggcaccttcagaattgtgacagagaacatcccctgtggcaccaccggcaccacctgcagcaaggccatcaagctgtttgtggagagctatgagctgatcctgcaggagggcaccttcaaggctgtggcccggggccctggaggagaccccccctacaagatccgctacatgggcatcttcctggtgattgagacccacggcatggctgtgtcctgggacaggaagacctctgtgttcatccggctgcaccaggactacaagggccgggtgtgtggcctgtgtggcaactttgatgacaatgccatcaatgactttgccaccaggagccgctctgtggtgggagatgccctggagtttggaaacagctggaagctgagccccagctgcccagatgccctggcccccaaggacccctgcacagccaaccccttcaggaagtcctgggcccagaagcagtgcagcatcctgcacggccccacctttgctgcctgccgcagccaggtggacagcaccaagtactatgaggcctgtgtgaatgatgcctgtgcctgtgacagcggcggggactgtgagtgcttctgcacagctgtggccgcctatgcccaggcctgccatgatgctggcctgtgtgtgtcctggaggaccccagacacctgccccctcttctgtgacttctacaacccccatggaggctgtgagtggcactaccagccctgtggggccccctgcctgaagacctgcaggaaccccagcggccactgcctggtggacctgcccggcctggagggctgctaccccaagtgcccccccagccagcccttcttcaatgaagaccagatgaagtgtgtggcccagtgtggctgctatgacaaggatggcaactactatgatgtgggcgcccgggtgcccacagctgagaactgccagagctgcaactgcacccccagcggcatccagtgtgcccacagcctggaggcctgcacctgcacctatgaggacaggacctacagctaccaggacgtcatctacaacaccacagatggcctgggcgcctgcctgattgccatctgtggcagcaatggcaccatcatcaggaaggctgtggcctgccccggcaccccagccaccacccccttcaccttcaccacagcctgggtgccccacagcaccaccagccctgccctgcctgtgtccacagtgtgtgtgcgggaggtgtgccgctggagctcctggtacaacggccacaggcctgagcccggcctgggcggcggggactttgagacctttgagaacctgcggcagaggggctaccaggtgtgccctgtgctggccgacattgaatgtcgggccgcccagctgcctgacatgcccctggaggagctgggccagcaggtggactgtgacaggatgaggggcctgatgtgtgccaacagccagcagagcccccccctgtgccacgactatgagctgcgggtgctgtgctgtgaatatgtgccctgtggccccagccctgcccctggcaccagcccccagcccagcctgagcgccagcacagagcctgctgtgcccacccccacccagaccacagccacagagaagaccaccctgtgggtgacccccagcatccgcagcacagctgccctgaccagccagacaggcagcagcagcggccctgtgacagtgacccccagcgcccctggcaccaccacctgccagccccgctgccagtggacagagtggtttgatgaggactaccccaagtctgagcagctgggcggagatgtggagagctatgacaagatccgggccgccggcggccacctgtgccagcagcccaaggacatcgagtgccaggccgagagcttccccaactggaccctggcccaggtgggccagaaggtgcactgtgatgtgcacttcggcctggtgtgcaggaactgggagcaggagggcgtcttcaagatgtgctacaactaccgcatccgggtgctgtgctgcagtgatgaccactgccggggccgggccaccaccccaccacccaccacagagctggagacagccaccaccaccaccacccaggccctcttcagcaccccccagcccaccagcagccctggcctgacccgggcccccccagccagcaccacagctgtgcccaccctgtctgagggcctgaccagcccccgctacaccagcaccctgggcacagccaccactggaggccccaccaccccagctggcagcacagagcccaccgtgcctggggtggccaccagcaccctgcccaccaggtctgccctgcccggcaccaccggcagcctgggcacctggaggcccagccagccccccaccctggcccccaccaccatggccaccagccgggcccggcccaccggcacagccagcacagccagcaaggagcccctgaccaccagcctggcccccaccctgaccagcgagctgagcaccagccaggccgagaccagcacccccaggacagagaccaccatgagccccctgaccaacaccaccaccagccagggcaccacccgctgccagcccaagtgtgagtggacagagtggtttgatgtggacttccccaccagcggcgtggccggcggggacatggagacctttgagaacatccgggctgctgggggcaagatgtgctgggcccccaagagcattgaatgtagagctgagaactacccagaggtgtccattgaccaggtgggccaggtgctgacctgcagcctggagaccggcctgacctgcaagaatgaagaccagacaggccgcttcaacatgtgcttcaactacaacgtgcgggtgctgtgctgtgatgactacagccactgccccagcaccccagccaccagcagcacagccacccccagcagcaccccaggcaccacctggatcctgaccaagcccaccaccacagccaccaccacagccagcacaggcagcacagccacccccaccagcaccctgaggacagcccccccacccaaggtgctgaccaccacagccaccacccccaccgtgaccagcagcaaggccacccccagcagcagccctggaacagccacagccctgcctgccctgcggagcacagccaccacccccacagccacctctgtgacccccatccccagcagcagcctgggcaccacctggacccggctgagccagaccaccacccccacagccaccatgagcacagccacccccagcagcaccccagagacagcccacaccagcacagtgctgacagccacagccaccaccaccggggccactggatctgtggccacccccagcagcaccccaggcacagcccacaccaccaaggtgcccaccaccaccaccaccggcttcaccgccacccccagcagcagccctggaacagccctgaccccacctgtgtggatcagcaccaccaccacccccaccacccggggcagcacagtgacccccagcagcatccctggcaccacccacacagccaccgtgctgaccaccaccaccaccaccgtggccaccggctccatggccacccccagcagcagcacccagaccagcggcaccccacccagcctgaccaccacagccaccaccatcacagccaccggcagcaccaccaaccccagcagcaccccaggcaccacccccatcccccctgtgctgaccaccacagccaccaccccagctgccaccagcaacacagtgacccccagcagcgccctgggcaccacccacaccccacctgtgcccaacaccatggccaccacccacggccgcagcctgccccccagcagcccccacacagtgaggacagcctggaccagcgccaccagcggcatcctgggcaccacccacatcacagagcccagcacagtgaccagccacaccctggccgccaccaccggcaccacccagcacagcaccccagccctgagcagcccccaccccagcagcaggaccacagagagcccccccagccctggcaccaccaccccaggccacaccacagccaccagcaggaccacagccacagccacccccagcaagaccaggaccagcaccctgctgcccagcagccccaccagcgcccccatcaccaccgtggtgaccatgggctgtgagccccagtgtgcctggagcgagtggctggactacagctaccccatgcctggccccagcggcggggactttgacacctacagcaacatccgggctgctggaggagctgtgtgtgagcagcccctgggcctggagtgccgggcccaggcccagcccggggtgcccctgcgggagctgggccaggtggtggagtgcagcctggactttggcctggtgtgcaggaaccgggagcaggtgggcaagttcaagatgtgcttcaactatgagatccgggtcttctgctgcaactacggccactgccccagcaccccagccaccagcagcacagccatgcccagcagcaccccaggcaccacctggatcctgacagagctgaccaccacagccaccaccacagagagcacaggcagcacagccacccccagcagcaccccaggcaccacctggatcctgacagagcccagcaccacagccaccgtgacagtgcccaccggcagcacagccacagccagcagcacccaggccacagctggcacccctcatgtgtccaccacagccaccacccccaccgtgaccagcagcaaggccacccccttcagcagccctggaacagccacagccctgcctgccctgcggagcacagccaccacccccacagccaccagcttcaccgccatccccagcagcagcctgggcaccacctggacccggctgagccagaccaccacccccacagccaccatgagcacagccacccccagcagcaccccagagaccgtgcacaccagcacagtgctgaccaccacagccaccaccactggagccaccggctctgtggccacccccagcagcaccccaggcacagcccacaccaccaaggtgctgaccaccaccaccaccggcttcaccgccacccccagcagcagccctggaacagcccggaccctgcctgtgtggatcagcaccaccaccacccccaccacccggggcagcacagtgacccccagcagcatccctggcaccacccacacccccaccgtgctgaccaccaccaccaccaccgtggccaccggctccatggccacccccagcagcagcacccagaccagcggcaccccacccagcctgaccaccacagccaccaccatcacagccaccggcagcaccaccaaccccagcagcaccccaggcaccacccccatcccccctgtgctgaccaccacagccaccaccccagctgccaccagcagcacagtgacccccagcagcgccctgggcaccacccacaccccacctgtgcccaacaccacagccaccacccacggccgcagcctgagccccagcagcccccacacagtgaggacagcctggaccagcgccaccagcggcaccctgggcaccacccacatcacagagcccagcacaggcaccagccacaccccagctgccaccaccggcaccacccagcacagcaccccagccctgagcagcccccaccccagcagcaggaccacagagagcccccccagccctggcaccaccaccccaggccacacccgggccaccagcaggaccacagccacagccacccccagcaagaccaggaccagcaccctgctgcccagcagccccaccagcgcccccatcaccaccgtggtgaccatgggctgtgagccccagtgtgcctggagcgagtggctggactacagctaccccatgcctggccccagcggcggggactttgacacctacagcaacatccgggccgccggcggcgctgtgtgtgagcagcccctgggcctggagtgccgggcccaggcccagcccggggtgcccctgcgggagctgggccaggtggtggagtgcagcctggactttggcctggtgtgcaggaaccgggagcaggtgggcaagttcaagatgtgcttcaactatgagatccgggtcttctgctgcaactacggccactgccccagcaccccagccaccagcagcacagccacccccagcagcaccccaggcaccacctggatcctgacagagcagaccacagctgccaccaccacagccaccaccggcagcacagccatccccagcagcaccccaggcacagcccccccacccaaggtgctgaccagcacagccaccacccccacagccaccagcagcaaggccaccagcagcagcagccccaggacagccaccaccctgcctgtgctgaccagcacagccaccaagagcacagccaccagcttcacccccatccccagcttcaccctgggcaccaccggcaccctgcctgagcagaccaccacccccatggccaccatgagcaccatccaccccagcagcaccccagagaccacccacaccagcacagtgctgaccaccaaggccaccaccacccgggccaccagctccatgagcacccccagcagcaccccaggcaccacctggatcctgacagagctgaccacagctgccaccaccacagctgccaccggccccacagccacccccagcagcaccccaggcaccacctggatcctgacagagcccagcaccacagccaccgtgacagtgcccaccggcagcacagccacagccagcagcacccgggccacagctggcaccctgaaggtgctgaccagcacagccaccacccccaccgtcatcagcagccgggccacccccagcagcagccctggaacagccacagccctgcctgccctgcggagcacagccaccacccccacagccacctctgtgacagccatccccagcagcagcctgggcacagcctggacccggctgagccagaccaccacccccacagccaccatgagcacagccacccccagcagcaccccagagaccgtgcacaccagcacagtgctgaccaccaccaccaccaccacccgggccaccggctctgtggccacccccagcagcaccccaggcacagcccacaccaccaaggtgcccaccaccaccaccaccggcttcaccgccacccccagcagcagccctggaacagccctgaccccacctgtgtggatcagcaccaccaccacccccaccacccggggcagcacagtgacccccagcagcatccctggcaccacccacacagccaccgtgctgaccaccaccaccaccaccgtggccaccggctccatggccacccccagcagcagcacccagaccagcggcaccccacccagcctgaccaccacagccaccaccatcacagccaccggcagcaccaccaaccccagcagcaccccaggcaccacccccatcccccctgtgctgaccaccacagccaccaccccagctgccaccagcagcacagtgacccccagcagcgccctgggcaccacccacaccccacctgtgcccaacaccacagccaccacccacggccgcagcctgccccccagcagcccccacacagtgaggacagcctggaccagcgccaccagcggcatcctgggcaccacccacatcacagagcccagcacagtgaccagccacaccccagctgccaccaccagcaccacccagcacagcaccccagccctgagcagcccccaccccagcagcaggaccacagagagcccccccagccctggcaccaccaccccaggccacacccggggcaccagcaggaccacagccacagccacccccagcaagaccaggaccagcaccctgctgcccagcagccccaccagcgcccccatcaccaccgtggtgaccaccggctgtgagccccagtgtgcctggagcgagtggctggactacagctaccccatgcctggccccagcggcggggactttgacacctacagcaacatccgggccgccggcggcgctgtgtgtgagcagcccctgggcctggagtgccgggcccaggcccagcccggggtgcccctgcgggagctgggccaggtggtggagtgcagcctggactttggcctggtgtgcaggaaccgggagcaggtgggcaagttcaagatgtgcttcaactatgagatccgggtcttctgctgcaactacggccactgccccagcaccccagccaccagcagcacagccacccccagcagcaccccaggcaccacctggatcctgaccaagctgaccaccacagccaccaccacagagagcacaggcagcacagccacccccagcagcaccccaggcaccacctggatcctgacagagcccagcaccacagccaccgtgacagtgcccaccggcagcacagccacagccagcagcacccaggccacagctggcaccccccacgtgtccaccacagccaccacccccaccgtgaccagcagcaaggccacccccttcagcagccctggaacagccacagccctgcctgccctgcggagcacagccaccacccccacagccaccagcttcaccgccatccccagcagcagcctgggcaccacctggacccggctgagccagaccaccacccccacagccaccatgagcacagccacccccagcagcaccccagagacagcccacaccagcacagtgctgaccaccacagccaccaccacccgggccactggatctgtggccacccccagcagcaccccaggcacagcccacaccaccaaggtgcccaccaccaccaccaccggcttcaccgtgacccccagcagcagccctggaacagcccggaccccacctgtgtggatcagcaccaccaccacccccaccaccagcggcagcacagtgacccccagctctgtgcccggcaccacccacacccccaccgtgctgaccaccaccaccaccaccgtggccaccggctccatggccacccccagcagcagcacccagaccagcggcaccccacccagcctcatcaccacagccaccaccatcacagccaccggcagcaccaccaaccccagcagcaccccaggcaccacccccatcccccctgtgctgaccaccacagccaccaccccagctgccaccagcagcacagtgacccccagcagcgccctgggcaccacccacaccccacctgtgcccaacaccacagccaccacccacggccgcagcctgagccccagcagcccccacacagtgaggacagcctggaccagcgccaccagcggcaccctgggcaccacccacatcacagagcccagcacaggcaccagccacaccccagctgccaccaccggcaccacccagcacagcaccccagccctgagcagcccccaccccagcagcaggaccacagagagcccccccagccctggcaccaccaccccaggccacaccacagccaccagcaggaccacagccacagccacccccagcaagaccaggaccagcaccctgctgcccagcagccccaccagcgcccccatcaccaccgtggtgaccaccggctgtgagccccagtgtgcctggagcgagtggctggactacagctaccccatgcctggccccagcggcggggactttgacacctacagcaacatccgggctgctggaggagctgtgtgtgagcagcccctgggcctggagtgccgggcccaggcccagcccggggtgcccctgggggagctgggccaggtggtggagtgcagcctggactttggcctggtgtgcaggaaccgggagcaggtgggcaagttcaagatgtgcttcaactatgagatccgggtcttctgctgcaactacggccactgccccagcaccccagccaccagcagcacagccatgcccagcagcaccccaggcaccacctggatcctgacagagctgaccaccacagccaccaccacagccagcacaggcagcacagccacccccagcagcaccccaggcacagcccccccacccaaggtgctgaccagccctgccaccacccccacagccaccagcagcaaggccaccagcagcagcagccccaggacagccaccaccctgcctgtgctgaccagcacagccaccaagagcacagccacctctgtgacccccatccccagcagcaccctgggcaccaccggcaccctgcctgagcagaccaccacccctgtggccaccatgagcaccatccaccccagcagcaccccagagaccacccacaccagcacagtgctgaccaccaaggccaccaccacccgggccaccagcagcaccagcacccccagcagcaccccaggcaccacctggatcctgacagagctgaccacagctgccaccaccacagctgccaccggccccacagccacccccagcagcaccccaggcaccacctggatcctgacagagctgaccaccacagccaccaccacagccagcacaggcagcacagccacccccagcagcaccccaggcaccacctggatcctgacagagcccagcaccacagccaccgtgacagtgcccaccggcagcacagccacagccagcagcacccaggccacagctggcaccccccacgtgtccaccacagccaccacccccaccgtgaccagcagcaaggccacccccagcagcagccctggaacagccacagccctgcctgccctgcggagcacagccaccacccccacagccaccagcttcaccgccatccccagcagcagcctgggcaccacctggacccggctgagccagaccaccacccccacagccaccatgagcacagccacccccagcagcaccccagagaccgtgcacaccagcacagtgctgacagccacagccaccaccaccggggccactggatctgtggccacccccagcagcaccccaggcacagcccacaccaccaaggtgcccaccaccaccaccaccggcttcaccgccacccccagcagcagccctggaacagccctgaccccacctgtgtggatcagcaccaccaccacccccaccaccaccacccccaccaccagcggcagcacagtgacccccagcagcatccctggcaccacccacacagcccgggtgctgaccaccaccaccaccaccgtggccaccggctccatggccacccccagcagcagcacccagaccagcggcaccccacccagcctgaccaccacagccaccaccatcacagccaccggcagcaccaccaaccccagcagcaccccaggcaccacccccatcacccctgtgctgaccagcacagccaccaccccagctgccaccagcagcaaggccaccagcagcagcagccccaggacagccaccaccctgcctgtgctgaccagcacagccaccaagagcacagccaccagcttcacccccatccccagcagcaccctgtggaccacctggacagtgcctgcccagaccaccacccccatgagcaccatgagcaccatccacaccagcagcaccccagagaccacccacaccagcacagtgctgaccaccacagccaccatgacccgggccaccaacagcacagccacccccagcagcaccctgggcaccacccgcatcctgacagagctgaccaccacagccaccaccacagctgccaccggcagcacagccaccctgagcagcaccccaggcaccacctggatcctgacagagcccagcaccatcgccaccgtgatggtgcccaccggcagcacagccacagccagcagcaccctgggcacagcccacacccccaaggtggtgaccaccatggccaccatgcccacagccacagccagcacagtgcccagcagcagcacagtgggcaccaccaggaccccagctgtgctgcccagcagcctgcccaccttctctgtgtccacagtgagcagctctgtgctgaccaccctgcggcccaccggcttccccagcagccacttcagcaccccctgcttctgccgggccttcggccagttcttcagccctggagaggtgatctacaacaagacagacagagctggctgccacttctatgctgtgtgcaaccagcactgtgacatcgaccgcttccagggcgcctgccccaccagccccccacctgtgtcctctgcccccctgagcagccccagccctgcccctggctgtgacaatgccatccccctgcggcaggtgaatgagacctggaccctggagaactgcaccgtggcccgctgtgtgggggacaacagagtggtgctgctggaccccaagcctgtggccaacgtgacctgtgtgaacaagcacctgcccatcaaggtgtctgaccccagccagccctgtgacttccactatgaatgtgagtgcatctgcagcatgtggggcggcagccactacagcacctttgatggcaccagctacaccttccggggcaactgcacctacgtgctgatgagggagatccacgccaggtttggaaacctgagcctgtacctggacaaccactactgcacagccagcgccacagctgctgctgcccgctgcccccgggccctgagcatccactacaagtccatggacatcgtgctgactgtgaccatggtgcacggcaaggaggagggcctcatcctgtttgaccagatccctgtgagcagcggcttcagcaagaatggagtgctggtgtctgtgctgggcaccaccaccatgagggtggacatcccagccctgggcgtgtctgtgaccttcaacggccaggtgttccaggcccggctgccctacagcctcttccacaacaacacagagggccagtgtggcacctgcaccaacaaccagagagatgactgcctgcagagagatggcaccacagctgccagctgcaaggacatggccaagacctggctggtgcctgacagcaggaaggatggctgctgggcccccaccggcaccccacccacagccagccctgctgcccctgtgagcagcacccccacccccaccccctgccccccccagcccctgtgtgacctgatgctgagccaggtgtttgctgagtgccacaacctggtgcccccaggccccttcttcaatgcctgcatcagtgaccactgccggggccgcctggaggtgccctgccagagcctggaggcctatgcagagctgtgccgggcccggggcgtgtgcagcgactggaggggggccactggaggcctgtgtgacctgacctgcccccccaccaaggtgtacaagccctgtggccccatccagcctgccacctgcaacagcaggaaccagagcccccagctggagggcatggccgagggctgcttctgcccagaggaccagatcctcttcaatgcccacatgggcatctgtgtgcaggcctgcccctgtgtgggcccagatggcttccccaagtttcctggagagcgctgggtgagcaactgccagagctgtgtgtgtgatgagggctctgtgtctgtgcagtgcaagcccctgccctgtgatgcccagggccagcccccaccctgcaacagacctggctttgtgacagtgacccggcccagggctgagaacccctgctgcccagagaccgtgtgtgtgtgcaacaccaccacctgcccccagagcctgcctgtgtgccccccaggccaggagagcatctgcacccaggaggagggggactgctgccccaccttccgctgccggccccagctgtgcagctacaacggcaccttctacggcgtgggcgccaccttccctggggccctgccctgccacatgtgcacctgcctgagcggggacacccaggaccccaccgtgcagtgccaggaggatgcctgcaacaacaccacctgcccccagggctttgagtacaagagggtggccggccagtgctgcggagaatgtgtgcagacagcctgcctgaccccagatggccagcctgtgcagctgaatgagacctgggtgaacagccacgtggacaactgcaccgtgtacctgtgtgaggccgagggcggcgtgcacctgctgaccccccagcctgccagctgcccagatgtgagcagctgccggggcagcctgaggaagacaggctgctgctacagctgtgaggaggacagctgccaggtgcgcatcaacaccaccatcctgtggcaccagggctgtgaaacagaggtgaacatcaccttctgtgagggcagctgccctggggccagcaagtacagcgctgaggcccaggccatgcagcaccagtgcacctgctgccaggagcggcgggtgcatgaggagaccgtgcccctgcactgccccaatggaagtgccatcctgcacacctacacccacgtggatgaatgtggctgcacccccttctgtgtgcctgcccccatggccccaccccacacccggggcttccctgcccaggaggccacagctgtgtag

SEQ ID NO: 128581 - DNA, 561 bp, Artificial Sequence
  derived and/or modified sequence
agcagcaccccaggcaccacctggatcctgacagagcccagcaccacagccaccgtgacagtgcccaccggcagcacagccacagccagcagcacccaggccacagctggcaccccccacgtgtccaccacagccaccacccccaccgtgaccagcagcaaggccacccccttcagcagccctggaacagccacagccctgcctgccctgcggagcacagccaccacccccacagccaccagcttcaccgccatccccagctcctgggcccctcctggccctgcctaccacaggcctccccacccccggcccccctgcccccagccccaccccccacccctgcagaggctgagcaccccaccccagtgcctgcccccccggcccccccggggccaccggctgtgtggccaccccctgctgcaccccaggaacagcagccactaccagagcgctgactaccacaaccacttcaccgccacccccagcagcagccctggaacagcccggaccctgcctgtgtggatcagcaccaccaccacccccaccacccggggcagctag

SEQ ID NO: 128582 - DNA, 2007 bp, Artificial Sequence
  derived and/or modified sequence
atgagggagatccacgcccgcttcggcaacctgagcctgtacctggacaaccactactgcacagccagcgccacagctgctgctgcccgctgcccccgggccctgagcatccactacaagtccatggacatcgtgctgactgtgaccatggtgcacggcaaggaggagggcctcatcctgtttgaccagatccctgtgagcagcggcttcagcaagaatggagtgctggtgtctgtgctgggcaccaccaccatgagggtggacatcccagccctgggcgtgtctgtgaccttcaacggccaggtgttccaggcccggctgccctacagcctcttccacaacaacacagagggccagtgtggcacctgcaccaacaaccagagagatgactgcctgcagagagatggcaccacagctgccagctgcaaggacatggccaagacctggctggtgcctgacagcaggaaggatggctgctgggcccccaccggcaccccacccacagccagccctgctgcccctgtgagcagcacccccacccccaccccctgccccccccagcccctgtgtgacctgatgctgagccaggtgtttgctgagtgccacaacctggtgcccccaggccccttcttcaatgcctgcatcagtgaccactgccggggccgcctggaggtgccctgccagagcctggaggcctatgcagagctgtgccgggcccggggcgtgtgcagcgactggaggggggccaccggcggcctgtgtgacctgacctgcccccccaccaaggtgtacaagccctgtggccccatccagcctgccacctgcaacagcaggaaccagagcccccagctggagggcatggccgagggctgcttctgcccagaggaccagatcctcttcaatgcccacatgggcatctgtgtgcaggcctgcccctgtgtgggcccagatggcttccccaagtttcctggagagcgctgggtgagcaactgccagagctgtgtgtgtgatgagggctctgtgtctgtgcagtgcaagcccctgccctgtgatgcccagggccagcccccaccctgcaaccggcccggctttgtgacagtgacccggcccagggctgagaacccctgctgcccagagaccgtgtgtgtgtgcaacaccaccacctgcccccagagcctgcctgtgtgccccccaggccaggagagcatctgcacccaggaggagggggactgctgccccaccttccgctgccggccccagctgtgcagctacaacggcaccttctatggagtgggcgccaccttccctggggccctgccctgccacatgtgcacctgcctgagcggggacacccaggaccccaccgtgcagtgccaggaggatgcctgcaacaacaccacctgcccccagggctttgagtacaagagggtggccggccagtgctgcggggagtgtgtgcagacagcctgcctgaccccagatggccagcctgtgcagctgaatgagacctgggtgaacagccacgtggacaactgcaccgtgtacctgtgtgaggccgagggcggcgtgcacctgctgaccccccagcctgccagctgcccagatgtgagcagctgccggggcagcctgaggaagacaggctgctgctacagctgtgaggaggacagctgccaggtgcgcatcaacaccaccatcctgtggcaccagggctgtgaaacagaggtgaacatcaccttctgtgagggcagctgccctggggccagcaagtacagcgctgaggcccaggccatgcagcaccagtgcacctgctgccaggagaggagagtgcatgaggagaccgtgcccctgcactgccccaacggcagcgccatcctgcacacctacacccacgtggatgaatgtggctgcacccccttctgtgtgcctgcccccatgagccccccagcctgtgtgtggcacccagccctgcgggccccagctgcccacctgggcctggcccctccttag

SEQ ID NO: 128583 - DNA, 17747 bp, Artificial Sequence
  derived and/or modified sequence
acccggcccggctccctccctgcccgtccccgtccccccacccgtgccagcccccaggatgggtgccccgagcgcgtgccggacgctggtgttggctctggcggccatgctcgtggtgccgcaggcagagacccagggccctgtggagccgagctgggagaatgcagggcacaccatggatggcggtgccccgacgtcctcgcccacccggcgcgtgagctttgttccacccgtcactgtcttccccagcctgagccccctgaacccggcgcacaatgggcgggtgtgcagcacctggggtgacttccactacaagaccttcgacggcgacgtcttccgcttccctggcctttgcaactacgtgttctctgagcactgccgcgccgcctacgaggacttcaacgtccagctacgccgaggcctagtgggctccaggcctgtggtcacccgtgttgtcatcaaggcccaggggctggtgctggaggcgtccaacggctccgtcctcatcaatgggcagcgggaggagctgccttacagccgcactggcctcctggtggagcagagcggggactacatcaaggtcagcatccggctggtgctgacattcctgtggaacggagaggacagtgccctgctggagctggatcccaaatacgccaaccagacctgtggcctgtgtggggacttcaacggcctcccggccttcaacgagttctatgcccacaacgccaggctgaccccgctccagtttgggaacctgcagaagttggatgggcccacggagcagtgcccggacccgctgcccttgccggccggcaactgcacggacgaggagggcatctgccaccgcaccctgctggggccggcctttgcggagtgccacgcactggtggacagcactgcgtacctggccgcctgcgcccaggacctgtgccgctgccccacctgcccgtgtgccacctttgtggaatactcacgccagtgcgcccacgcggggggccagccgcggaactggaggtgccctgagctctgcccccggacctgccccctcaacatgcagcaccaggagtgtggctcaccctgcacggacacctgctccaacccccagcgcgcgcagctctgcgaggaccactgtgtggacggctgcttctgccccccaggcagcacggtgctggatgacatcacgcactctggctgcctgcccctcgggcagtgcccctgcacccacggcggccgcacctacagcccgggcacctccttcaacaccacctgcagctcctgcacctgctccggggggctatggcagtgccaggacctgccgtgccctggcacctgctctgtgcagggcggggcccacatctccacctatgatgagaaactctacgacctgcatggtgactgcagctacgttctgtccaagaaatgtgccgacagcagcttcaccgtgctggctgagctgcggaagtgcggcctgacggacaacgagaactgcctgaaagcggtgacgctcagcctggacggcggggacacggccatccgggtccaagcggacggcggcgtgttcctcaactccatctacacgcagctgcccctgtcggcagccaacatcaccctgttcacaccctcgagcttcttcatcgtggtgcagacaggcctggggctgcagctgctggtgcagctggtgccactcatgcaggtgtttgtcaggctggaccccgcccaccagggccagatgtgcggcctgtgtgggaacttcaaccagaaccaggctgacgacttcacggccctcagcggggtggtggaggccacgggcgcagccttcgccaacacctggaaggcccaggctgcctgtgccaatgccaggaacagctttgaggacccctgctccctcagtgtggagaatgagaactacgcccggcactggtgctcgcgcctgaccgatcccaacagtgccttctcgcgctgccactccatcatcaaccccaagcccttccactcgaactgcatgtttgacacctgcaactgtgagcggagcgaggactgcctgtgcgccgcgctgtcctcctatgtgcacgcctgtgccgccaagggcgtacagctcagcgactggagggacggcgtctgcaccaagtacatgcagaactgccccaagtcccagcgctacgcctacgtggtggatgcctgccagcccacttgccgcggcctgagtgaggccgacgtcacctgcagcgtttccttcgtgcctgtggacggctgcacctgccccgcgggcaccttcctcaatgacgcgggcgcctgtgtgcccgcccaggagtgcccctgctacgctcacggcaccgtgctggctcctggagaggtggtgcacgacgagggcgccgtgtgttcatgtacgggtgggaagctaagctgcctgggagcctctctgcagaaaagcacagggtgtgcagcccccatggtgtacctggactgcagcaacagctcggcgggcacccctggggccgagtgcctccggagctgccacacgctggacgtgggctgtttcagcacacactgcgtgtccggctgtgtctgtcccccggggctggtgtcggatgggagtgggggctgcattgccgaggaggactgcccctgtgtgcacaacgaggccacctacaagcctggagagaccatcagggtcgactgcaacacctgcacctgcaggaaccggaggtgggagtgcagccaccggctctgcctgggcacctgcgtggcctacggggatggccacttcatcacctttgatggcgatcgctacagctttgaaggcagctgcgagtacatcttggcccaggactactgtggggacaacaccacccacgggaccttccgcatcgtcaccgagaacatcccctgtgggaccaccggcaccacctgctccaaggccatcaagctcttcgtggagagctacgagctgatcctccaagaggggacctttaaggcggtggcgagagggccgggtggggacccaccctacaagatacgctacatggggatcttcctggtcatcgagacccacgggatggccgtgtcctgggaccggaagaccagcgtgttcatccgactgcaccaggactacaagggcagggtctgcggcctgtgcgggaacttcgacgacaatgccatcaatgactttgccacgcgtagccggtccgtggtgggggacgcactggagtttgggaacagctggaagctctccccctcctgcccggacgccctggcacccaaggacccctgcacggccaaccccttccgcaagtcctgggcccagaagcagtgcagcatcctccacggccccaccttcgccgcctgccgctcccaggttgactccaccaagtactacgaggcctgcgtgaacgacgcgtgtgcctgcgactcgggtggcgactgcgagtgtttctgcacggctgtggctgcctacgcccaggcctgccacgacgcgggcctgtgtgtgtcctggcggactccggacacctgccccttgttctgtgacttctacaacccacatgggggctgtgagtggcactaccagccctgcggggcaccctgcctaaaaacctgccggaaccccagtgggcactgcctggtggacctgcctggcctggaaggctgctacccgaagtgcccacccagccagcccttcttcaatgaggaccagatgaagtgcgtggcccagtgtggctgctacgacaaggacggaaactactatgacgtcggtgcaagggtccccacagcggagaactgccagagctgtaactgcacacccagtggcatccagtgcgctcacagccttgaggcctgcacctgcacctatgaggacaggacctacagctaccaggacgtcatctacaacaccaccgatgggcttggcgcctgcttgatcgccatctgcggaagcaacggcaccatcatcaggaaggctgtggcatgtcctggaactccagccacaacgccattcaccttcaccaccgcctgggtcccccactccacgacaagcccggccctcccggtctccaccgtgtgtgtccgcgaggtctgccgctggtccagctggtacaatgggcaccgcccagagcccggcctgggaggcggagactttgagacgtttgaaaacctgaggcagagagggtaccaggtatgccctgtgctggctgacatcgagtgccgggcggcgcagcttcccgacatgccgctggaggagctgggccagcaggtggactgtgaccgcatgcgggggctgatgtgcgccaacagccaacagagtcccccgctctgtcacgactacgagctgcgggttctctgctgcgaatacgtgccctgtggcccctccccggccccaggcaccagccctcagccctccctcagtgccagcacggagcctgctgtgcctaccccaacccagaccacagcaaccgaaaagaccaccctatgggtgaccccgagcatccggtcgacggcggccctcacctcgcagactgggtccagctcaggccccgtgacggtcaccccctcggccccaggtaccaccacctgccagccccggtgtcagtggacagagtggtttgatgaggactaccccaagtctgaacaacttggaggggacgttgagtcctacgataagatcagggccgctggagggcacttatgccagcagcctaaggacatagagtgccaggccgagagcttccccaactggaccctggcacaggtggggcagaaggtgcactgtgacgtccacttcggcctggtgtgcaggaactgggagcaggagggcgtcttcaagatgtgctacaactacaggatccgggtcctctgctgcagtgacgaccactgcaggggacgtgccacaaccccgccaccgaccacagagctggagacggccaccaccaccaccacccaggccctgttctcaacgccgcagcctacgagtagcccggggctgaccagggctcccccggccagcaccacagcagtccccaccctctcagaaggactgacatcccccagatacacaagcacccttggtacagccaccacgggaggccccacgacgcctgcaggctccacagaacccactgtcccaggggtggccacatccacccttccaacacgctcagcccttccagggacgacggggagcttgggcacatggcgcccctcacagccacccacgctggccccaacaacaatggcaacctccagagctcgcccgacaggcacagccagcaccgcttccaaagagccgctgaccacgagcctggcgccaacactcacgagcgagctgtccacctctcaggccgagaccagcacgcccaggacagagacgacaatgagccccttgactaacaccaccaccagccagggcacgacccgctgtcaaccgaagtgtgagtggacagagtggtttgacgtggacttcccaacctcaggggttgcaggcggggacatggaaacttttgaaaacatcagggctgctgggggcaagatgtgctgggcaccaaagagcatagagtgccgggcggagaactaccccgaggtaagcatcgaccaggtcgggcaggtgctgacctgcagcctggagacggggctgacctgcaagaacgaagaccagacaggcaggttcaacatgtgcttcaactacaacgtgcgtgtgctttgctgtgacgactacagccactgccccagtaccccagccaccagctccacggccacgccctcctcaactccggggacgacctggatcctcacaaagccgaccacaacagccactacgactgcgtccactggatccacggccaccccgacctccaccctgagaacagctccccctcccaaagtgctgaccaccacggccaccacacccacagtcaccagctccaaagccactccctcctccagtccagggactgcaaccgcccttccagcactgagaagcacagccaccacacccacagctaccagcgttacacccatcccctcttcctccctgggcaccacctggacccgcctatcacagaccaccacacccacggccaccatgtccacagccacaccctcctccactccagagactgcccacacctccacagtgcttaccgccacggccaccacaactggggccaccggctctgtggccaccccctcctccaccccaggaacagctcacactaccaaagtgccaactaccacaaccacgggcttcacagccaccccctcctccagcccagggacggcactcacgcctccagtgtggatcagcacaaccaccacacccacaaccagaggctccacggtgaccccctcctccatcccggggaccacccacaccgccacagtgctgaccaccaccaccacaactgtggccactggttctatggcaacaccctcctctagcacacagaccagtggtactcccccatcactgaccaccacggccactacgatcacggccaccggctccaccaccaacccctcctcaactcctgggacaactcccatccccccagtgctgaccaccaccgccaccacacctgcagccaccagcaacacagtgactccctcctctgccctagggaccacccacacacccccagtgccgaacaccatggccaccacacacgggcgatccctgccccccagcagtccccacacggtgcgcacagcctggacttcggccacctcgggcatcttgggcaccacccacatcacagagccttccacggtgacttcccacaccctagcagcaaccaccggtaccacccagcactcgactccagccctttccagccctcaccctagcagcagaaccaccgagtcacccccttctccagggacgaccaccccgggccacaccacggccacctccaggaccacagccacggccacacccagcaagacccgcacctcgaccctgctgcccagcagccccacatcggcccccataaccacggtggtgaccatgggctgtgagccccagtgtgcctggtcagagtggctggactacagctaccccatgccggggccctctggcggggactttgacacctactccaacatccgtgcggccggaggggccgtctgtgagcagcccctgggcctcgagtgccgtgcccaggcccagcctggtgtccccctgcgggagttgggccaggtcgtggaatgcagcctggactttggcctggtctgcaggaaccgtgagcaggtggggaagttcaagatgtgcttcaactatgaaatccgtgtgttctgctgcaactacggccactgccccagcaccccggccaccagctctacggccatgccctcctccactccggggacgacctggatcctcacagagctgaccacaacagccactacgactgagtccactggatccacggccaccccgtcctccaccccagcaactgctggcaccccacatgtgagcaccacggccacgacacccacagtcaccagctccaaagccactcccttctccagtccagggactgcaaccgcccttccagcactgagaagcacagccaccacacccacagctaccagctttacagccatcccctcctcctccctgggcaccacctggacccgcctatcacagaccaccacacccacggccaccatgtccacagccacaccctcctccactccagagactgtccacacctccacagtgcttaccaccacggccaccacaaccggggccaccggctctgtggccaccccctcctccaccccaggaacagctcacactaccaaagtgctgactaccacaaccacgggcttcacagccaccccctcctccagcccagggacggcacgcacgcttccagtgtggatcagcacaaccaccacacccacaaccagaggttccacggtgaccccctcctccatcccggggaccacccacacccccacagtgctgaccaccaccaccacaactgtggccactggttctatggcaacaccctcctctagcacacagaccagtggtactcccccatcactgaccaccacggccactacgatcacggccaccggctccaccaccaacccctcctcaactccagggacaacacctatccccccagtgctgaccaccaccgccaccacacctgcagccaccagcagcacagtgactccctcctctgccctagggaccacccacacacccccagtgccgaacaccacggccaccacacacgggcgatccctgtcccccagcagtccccacacggtgcgcacagcctggacttcggccacctcaggcaccttgggcaccacccacatcacagagccttccacggggacttcccacaccccagcagcaaccaccggtaccacccagcactcgactccagccctgtccagccctcaccctagcagcaggaccaccgagtcacccccttctccagggacgaccaccccgggccacaccagggccacctccaggaccacggccacggccacacccagcaagacccgcacctcgaccctgctgcccagcagccccacatcggccccaataaccacggtggtgaccatgggctgtgagccccagtgtgcctggtcagagtggctggactacagctaccccatgccggggccctctggcggggactttgacacctactccaacatccgtgcggccggaggggccgtctgtgagcagcccctgggcctcgagtgccgtgcccaggcccagcctggtgtccccctgcgggagttgggccaggtcgtggaatgcagcctggactttggcctggtctgcaggaaccgtgagcaggtggggaagttcaagatgtgcttcaactatgaaatccgtgtgttctgctgcaactacggccactgccccagcaccccggccaccagctctacggccacgccctcctccactccagggacgacctggatcctcacagagcagaccacagcagccactacgaccgcaaccactggatccacggccatcccgtcctccaccccgggaacagctccccctcccaaagtgctgaccagcacggccaccacacccacagccaccagttccaaagccacttcctcctccagtccaaggactgcaaccacccttccagtgctgacaagcacagccaccaaatccacagctaccagctttacacccatcccctccttcacccttgggaccaccgggaccctcccagaacagaccaccacacccatggccaccatgtccacaatccacccctcctccactccggagaccacccacacctccacagtgctgaccacgaaggccaccacgacaagggccaccagttccatgtccaccccctcctccactccggggacgacctggatcctcacagagctgaccacagcagccactacaactgcagccactggccccacggccaccccgtcctccaccccagggaccacctggatcctcacagagcccagcactacagccaccgtgacggtgcccaccggatccacggccaccgcctcctccacccgggcaactgctggcaccctcaaagtgctgaccagcacggccaccacacccacagtcatcagctccagagccactccctcctccagtccagggactgcaaccgcccttccagcactgagaagcacagccaccacacccacagctaccagcgttacagccatcccctcttcctccctgggcaccgcctggacccgcctatcacagaccaccacacccacggccaccatgtccacagccacaccctcctctactccagagactgtccacacctccacagtgcttaccaccacgaccaccacaaccagggccaccggctctgtggccaccccctcctccaccccaggaacagctcacactaccaaagtgccgactaccacaaccacgggcttcacagccaccccctcctccagcccagggacggcactcacgcctccagtgtggatcagcacaaccaccacacccacaaccagaggctccacggtgaccccctcctccatcccggggaccacccacaccgccacagtgctgaccaccaccaccacaactgtggccactggttctatggcaacaccctcctctagcacacagaccagtggtactcccccatcactgaccaccacggccactacgatcacagccaccggctccaccaccaacccctcctcaactccagggacaactcccatccccccagtgctgaccaccaccgccaccacacctgcagccaccagcagcacagtgactccctcctctgccctagggaccacccacacacccccagtgccgaacaccacggccaccacacacgggcggtccctgccccccagcagtccccacacggtgcgcacagcctggacttcggccacctcgggcatcttgggcaccacccacatcacagagccttccacggtgacttcccacaccccagcagcaaccaccagtaccacccagcactcgactccagccctgtccagccctcaccctagcagcaggaccaccgagtcacccccttctccagggacgaccaccccgggccacaccaggggcacctccaggaccacagccacagccacacccagcaagacccgcacctcgaccctgctgcccagcagccccacatcggcccccataaccacggtggtgaccacgggctgtgagccccagtgtgcctggtcagagtggctggactacagctaccccatgccggggccctctggcggggactttgacacctactccaacatccgtgcggccggaggggcagtctgtgagcagcccctgggcctcgagtgccgtgcccaggcccagcctggtgtccccctgcgggagttgggccaggtcgtggaatgcagcctggactttggcctggtctgcaggaaccgtgagcaggtggggaagttcaagatgtgcttcaactatgaaatccgtgtgttctgctgcaactacggccactgccccagcaccccggccaccagctctacggccacgccctcctcaactccggggacgacctggatcctcacaaagctgaccacaacagccactacgactgagtccactggatccacggccaccccgtcctccaccccaggggcaactgctggcaccccacatgtgagcaccacggccacgacacccacagtcaccagctccaaagccactcccttctccagtccagggactgcaaccgcccttccagcactgagaagcacagccaccacacccacagctaccagctttacagccatcccctcctcctccctgggcaccacctggacccgcctatcacagaccaccacacccacggccaccatgtccacagccacaccctcctccactccagagactgcccacacctccacagtgcttaccaccacggccaccacaaccagggccaccggctctgtggccaccccctcttccaccccaggaacagctcacactaccaaagtgccgactaccacaaccacgggcttcacagtcaccccctcctccagcccagggacggcacgcacgcctccagtgtggatcagcacaaccaccacacccacaaccagtggctccacggtgaccccctcctccgtcccggggaccacccacacccccacagtgctgaccaccaccaccacaactgtggccactggttctatggcaacaccctcctctagcacacagaccagtggtactcccccatcactgatcaccacggccactacgatcacggccaccggctccaccaccaacccctcctcaactccagggacaacacctatccccccagtgctgaccaccaccgccaccacacctgcagccaccagcagcacagtgactccctcctctgccctagggaccacccacacacccccagtgccgaacaccacggccaccacacacgggcgatccctgtcccccagcagtccccacacggtgcgcacagcctggacttcggccacctcaggcaccttgggcaccacccacatcacagagccttccacggggacttcccacaccccagcagcaaccaccggtaccacccagcactcgactccagccctgtccagccctcaccctagcagcaggaccaccgagtcacccccttccccagggacgaccaccccgggccacaccacggccacctccaggaccacggccacggccacacccagcaagacccgcacctcgaccctgctgcccagcagccccacatcggcccccataaccacggtggtgaccacgggctgtgagccccagtgtgcctggtcagagtggctggactacagctaccccatgccggggccctctggcggggactttgacacctactccaacatccgtgcggccggaggggccgtctgtgagcagcccctgggcctcgagtgccgtgcccaggcccagcctggtgtccccctgggggagttgggccaggtcgtggaatgcagcctggactttggcctggtctgcaggaaccgtgagcaggtggggaagttcaagatgtgcttcaactatgaaatccgtgtgttctgctgcaactacggccactgccccagcaccccggccaccagctctacggccatgccctcctccactccggggacgacctggatcctcacagagctgaccacaacagccactacgactgcatccactggatccacggccaccccgtcctccaccccgggaacagctccccctcccaaagtgctgaccagcccggccaccacacccacagccaccagttccaaagccacttcctcctccagtccaaggactgcaaccacccttccagtgctgacaagcacagccaccaaatccacagctaccagcgttacacccatcccctcctccacccttgggaccaccgggaccctcccagaacagaccaccacacccgtggccaccatgtccacaatccacccctcctccactccggagaccacccacacctccacagtgctgaccacgaaggccaccacgacaagggccaccagttccacgtccaccccctcctccactccggggacgacctggatcctcacagagctgaccacagcagccactacaactgcagccactggccccacggccaccccgtcctccaccccagggaccacctggatcctcacagagctgaccacaacagccactacgactgcgtccactggatccacggccaccccgtcctccaccccagggaccacctggatcctcacagagccgagcactacagccaccgtgacggtgcccaccggatccacggccaccgcctcctccacccaggcaactgctggcaccccacatgtgagcaccacggccacgacacccacagtcaccagctccaaagccactccctcctccagtccagggactgcaactgcccttccagcactgagaagcacagccaccacacccacagctaccagctttacagccatcccctcctcctccctgggcaccacctggacccgcctatcacagaccaccacacccacggccaccatgtccacagccacaccctcctccactccagagactgtccacacctccacagtgcttaccgccacggccaccacaaccggggccaccggctctgtggccaccccctcctccaccccaggaacagctcacactaccaaagtgccgactaccacaaccacgggcttcacagccaccccctcctccagcccagggacggcactcacgcctccagtgtggatcagcacaaccaccacacccacaaccaccacacccacaaccagtggctccacggtgaccccctcctccatcccggggaccacccacaccgccagagtgctgaccaccaccaccacaactgtggccactggttctatggcaacaccctcctctagcacacagaccagtggtactcccccatcactgaccaccacggccactacgatcacggccaccggctccaccaccaacccctcctcaactccagggacaacacccatcaccccagtgctgaccagcacggccaccacacccgcagccaccagctccaaagccacttcctcctccagtccaaggactgcaaccacccttccagtgctgacaagcacagccacaaaatccacagctaccagctttacacccatcccctcctccaccctgtggaccacgtggaccgtcccagcacagaccaccacacccatgtccaccatgtccacaatccacacctcctctactccagagaccacccacacctccacagtgctgaccaccacagccaccatgacaagggccaccaattccacggccacaccctcctccactctggggacgacccggatcctcactgagctgaccacaacagccactacaactgcagccactggatccacggccaccctgtcctccaccccagggaccacctggatcctcacagagccgagcactatagccaccgtgatggtgcccaccggttccacggccaccgcctcctccactctgggaacagctcacacccccaaagtggtgaccaccatggccactatgcccacagccactgcctccacggttcccagctcgtccaccgtggggaccacccgcacccctgcagtgctccccagcagcctgccaaccttcagcgtgtccactgtgtcctcctcagtcctcaccaccctgagacccactggcttccccagctcccacttctctactccctgcttctgcagggcatttggacagtttttctcgcccggggaagtcatctacaataagaccgaccgagccggctgccatttctacgcagtgtgcaatcagcactgtgacattgaccgcttccagggcgcctgtcccacctccccaccgccagtgtcctccgccccgctgtcctcgccctcccctgcccctggctgtgacaatgccatccctctccggcaggtgaatgagacctggaccctggagaactgcacggtggccaggtgcgtgggtgacaaccgtgtcgtcctgctggacccaaagcctgtggccaacgtcacctgcgtgaacaagcacctgcccatcaaagtgtcggacccgagccagccctgtgacttccactatgagtgcgagtgcatctgcagcatgtggggcggctcccactattccacctttgacggcacctcttacaccttccggggcaactgcacctatgtcctcatgagagagatccatgcacgctttgggaatctcagcctctacctggacaaccactactgcacggcctctgccactgccgctgccgcccgctgcccccgcgccctcagcatccactacaagtccatggatatcgtcctcactgtcaccatggtgcatgggaaggaggagggcctgatcctgtttgaccaaattccggtgagcagcggtttcagcaagaacggcgtgcttgtgtctgtgctggggaccaccaccatgcgtgtggacattcctgccctgggcgtgagcgtcaccttcaatggccaagtcttccaggcccggctgccctacagcctcttccacaacaacaccgagggccagtgcggcacctgcaccaacaaccagagggacgactgtctccagcgggacggaaccactgccgccagttgcaaggacatggccaagacgtggctggtccccgacagcagaaaggatggctgctgggccccgactggcacaccccccactgccagccccgcagccccggtgtctagcacacccacccccaccccatgcccaccacagccgctctgtgatctgatgctgagccaggtctttgctgagtgccacaaccttgtgcccccgggcccattcttcaacgcctgcatcagcgaccactgcaggggccgccttgaggtgccctgccagagcctggaggcttacgcagagctctgccgcgcccggggagtgtgcagtgactggcgaggtgcaaccggtggcctgtgcgacctcacctgcccacccaccaaagtgtacaagccatgcggccccatacagcctgccacctgcaactctaggaaccagagcccacagctggaggggatggcggagggctgcttctgccctgaggaccagatcctcttcaacgcacacatgggcatctgcgtgcaggcctgcccctgcgtgggacccgatgggtttcctaaatttcccggggagcggtgggtcagcaactgccagtcctgcgtgtgtgacgagggttcagtgtcggtgcagtgcaagcccctgccctgtgacgcccagggtcagcccccgccgtgcaaccgtcccggcttcgtaaccgtgaccaggccccgggccgagaacccctgctgccccgagacggtgtgcgtgtgcaacacaaccacctgcccccagagcctgcctgtgtgcccgccagggcaggagtccatctgcacccaggaggagggcgactgctgtcccaccttccgctgcagacctcagctgtgttcgtacaatggcaccttctacggggttggtgcaaccttcccaggcgcccttccctgccacatgtgtacctgcctctctggggacacccaggacccaacggtgcaatgtcaggaggatgcctgcaacaatactacctgtccccagggctttgagtacaagagagtggccgggcagtgctgtggggagtgcgtccagaccgcctgcctcacgcccgatggccagccagtccagctgaatgaaacctgggtcaacagccatgtggacaactgcaccgtgtacctctgtgaggctgagggtggagtccatttgctgaccccacagcctgcatcctgcccagatgtgtccagctgcagggggagcctcaggaaaaccggctgctgctactcctgtgaggaggactcctgtcaagtccgcatcaacacgaccatcctgtggcaccagggctgcgagaccgaggtcaacatcaccttctgcgagggctcctgccccggagcgtccaagtactcagcagaggcccaggccatgcagcaccagtgcacctgctgccaggagaggcgggtccacgaggagacggtgcccttgcactgtcctaacggctcagccatcctgcacacctacacccacgtggatgagtgtggctgcacgcccttctgtgtccctgcgcccatggctcccccacacacccgtggcttcccggcccaggaggccactgctgtctgagaacgttctgcctccatccccatgctctgtccacctggagccaggatgtgcattgtctgatcatgaaaaccttgggcctcctctgcggagccccccggcctgtgtgtggcaccccgcgctccgtgctcctgctgcccaccccgtgggtgaaaccggccccagaagggtgaggggccagcaggacccctttcgggagggcgccactcaggagtcctaccctgggagagcctgtggcccaccttggccttgcccctccctgatgtcactgggacgccctggaacaaactaagcatgtgcgggcctatgtgtccctgccacggccggagcgcccgcgcagcacggattccagctggccacgtccggccgctggggcagacaggctggtccaggcaaggccagctgctgccaggaagctgcgacaggcaaggcggccgcctgtccatgcctgctgcagggtaactcagggctgaggtcgcaacggccaggtcagagaggggtcagcatcccaaagccccctctgctcaacccagcccagttttgcaaataaaccctgagcattgagtacgtt

SEQ ID NO: 128584 - DNA, 16584 bp, Artificial Sequence
  derived and/or modified sequence
gcccccaggatgggtgccccgagcgcgtgccggacgctggtgttggctctggcggccatgctcgtggtgccgcaggcaggtaagagccccccactccgccccctctcgagaaactcaggggctggcttggatgggggtgccccgacgtcctcgcccacccggcgcgtgagctttgttccacccgtcactgtcttccccagcctgagccgtaagcagatgctgcccctgccagccgggaagggggtgtttgccagtcccaaaggtgggggcccagatctaggggtgcagctgccaccagccctgaacccggcgcacaatgggcgggtgtgcagcacctggggtgacttccactacaagaccttcgacggcgacgtcttccgcttccctggcctttgcaactacgtgttctctgagcactgccgcgccgcctacgaggacttcaacgtccagctacgccgaggcctagtgggctccaggcctgtggtcacccgtgttgtcatcaaggcccaggggctggtgctggaggcgtccaacggctccgtcctcatcaatgggcagcgggaggagctgccttacagccgcactggcctcctggtggagcagagcggggactacatcaaggtcagcatccggctggtgctgacattcctgtggaacggagaggacagtgccctgctggagctggatcccaaatacgccaaccagacctgtggcctgtgtggggacttcaacggcctcccggccttcaacgagttctatgcccacaacgccaggctgaccccgctccagtttgggaacctgcagaagttggatgggcccacggagcagtgcccggacccgctgcccttgccggccggcaactgcacggacgaggagggcatctgccaccgcaccctgctggggccggcctttgcggagtgccacgcactggtggacagcactgcgtacctggccgcctgcgcccaggacctgtgccgctgccccacctgcccgtgtgccacctttgtggaatactcacgccagtgcgcccacgcggggggccagccgcggaactggaggtgccctgagctctgcccccggacctgccccctcaacatgcagcaccaggagtgtggctcaccctgcacggacacctgctccaacccccagcgcgcgcagctctgcgaggaccactgtgtggacggctgcttctgccccccaggcaggtcttgcacggtgctggatgacatcacgcactctggctgcctgcccctcgggcagtgcccctgcacccacggcggccgcacctacagcccgggcacctccttcaacaccacctgcagctcctgcacctgctccggggggctatggcagtgccaggacctgccgtgccctggcacctgctctgtgcagggcggggcccacatctccacctatgatgagaaactctacgacctgcatggtgactgcagctacgttctgtccaagaaatgtgccgacagcagcttcaccgtgctggctgagctgcggaagtgcggcctgacggacaacgagaactgcctgaaagcggtgacgctcagcctggacggcggggacacggccatccgggtccaagcggacggcggcgtgttcctcaactccatctacacgcagctgcccctgtcggcagccaacatcaccctgttcacaccctcgagcttcttcatcgtggtgcagacaggcctggggctgcagctgctggtgcagctggtgccactcatgcaggtgtttgtcaggctggaccccgcccaccagggccagatgtgcggcctgtgtgggaacttcaaccagaaccaggctgacgacttcacggccctcagcggggtggtggaggccacgggcgcagccttcgccaacacctggaaggcccaggctgcctgtgccaatgccaggaacagctttgaggacccctgctccctcagtgtggagaatgagaactacgcccggcactggtgctcgcgcctgaccgatcccaacagtgccttctcgcgctgccactccatcatcaaccccaagcccttccactcgaactgcatgtttgacacctgcaactgtgagcggagcgaggactgcctgtgcgccgcgctgtcctcctatgtgcacgcctgtgccgccaagggcgtacagctcagcgactggagggacggcgtctgcaccaagtacatgcagaactgccccaagtcccagcgctacgcctacgtggtggatgcctgccagcccacttgccgcggcctgagtgaggccgacgtcacctgcagcgtttccttcgtgcctgtggacggctgcacctgccccgcgggcaccttcctcaatgacgcgggcgcctgtgtgcccgcccaggagtgcccctgctacgctcacggcaccgtgctggctcctggagaggtggtgcacgacgagggcgccgtgtgttcatgtacgggtgggaagctaagctgcctgggagcctctctgcagaaaagcacagggtgtgcagcccccatggtgtacctggactgcagcaacagctcggcgggcacccctggggccgagtgcctccggagctgccacacgctggacgtgggctgtttcagcacacactgcgtgtccggctgtgtctgtcccccggggctggtgtcggatgggagtgggggctgcattgccgaggaggactgcccctgtgtgcacaacgaggccacctacaagcctggagagaccatcagggtcgactgcaacacctgcacctgcaggaaccggaggtgggagtgcagccaccggctctgcctgggcacctgcgtggcctacggggatggccacttcatcacctttgatggcgatcgctacagctttgaaggcagctgcgagtacatcttggcccaggactactgtggggacaacaccacccacgggaccttccgcatcgtcaccgagaacatcccctgtgggaccaccggcaccacctgctccaaggccatcaagctcttcgtggaggtgagaacggccccagctgtgagcacccccgaccctgcagccaacgagccggcccccagggaagcttcggtcggcttccggcagcgtctgcctcccctgcagagctacgagctgatcctccaagaggggacctttaaggcggtggcgagagggccgggtggggacccaccctacaagatacgctacatggggatcttcctggtcatcgagacccacgggatggccgtgtcctgggaccggaagaccagcgtgttcatccgactgcaccaggactacaagggcagggtctgcggcctgtgcgggaacttcgacgacaatgccatcaatgactttgccacgcgtagccggtccgtggtgggggacgcactggagtttgggaacagctggaagctctccccctcctgcccggacgccctggcacccaaggacccctgcacggccaaccccttccgcaagtcctgggcccagaagcagtgcagcatcctccacggccccaccttcgccgcctgccgctcccaggttgactccaccaagtactacgaggcctgcgtgaacgacgcgtgtgcctgcgactcgggtggcgactgcgagtgtttctgcacggctgtggctgcctacgcccaggcctgccacgacgcgggcctgtgtgtgtcctggcggactccggacacctgccccttgttctgtgacttctacaacccacatgggggctgtgagtggcactaccagccctgcggggcaccctgcctaaaaacctgccggaaccccagtgggcactgcctggtggacctgcctggcctggaaggctgctacccgaagtgcccacccagccagcccttcttcaatgaggaccagatgaagtgcgtggcccagtgtggctgctacgacaaggacggaaactactatgacgtcggtgcaagggtccccacagcggagaactgccagagctgtaactgcacacccagtggcatccagtgcgctcacagccttgaggcctgcacctgcacctatgaggacaggacctacagctaccaggacgtcatctacaacaccaccgatgggcttggcgcctgcttgatcgccatctgcggaagcaacggcaccatcatcaggaaggctgtggcatgtcctggaactccagccacaacgccattcaccttcaccaccgcctgggtcccccactccacgacaagcccggccctcccggtctccaccgtgtgtgtccgcgaggtctgccgctggtccagctggtacaatgggcaccgcccagagcccggcctgggaggcggagactttgagacgtttgaaaacctgaggcagagagggtaccaggtatgccctgtgctggctgacatcgagtgccgggcggcgcagcttcccgacatgccgctggaggagctgggccagcaggtggactgtgaccgcatgcgggggctgatgtgcgccaacagccaacagagtcccccgctctgtcacgactacgagctgcgggttctctgctgcgaatacgtgccctgtggcccctccccggccccaggcaccagccctcagccctccctcagtgccagcacggagcctgctgtgcctaccccaacccagaccacagcaaccgaaaagaccaccctatgggtgaccccgagcatccggtcgacggcggccctcacctcgcagactgggtccagctcaggccccgtgacggtcaccccctcggccccaggtaccaccacctgccagccccggtgtcagtggacagagtggtttgatgaggactaccccaagtctgaacaacttggaggggacgttgagtcctacgataagatcagggccgctggagggcacttatgccagcagcctaaggacatagagtgccaggccgagagcttccccaactggaccctggcacaggtggggcagaaggtgcactgtgacgtccacttcggcctggtgtgcaggaactgggagcaggagggcgtcttcaagatgtgctacaactacaggatccgggtcctctgctgcagtgacgaccactgcaggggacgtgccacaaccccgccaccgaccacagagctggagacggccaccaccaccaccacccaggccctgttctcaacgccgcagcctacgagtagcccggggctgaccagggctcccccggccagcaccacagcagtccccaccctctcagaaggactgacatcccccagatacacaagcacccttggtacagccaccacgggaggccccacgacgcctgcaggctccacagaacccactgtcccaggggtggccacatccacccttccaacacgctcagcccttccagggacgacggggagcttgggcacatggcgcccctcacagccacccacgctggccccaacaacaatggcaacctccagagctcgcccgacaggcacagccagcaccgcttccaaagagccgctgaccacgagcctggcgccaacactcacgagcgagctgtccacctctcaggccgagaccagcacgcccaggacagagacgacaatgagccccttgactaacaccaccaccagccagggcacgacccgctgtcaaccgaagtgtgagtggacagagtggtttgacgtggacttcccaacctcaggggttgcaggcggggacatggaaacttttgaaaacatcagggctgctgggggcaagatgtgctgggcaccaaagagcatagagtgccgggcggagaactaccccgaggtaagcatcgaccaggtcgggcaggtgctgacctgcagcctggagacggggctgacctgcaagaacgaagaccagacaggcaggttcaacatgtgcttcaactacaacgtgcgtgtgctttgctgtgacgactacagccactgccccagtaccccagccaccagctccacggccacgccctcctcaactccggggacgacctggatcctcacaaagccgaccacaacagccactacgactgcgtccactggatccacggccaccccgacctccaccctgagaacagctccccctcccaaagtgctgaccaccacggccaccacacccacagtcaccagctccaaagccactccctcctccagtccagggactgcaaccgcccttccagcactgagaagcacagccaccacacccacagctaccagcgttacacccatcccctcttcctccctgggcaccacctggacccgcctatcacagaccaccacacccacggccaccatgtccacagccacaccctcctccactccagagactgcccacacctccacagtgcttaccgccacggccaccacaactggggccaccggctctgtggccaccccctcctccaccccaggaacagctcacactaccaaagtgccaactaccacaaccacgggcttcacagccaccccctcctccagcccagggacggcactcacgcctccagtgtggatcagcacaaccaccacacccacaaccagaggctccacggtgaccccctcctccatcccggggaccacccacaccgccacagtgctgaccaccaccaccacaactgtggccactggttctatggcaacaccctcctctagcacacagaccagtgggaccacccacacacccccagtgccgaacaccatggccaccacacacgggcgatccctgccccccagcagtccccacacggtgcgcacagcctggacttcggccacctcgggcatcttgggcaccacccacatcacagagccttccacggtgacttcccacaccctagcagcaaccaccggtaccacccagcactcgactccagccctttccagccctcaccctagcagcagaaccaccgagtcacccccttctccagggacgaccaccccgggccacaccacggccacctccaggaccacagccacggccacacccagcaagacccgcacctcgaccctgctgcccagcagccccacatcggcccccataaccacggtggtgaccatgggctgtgagccccagtgtgcctggtcagagtggctggactacagctaccccatgccggggccctctggcggggactttgacacctactccaacatccgtgcggccggaggggccgtctgtgagcagcccctgggcctcgagtgccgtgcccaggcccagcctggtgtccccctgcgggagttgggccaggtcgtggaatgcagcctggactttggcctggtctgcaggaaccgtgagcaggtggggaagttcaagatgtgcttcaactatgaaatccgtgtgttctgctgcaactacggccactgccccagcaccccggccaccagctctacggccatgccctcctccactccggggacgacctggatcctcacagagctgaccacaacagccactacgactgagtccactggatccacggccaccccgtcctccaccccagggaccacctggatcctcacagagccgagcactacagccaccgtgacggtgcccaccggatccacggccaccgcctcctccacccaggcaactgctggcaccccacatgtgagcaccacggccacgacacccacagtcaccagctccaaagccactcccttctccagtccagggactgcaaccgcccttccagcactgagaagcacagccaccacacccacagctaccagctttacagccatcccctcctcctccctgggcaccacctggacccgcctatcacagaccaccacacccacggccaccatgtccacagccacaccctcctccactccagagactgtccacacctccacagtgcttaccaccacggccaccacaaccggggccaccggctctgtggccaccccctcctccaccccaggaacagctcacactaccaaagtgctgactaccacaaccacgggcttcacagccaccccctcctccagcccagggacggcacgcacgcttccagtgtggatcagcacaaccaccacacccacaaccagaggttccacggtgaccccctcctccatcccggggaccacccacacccccacagtgctgaccaccaccaccacaactgtggccactggttctatggcaacaccctcctctagcacacagaccagtgggaccacccacacacccccagtgccgaacaccacggccaccacacacgggcgatccctgtcccccagcagtccccacacggtgcgcacagcctggacttcggccacctcaggcaccttgggcaccacccacatcacagagccttccacggggacttcccacaccccagcagcaaccaccggtaccacccagcactcgactccagccctgtccagccctcaccctagcagcaggaccaccgagtcacccccttctccagggacgaccaccccgggccacaccagggccacctccaggaccacggccacggccacacccagcaagacccgcacctcgaccctgctgcccagcagccccacatcggccccaataaccacggtggtgaccatgggctgtgagccccagtgtgcctggtcagagtggctggactacagctaccccatgccggggccctctggcggggactttgacacctactccaacatccgtgcggccggaggggccgtctgtgagcagcccctgggcctcgagtgccgtgcccaggcccagcctggtgtccccctgcgggagttgggccaggtcgtggaatgcagcctggactttggcctggtctgcaggaaccgtgagcaggtggggaagttcaagatgtgcttcaactatgaaatccgtgtgttctgctgcaactacggccactgccccagcaccccggccaccagctctacggccacgccctcctccactccagggacgacctggatcctcacagagcagaccacagcagccactacgaccgcaaccactggatccacggccatcccgtcctccaccccgggaacagctccccctcccaaagtgctgaccagcacggccaccacacccacagccaccagttccaaagccacttcctcctccagtccaaggactgcaaccacccttccagtgctgacaagcacagccaccaaatccacagctaccagctttacacccatcccctccttcacccttgggaccaccgggaccctcccagaacagaccaccacacccatggccaccatgtccacaatccacccctcctccactccggagaccacccacacctccacagtgctgaccacgaaggccaccacgacaagggccaccagttccatgtccaccccctcctccactccggggacgacctggatcctcacagagctgaccacagcagccactacaactgcagccactggccccacggccaccccgtcctccaccccagggaccacctggatcctcacagagcccagcactacagccaccgtgacggtgcccaccggatccacggccaccgcctcctccacccgggcaactgctggcaccctcaaagtgctgaccagcacggccaccacacccacagtcatcagctccagagccactccctcctccagtccagggactgcaaccgcccttccagcactgagaagcacagccaccacacccacagctaccagcgttacagccatcccctcttcctccctgggcaccgcctggacccgcctatcacagaccaccacacccacggccaccatgtccacagccacaccctcctctactccagagactgtccacacctccacagtgcttaccaccacgaccaccacaaccagggccaccggctctgtggccaccccctcctccaccccaggaacagctcacactaccaaagtgccgactaccacaaccacgggcttcacagccaccccctcctccagcccagggacggcactcacgcctccagtgtggatcagcacaaccaccacacccacaaccagaggctccacggtgaccccctcctccatcccggggaccacccacaccgccacagtgctgaccaccaccaccacaactgtggccactggttctatggcaacaccctcctctagcacacagaccagtgggaccacccacacacccccagtgccgaacaccacggccaccacacacgggcggtccctgccccccagcagtccccacacggtgcgcacagcctggacttcggccacctcgggcatcttgggcaccacccacatcacagagccttccacggtgacttcccacaccccagcagcaaccaccagtaccacccagcactcgactccagccctgtccagccctcaccctagcagcaggaccaccgagtcacccccttctccagggacgaccaccccgggccacaccaggggcacctccaggaccacagccacagccacacccagcaagacccgcacctcgaccctgctgcccagcagccccacatcggcccccataaccacggtggtgaccacgggctgtgagccccagtgtgcctggtcagagtggctggactacagctaccccatgccggggccctctggcggggactttgacacctactccaacatccgtgcggccggaggggcagtctgtgagcagcccctgggcctcgagtgccgtgcccaggcccagcctggtgtccccctgcgggagttgggccaggtcgtggaatgcagcctggactttggcctggtctgcaggaaccgtgagcaggtggggaagttcaagatgtgcttcaactatgaaatccgtgtgttctgctgcaactacggccactgccccagcaccccggccaccagctctacggccacgccctcctcaactccggggacgacctggatcctcacaaagctgaccacaacagccactacgactgagtccactggatccacggccaccccgtcctccaccccagggaccacctggatcctcacagagccgagcactacagccaccgtgacggtgcccaccggatccacggccaccgcctcctccacccaggcaactgctggcaccccacatgtgagcaccacggccacgacacccacagtcaccagctccaaagccactcccttctccagtccagggactgcaaccgcccttccagcactgagaagcacagccaccacacccacagctaccagctttacagccatcccctcctcctccctgggcaccacctggacccgcctatcacagaccaccacacccacggccaccatgtccacagccacaccctcctccactccagagactgcccacacctccacagtgcttaccaccacggccaccacaaccagggccaccggctctgtggccaccccctcttccaccccaggaacagctcacactaccaaagtgccgactaccacaaccacgggcttcacagtcaccccctcctccagcccagggacggcacgcacgcctccagtgtggatcagcacaaccaccacacccacaaccagtggctccacggtgaccccctcctccgtcccggggaccacccacacccccacagtgctgaccaccaccaccacaactgtggccactggttctatggcaacaccctcctctagcacacagaccagtgggaccacccacacacccccagtgccgaacaccacggccaccacacacgggcgatccctgtcccccagcagtccccacacggtgcgcacagcctggacttcggccacctcaggcaccttgggcaccacccacatcacagagccttccacggggacttcccacaccccagcagcaaccaccggtaccacccagcactcgactccagccctgtccagccctcaccctagcagcaggaccaccgagtcacccccttccccagggacgaccaccccgggccacaccacggccacctccaggaccacggccacggccacacccagcaagacccgcacctcgaccctgctgcccagcagccccacatcggcccccataaccacggtggtgaccacgggctgtgagccccagtgtgcctggtcagagtggctggactacagctaccccatgccggggccctctggcggggactttgacacctactccaacatccgtgcggccggaggggccgtctgtgagcagcccctgggcctcgagtgccgtgcccaggcccagcctggtgtccccctgggggagttgggccaggtcgtggaatgcagcctggactttggcctggtctgcaggaaccgtgagcaggtggggaagttcaagatgtgcttcaactatgaaatccgtgtgttctgctgcaactacggccactgccccagcaccccggccaccagctctacggccatgccctcctccactccggggacgacctggatcctcacagagctgaccacaacagccactacgactgcatccactggatccacggccaccccgtcctccaccccgggaacagctccccctcccaaagtgctgaccagcccggccaccacacccacagccaccagttccaaagccacttcctcctccagtccaaggactgcaaccacccttccagtgctgacaagcacagccaccaaatccacagctaccagcgttacacccatcccctcctccacccttgggaccaccgggaccctcccagaacagaccaccacacccgtggccaccatgtccacaatccacccctcctccactccggagaccacccacacctccacagtgctgaccacgaaggccaccacgacaagggccaccagttccacgtccaccccctcctccactccggggacgacctggatcctcacagagctgaccacagcagccactacaactgcagccactggccccacggccaccccgtcctccaccccagggaccacctggatcctcacagagctgaccacaacagccactacgactgcgtccactggatccacggccaccccgtcctccaccccagggaccacctggatcctcacagagccgagcactacagccaccgtgacggtgcccaccggatccacggccaccgcctcctccacccaggcaactgctggcaccccacatgtgagcaccacggccacgacacccacagtcaccagctccaaagccactccctcctccagtccagggactgcaactgcccttccagcactgagaagcacagccaccacacccacagctaccagctttacagccatcccctcctcctccctgggcaccacctggacccgcctatcacagaccaccacacccacggccaccatgtccacagccacaccctcctccactccagagactgtccacacctccacagtgcttaccgccacggccaccacaaccggggccaccggctctgtggccaccccctcctccaccccaggaacagctcacactaccaaagtgccgactaccacaaccacgggcttcacagccaccccctcctccagcccagggacggcactcacgcctccaaccaccacacccatgtccaccatgtccacaatccacacctcctctactccagagaccacccacacctccacagtgctgaccaccacagccaccatgacaagggccaccaattccacggccacaccctcctccactctggggacgacccggatcctcactgagctgaccacaacagccactacaactgcagccactggatccacggccaccctgtcctccaccccagggaccacctggatcctcacagagccgagcactatagccaccgtgatggtgcccaccggttccacggccaccgcctcctccactctgggaacagctcacacccccaaagtggtgaccaccatggccactatgcccacagccactgcctccacggttcccagctcgtccaccgtggggaccacccgcacccctgcagtgctccccagcagcctgccaaccttcagcgtgtccactgtgtcctcctcagtcctcaccaccctgagacccactggcttccccagctcccacttctctactccctgcttctgcagggcatttggacagtttttctcgcccggggaagtcatctacaataagaccgaccgagccggctgccatttctacgcagtgtgcaatcagcactgtgacattgaccgcttccagggcgcctgtcccacctccccaccgccagtgtcctccgccccgctgtcctcgccctcccctgcccctggctgtgacaatgccatccctctccggcaggtgaatgagacctggaccctggagaactgcacggtggccaggtgcgtgggtgacaaccgtgtcgtcctgctggacccaaagcctgtggccaacgtcacctgcgtgaacaagcacctgcccatcaaagtgtcggacccgagccagccctgtgacttccactatgagtgcgagtgtgagtgcgtcggtggccgcgggattaccccgggggcaggcatctgcagcatgtggggcggctcccactattccacctttgacggcacctcttacaccttccggggcaactgcacctatgtcctcatgagagagatccatgcacgctttgggaatctcagcctctacctggacaaccactactgcacggcctctgccactgccgctgccgcccgctgcccccgcgccctcagcatccactacaagtccatggatatcgtcctcactgtcaccatggtgcatgggaaggaggagggcctgatcctgtttgaccaaattccggtgagcagcggtttcagcaagaacggcgtgcttgtgtctgtgctggggaccaccaccatgcgtgtggacattcctgccctgggcgtgagcgtcaccttcaatggccaagtcttccaggcccggctgccctacagcctcttccacaacaacaccgagggccagtgcggcacctgcaccaacaaccagagggacgactgtctccagcgggacggaaccactgccgccagttgcaaggacatggccaagacgtggctggtccccgacagcagaaaggatggctgctgggccccgactggcacaccccccactgccagccccgcagccccggtgtctagcacacccacccccaccccatgcccaccacagccgctctgtgatctgatgctgagccaggtctttgctgagtgccacaaccttgtgcccccgggcccattcttcaacgcctgcatcagcgaccactgcaggggccgccttgaggtgccctgccagagcctggaggcttacgcagagctctgccgcgcccggggagtgtgcagtgactggcgaggtgcaaccggtggcctgtgcgacctcacctgcccacccaccaaagtgtacaagccatgcggccccatacagcctgccacctgcaactctaggaaccagagcccacagctggaggggatggcggagggctgcttctgccctgaggaccagatcctcttcaacgcacacatgggcatctgcgtgcaggcctgcccctgcgtgggacccgatgggtttcctaaatttcccggggagcggtgggtcagcaactgccagtcctgcgtgtgtgacgagggttcagtgtcggtgcagtgcaagcccctgccctgtgacgcccagggtcagcccccgccgtgcaaccgtcccggcttcgtaaccgtgaccaggccccgggccgagaacccctgctgccccgagacggtgtgcgtgtgcaacacaaccacctgcccccagagcctgcctgtgtgcccgccagggcaggagtccatctgcacccaggaggagggcgactgctgtcccaccttccgctgcagacctcagctgtgttcgtacaatggcaccttctacggggttggtgcaaccttcccaggcgcccttccctgccacatgtgtacctgcctctctggggacacccaggacccaacggtgcaatgtcaggaggatgcctgcaacaatactacctgtccccagggctttgagtacaagagagtggccgggcagtgctgtggggagtgcgtccagaccgcctgcctcacgcccgatggccagccagtccagctgaatgaaacctgggtcaacagccatgtggacaactgcaccgtgtacctctgtgaggctgagggtggagtccatttgctgaccccacagcctgcatcctgcccagatgtgtccagctgcagggggagcctcaggaaaaccggctgctgctactcctgtgaggaggactcctgtcaagtccgcatcaacacgaccatcctgtggcaccagggctgcgagaccgaggtcaacatcaccttctgcgagggctcctgccccggagcgtccaagtactcagcagaggcccaggccatgcagcaccagtgcacctgctgccaggagaggcgggtccacgaggagacggtgcccttgcactgtcctaacggctcagccatcctgcacacctacacccacgctgtccaggtcctctgtgggctgcttgcctggggcctgcaggctggaggacacatccggggggcagtccaggacccccagcagccactgaaggaccaggaagcctctgggaaggccaggcaggggggtggctacaggcagaccgtggcctggggagacaaaagcaatgctcgtgcctggctgcagaagcctgtggtgtgggtgcagagcggggccttccccacaccggggcctgcctctgccctgtgcccttgg

SEQ ID NO: 128585 - DNA, 17924 bp, Artificial Sequence
  derived and/or modified sequence
acccggcccggctccctccctgcccgtccccgtccccccacccgtgccagcccccaggatgggtgccccgagcgcgtgccggacgctggtgttggctctggcggccatgctcgtggtgccgcaggcagagacccagggccctgtggagccgagctgggagaatgcagggcacaccatggatggcggtgccccgacgtcctcgcccacccggcgcgtgagctttgttccacccgtcactgtcttccccagcctgagccccctgaacccggcgcacaatgggcgggtgtgcagcacctggggtgacttccactacaagaccttcgacggcgacgtcttccgcttccctggcctttgcaactacgtgttctctgagcactgccgcgccgcctacgaggacttcaacgtccagctacgccgaggcctagtgggctccaggcctgtggtcacccgtgttgtcatcaaggcccaggggctggtgctggaggcgtccaacggctccgtcctcatcaatgggcagcgggaggagctgccttacagccgcactggcctcctggtggagcagagcggggactacatcaaggtcagcatccggctggtgctgacattcctgtggaacggagaggacagtgccctgctggagctggatcccaaatacgccaaccagacctgtggcctgtgtggggacttcaacggcctcccggccttcaacgagttctatgcccacaacgccaggctgaccccgctccagtttgggaacctgcagaagttggatgggcccacggagcagtgcccggacccgctgcccttgccggccggcaactgcacggacgaggagggcatctgccaccgcaccctgctggggccggcctttgcggagtgccacgcactggtggacagcactgcgtacctggccgcctgcgcccaggacctgtgccgctgccccacctgcccgtgtgccacctttgtggaatactcacgccagtgcgcccacgcggggggccagccgcggaactggaggtgccctgagctctgcccccggacctgccccctcaacatgcagcaccaggagtgtggctcaccctgcacggacacctgctccaacccccagcgcgcgcagctctgcgaggaccactgtgtggacggctgcttctgccccccaggcaggtcttgcacggtgctggatgacatcacgcactctggctgcctgcccctcgggcagtgcccctgcacccacggcggccgcacctacagcccgggcacctccttcaacaccacctgcagctcctgcacctgctccggggggctatggcagtgccaggacctgccgtgccctggcacctgctctgtgcagggcggggcccacatctccacctatgatgagaaactctacgacctgcatggtgactgcagctacgttctgtccaagaaatgtgccgacagcagcttcaccgtgctggctgagctgcggaagtgcggcctgacggacaacgagaactgcctgaaagcggtgacgctcagcctggacggcggggacacggccatccgggtccaagcggacggcggcgtgttcctcaactccatctacacgcagctgcccctgtcggcagccaacatcaccctgttcacaccctcgagcttcttcatcgtggtgcagacaggcctggggctgcagctgctggtgcagctggtgccactcatgcaggtgtttgtcaggctggaccccgcccaccagggccagatgtgcggcctgtgtgggaacttcaaccagaaccaggctgacgacttcacggccctcagcggggtggtggaggccacgggcgcagccttcgccaacacctggaaggcccaggctgcctgtgccaatgccaggaacagctttgaggacccctgctccctcagtgtggagaatgagaactacgcccggcactggtgctcgcgcctgaccgatcccaacagtgccttctcgcgctgccactccatcatcaaccccaagcccttccactcgaactgcatgtttgacacctgcaactgtgagcggagcgaggactgcctgtgcgccgcgctgtcctcctatgtgcacgcctgtgccgccaagggcgtacagctcagcgactggagggacggcgtctgcaccaagtacatgcagaactgccccaagtcccagcgctacgcctacgtggtggatgcctgccagcccacttgccgcggcctgagtgaggccgacgtcacctgcagcgtttccttcgtgcctgtggacggctgcacctgccccgcgggcaccttcctcaatgacgcgggcgcctgtgtgcccgcccaggagtgcccctgctacgctcacggcaccgtgctggctcctggagaggtggtgcacgacgagggcgccgtgtgttcatgtacgggtgggaagctaagctgcctgggagcctctctgcagaaaagcacagggtgtgcagcccccatggtgtacctggactgcagcaacagctcggcgggcacccctggggccgagtgcctccggagctgccacacgctggacgtgggctgtttcagcacacactgcgtgtccggctgtgtctgtcccccggggctggtgtcggatgggagtgggggctgcattgccgaggaggactgcccctgtgtgcacaacgaggccacctacaagcctggagagaccatcagggtcgactgcaacacctgcacctgcaggaaccggaggtgggagtgcagccaccggctctgcctgggcacctgcgtggcctacggggatggccacttcatcacctttgatggcgatcgctacagctttgaaggcagctgcgagtacatcttggcccaggactactgtggggacaacaccacccacgggaccttccgcatcgtcaccgagaacatcccctgtgggaccaccggcaccacctgctccaaggccatcaagctcttcgtggagagctacgagctgatcctccaagaggggacctttaaggcggtggcgagagggccgggtggggacccaccctacaagatacgctacatggggatcttcctggtcatcgagacccacgggatggccgtgtcctgggaccggaagaccagcgtgttcatccgactgcaccaggactacaagggcagggtctgcggcctgtgcgggaacttcgacgacaatgccatcaatgactttgccacgcgtagccggtccgtggtgggggacgcactggagtttgggaacagctggaagctctccccctcctgcccggacgccctggcacccaaggacccctgcacggccaaccccttccgcaagtcctgggcccagaagcagtgcagcatcctccacggccccaccttcgccgcctgccgctcccaggttgactccaccaagtactacgaggcctgcgtgaacgacgcgtgtgcctgcgactcgggtggcgactgcgagtgtttctgcacggctgtggctgcctacgcccaggcctgccacgacgcgggcctgtgtgtgtcctggcggactccggacacctgccccttgttctgtgacttctacaacccacatgggggctgtgagtggcactaccagccctgcggggcaccctgcctaaaaacctgccggaaccccagtgggcactgcctggtggacctgcctggcctggaaggctgctacccgaagtgcccacccagccagcccttcttcaatgaggaccagatgaagtgcgtggcccagtgtggctgctacgacaaggacggaaactactatgacgtcggtgcaagggtccccacagcggagaactgccagagctgtaactgcacacccagtggcatccagtgcgctcacagccttgaggcctgcacctgcacctatgaggacaggacctacagctaccaggacgtcatctacaacaccaccgatgggcttggcgcctgcttgatcgccatctgcggaagcaacggcaccatcatcaggaaggctgtggcatgtcctggaactccagccacaacgccattcaccttcaccaccgcctgggtcccccactccacgacaagcccggccctcccggtctccaccgtgtgtgtccgcgaggtctgccgctggtccagctggtacaatgggcaccgcccagagcccggcctgggaggcggagactttgagacgtttgaaaacctgaggcagagagggtaccaggtatgccctgtgctggctgacatcgagtgccgggcggcgcagcttcccgacatgccgctggaggagctgggccagcaggtggactgtgaccgcatgcgggggctgatgtgcgccaacagccaacagagtcccccgctctgtcacgactacgagctgcgggttctctgctgcgaatacgtgccctgtggcccctccccggccccaggcaccagccctcagccctccctcagtgccagcacggagcctgctgtgcctaccccaacccagaccacagcaaccgaaaagaccaccctatgggtgaccccgagcatccggtcgacggcggccctcacctcgcagactgggtccagctcaggccccgtgacggtcaccccctcggccccaggtaccaccacctgccagccccggtgtcagtggacagagtggtttgatgaggactaccccaagtctgaacaacttggaggggacgttgagtcctacgataagatcagggccgctggagggcacttatgccagcagcctaaggacatagagtgccaggccgagagcttccccaactggaccctggcacaggtggggcagaaggtgcactgtgacgtccacttcggcctggtgtgcaggaactgggagcaggagggcgtcttcaagatgtgctacaactacaggatccgggtcctctgctgcagtgacgaccactgcaggggacgtgccacaaccccgccaccgaccacagagctggagacggccaccaccaccaccacccaggccctgttctcaacgccgcagcctacgagtagcccggggctgaccagggctcccccggccagcaccacagcagtccccaccctctcagaaggactgacatcccccagatacacaagcacccttggtacagccaccacgggaggccccacgacgcctgcaggctccacagaacccactgtcccaggggtggccacatccacccttccaacacgctcagcccttccagggacgacggggagcttgggcacatggcgcccctcacagccacccacgctggccccaacaacaatggcaacctccagagctcgcccgacaggcacagccagcaccgcttccaaagagccgctgaccacgagcctggcgccaacactcacgagcgagctgtccacctctcaggccgagaccagcacgcccaggacagagacgacaatgagccccttgactaacaccaccaccagccagggcacgacccgctgtcaaccgaagtgtgagtggacagagtggtttgacgtggacttcccaacctcaggggttgcaggcggggacatggaaacttttgaaaacatcagggctgctgggggcaagatgtgctgggcaccaaagagcatagagtgccgggcggagaactaccccgaggtaagcatcgaccaggtcgggcaggtgctgacctgcagcctggagacggggctgacctgcaagaacgaagaccagacaggcaggttcaacatgtgcttcaactacaacgtgcgtgtgctttgctgtgacgactacagccactgccccagtaccccagccaccagctccacggccacgccctcctcaactccggggacgacctggatcctcacaaagccgaccacaacagccactacgactgcgtccactggatccacggccaccccgacctccaccctgagaacagctccccctcccaaagtgctgaccaccacggccaccacacccacagtcaccagctccaaagccactccctcctccagtccagggactgcaaccgcccttccagcactgagaagcacagccaccacacccacagctaccagcgttacacccatcccctcttcctccctgggcaccacctggacccgcctatcacagaccaccacacccacggccaccatgtccacagccacaccctcctccactccagagactgcccacacctccacagtgcttaccgccacggccaccacaactggggccaccggctctgtggccaccccctcctccaccccaggaacagctcacactaccaaagtgccaactaccacaaccacgggcttcacagccaccccctcctccagcccagggacggcactcacgcctccagtgtggatcagcacaaccaccacacccacaaccagaggctccacggtgaccccctcctccatcccggggaccacccacaccgccacagtgctgaccaccaccaccacaactgtggccactggttctatggcaacaccctcctctagcacacagaccagtggtactcccccatcactgaccaccacggccactacgatcacggccaccggctccaccaccaacccctcctcaactcctgggacaactcccatccccccagtgctgaccaccaccgccaccacacctgcagccaccagcaacacagtgactccctcctctgccctagggaccacccacacacccccagtgccgaacaccatggccaccacacacgggcgatccctgccccccagcagtccccacacggtgcgcacagcctggacttcggccacctcgggcatcttgggcaccacccacatcacagagccttccacggtgacttcccacaccctagcagcaaccaccggtaccacccagcactcgactccagccctttccagccctcaccctagcagcagaaccaccgagtcacccccttctccagggacgaccaccccgggccacaccacggccacctccaggaccacagccacggccacacccagcaagacccgcacctcgaccctgctgcccagcagccccacatcggcccccataaccacggtggtgaccatgggctgtgagccccagtgtgcctggtcagagtggctggactacagctaccccatgccggggccctctggcggggactttgacacctactccaacatccgtgcggccggaggggccgtctgtgagcagcccctgggcctcgagtgccgtgcccaggcccagcctggtgtccccctgcgggagttgggccaggtcgtggaatgcagcctggactttggcctggtctgcaggaaccgtgagcaggtggggaagttcaagatgtgcttcaactatgaaatccgtgtgttctgctgcaactacggccactgccccagcaccccggccaccagctctacggccatgccctcctccactccggggacgacctggatcctcacagagctgaccacaacagccactacgactgagtccactggatccacggccaccccgtcctccaccccagggaccacctggatcctcacagagccgagcactacagccaccgtgacggtgcccaccggatccacggccaccgcctcctccacccaggcaactgctggcaccccacatgtgagcaccacggccacgacacccacagtcaccagctccaaagccactcccttctccagtccagggactgcaaccgcccttccagcactgagaagcacagccaccacacccacagctaccagctttacagccatcccctcctcctccctgggcaccacctggacccgcctatcacagaccaccacacccacggccaccatgtccacagccacaccctcctccactccagagactgtccacacctccacagtgcttaccaccacggccaccacaaccggggccaccggctctgtggccaccccctcctccaccccaggaacagctcacactaccaaagtgctgactaccacaaccacgggcttcacagccaccccctcctccagcccagggacggcacgcacgcttccagtgtggatcagcacaaccaccacacccacaaccagaggttccacggtgaccccctcctccatcccggggaccacccacacccccacagtgctgaccaccaccaccacaactgtggccactggttctatggcaacaccctcctctagcacacagaccagtggtactcccccatcactgaccaccacggccactacgatcacggccaccggctccaccaccaacccctcctcaactccagggacaacacctatccccccagtgctgaccaccaccgccaccacacctgcagccaccagcagcacagtgactccctcctctgccctagggaccacccacacacccccagtgccgaacaccacggccaccacacacgggcgatccctgtcccccagcagtccccacacggtgcgcacagcctggacttcggccacctcaggcaccttgggcaccacccacatcacagagccttccacggggacttcccacaccccagcagcaaccaccggtaccacccagcactcgactccagccctgtccagccctcaccctagcagcaggaccaccgagtcacccccttctccagggacgaccaccccgggccacaccagggccacctccaggaccacggccacggccacacccagcaagacccgcacctcgaccctgctgcccagcagccccacatcggccccaataaccacggtggtgaccatgggctgtgagccccagtgtgcctggtcagagtggctggactacagctaccccatgccggggccctctggcggggactttgacacctactccaacatccgtgcggccggaggggccgtctgtgagcagcccctgggcctcgagtgccgtgcccaggcccagcctggtgtccccctgcgggagttgggccaggtcgtggaatgcagcctggactttggcctggtctgcaggaaccgtgagcaggtggggaagttcaagatgtgcttcaactatgaaatccgtgtgttctgctgcaactacggccactgccccagcaccccggccaccagctctacggccacgccctcctccactccagggacgacctggatcctcacagagcagaccacagcagccactacgaccgcaaccactggatccacggccatcccgtcctccaccccgggaacagctccccctcccaaagtgctgaccagcacggccaccacacccacagccaccagttccaaagccacttcctcctccagtccaaggactgcaaccacccttccagtgctgacaagcacagccaccaaatccacagctaccagctttacacccatcccctccttcacccttgggaccaccgggaccctcccagaacagaccaccacacccatggccaccatgtccacaatccacccctcctccactccggagaccacccacacctccacagtgctgaccacgaaggccaccacgacaagggccaccagttccatgtccaccccctcctccactccggggacgacctggatcctcacagagctgaccacagcagccactacaactgcagccactggccccacggccaccccgtcctccaccccagggaccacctggatcctcacagagcccagcactacagccaccgtgacggtgcccaccggatccacggccaccgcctcctccacccgggcaactgctggcaccctcaaagtgctgaccagcacggccaccacacccacagtcatcagctccagagccactccctcctccagtccagggactgcaaccgcccttccagcactgagaagcacagccaccacacccacagctaccagcgttacagccatcccctcttcctccctgggcaccgcctggacccgcctatcacagaccaccacacccacggccaccatgtccacagccacaccctcctctactccagagactgtccacacctccacagtgcttaccaccacgaccaccacaaccagggccaccggctctgtggccaccccctcctccaccccaggaacagctcacactaccaaagtgccgactaccacaaccacgggcttcacagccaccccctcctccagcccagggacggcactcacgcctccagtgtggatcagcacaaccaccacacccacaaccagaggctccacggtgaccccctcctccatcccggggaccacccacaccgccacagtgctgaccaccaccaccacaactgtggccactggttctatggcaacaccctcctctagcacacagaccagtggtactcccccatcactgaccaccacggccactacgatcacagccaccggctccaccaccaacccctcctcaactccagggacaactcccatccccccagtgctgaccaccaccgccaccacacctgcagccaccagcagcacagtgactccctcctctgccctagggaccacccacacacccccagtgccgaacaccacggccaccacacacgggcggtccctgccccccagcagtccccacacggtgcgcacagcctggacttcggccacctcgggcatcttgggcaccacccacatcacagagccttccacggtgacttcccacaccccagcagcaaccaccagtaccacccagcactcgactccagccctgtccagccctcaccctagcagcaggaccaccgagtcacccccttctccagggacgaccaccccgggccacaccaggggcacctccaggaccacagccacagccacacccagcaagacccgcacctcgaccctgctgcccagcagccccacatcggcccccataaccacggtggtgaccacgggctgtgagccccagtgtgcctggtcagagtggctggactacagctaccccatgccggggccctctggcggggactttgacacctactccaacatccgtgcggccggaggggcagtctgtgagcagcccctgggcctcgagtgccgtgcccaggcccagcctggtgtccccctgcgggagttgggccaggtcgtggaatgcagcctggactttggcctggtctgcaggaaccgtgagcaggtggggaagttcaagatgtgcttcaactatgaaatccgtgtgttctgctgcaactacggccactgccccagcaccccggccaccagctctacggccacgccctcctcaactccggggacgacctggatcctcacaaagctgaccacaacagccactacgactgagtccactggatccacggccaccccgtcctccaccccagggaccacctggatcctcacagagccgagcactacagccaccgtgacggtgcccaccggatccacggccaccgcctcctccacccaggcaactgctggcaccccacatgtgagcaccacggccacgacacccacagtcaccagctccaaagccactcccttctccagtccagggactgcaaccgcccttccagcactgagaagcacagccaccacacccacagctaccagctttacagccatcccctcctcctccctgggcaccacctggacccgcctatcacagaccaccacacccacggccaccatgtccacagccacaccctcctccactccagagactgcccacacctccacagtgcttaccaccacggccaccacaaccagggccaccggctctgtggccaccccctcttccaccccaggaacagctcacactaccaaagtgccgactaccacaaccacgggcttcacagtcaccccctcctccagcccagggacggcacgcacgcctccagtgtggatcagcacaaccaccacacccacaaccagtggctccacggtgaccccctcctccgtcccggggaccacccacacccccacagtgctgaccaccaccaccacaactgtggccactggttctatggcaacaccctcctctagcacacagaccagtggtactcccccatcactgatcaccacggccactacgatcacggccaccggctccaccaccaacccctcctcaactccagggacaacacctatccccccagtgctgaccaccaccgccaccacacctgcagccaccagcagcacagtgactccctcctctgccctagggaccacccacacacccccagtgccgaacaccacggccaccacacacgggcgatccctgtcccccagcagtccccacacggtgcgcacagcctggacttcggccacctcaggcaccttgggcaccacccacatcacagagccttccacggggacttcccacaccccagcagcaaccaccggtaccacccagcactcgactccagccctgtccagccctcaccctagcagcaggaccaccgagtcacccccttccccagggacgaccaccccgggccacaccacggccacctccaggaccacggccacggccacacccagcaagacccgcacctcgaccctgctgcccagcagccccacatcggcccccataaccacggtggtgaccacgggctgtgagccccagtgtgcctggtcagagtggctggactacagctaccccatgccggggccctctggcggggactttgacacctactccaacatccgtgcggccggaggggccgtctgtgagcagcccctgggcctcgagtgccgtgcccaggcccagcctggtgtccccctgggggagttgggccaggtcgtggaatgcagcctggactttggcctggtctgcaggaaccgtgagcaggtggggaagttcaagatgtgcttcaactatgaaatccgtgtgttctgctgcaactacggccactgccccagcaccccggccaccagctctacggccatgccctcctccactccggggacgacctggatcctcacagagctgaccacaacagccactacgactgcatccactggatccacggccaccccgtcctccaccccgggaacagctccccctcccaaagtgctgaccagcccggccaccacacccacagccaccagttccaaagccacttcctcctccagtccaaggactgcaaccacccttccagtgctgacaagcacagccaccaaatccacagctaccagcgttacacccatcccctcctccacccttgggaccaccgggaccctcccagaacagaccaccacacccgtggccaccatgtccacaatccacccctcctccactccggagaccacccacacctccacagtgctgaccacgaaggccaccacgacaagggccaccagttccacgtccaccccctcctccactccggggacgacctggatcctcacagagctgaccacagcagccactacaactgcagccactggccccacggccaccccgtcctccaccccagggaccacctggatcctcacagagctgaccacaacagccactacgactgcgtccactggatccacggccaccccgtcctccaccccagggaccacctggatcctcacagagccgagcactacagccaccgtgacggtgcccaccggatccacggccaccgcctcctccacccaggcaactgctggcaccccacatgtgagcaccacggccacgacacccacagtcaccagctccaaagccactccctcctccagtccagggactgcaactgcccttccagcactgagaagcacagccaccacacccacagctaccagctttacagccatcccctcctcctccctgggcaccacctggacccgcctatcacagaccaccacacccacggccaccatgtccacagccacaccctcctccactccagagactgtccacacctccacagtgcttaccgccacggccaccacaaccggggccaccggctctgtggccaccccctcctccaccccaggaacagctcacactaccaaagtgccgactaccacaaccacgggcttcacagccaccccctcctccagcccagggacggcactcacgcctccagtgtggatcagcacaaccaccacacccacaaccaccacacccacaaccagtggctccacggtgaccccctcctccatcccggggaccacccacaccgccagagtgctgaccaccaccaccacaactgtggccactggttctatggcaacaccctcctctagcacacagaccagtggtactcccccatcactgaccaccacggccactacgatcacggccaccggctccaccaccaacccctcctcaactccagggacaacacccatcaccccagtgctgaccagcacggccaccacacccgcagccaccagctccaaagccacttcctcctccagtccaaggactgcaaccacccttccagtgctgacaagcacagccacaaaatccacagctaccagctttacacccatcccctcctccaccctgtggaccacgtggaccgtcccagcacagaccaccacacccatgtccaccatgtccacaatccacacctcctctactccagagaccacccacacctccacagtgctgaccaccacagccaccatgacaagggccaccaattccacggccacaccctcctccactctggggacgacccggatcctcactgagctgaccacaacagccactacaactgcagccactggatccacggccaccctgtcctccaccccagggaccacctggatcctcacagagccgagcactatagccaccgtgatggtgcccaccggttccacggccaccgcctcctccactctgggaacagctcacacccccaaagtggtgaccaccatggccactatgcccacagccactgcctccacggttcccagctcgtccaccgtggggaccacccgcacccctgcagtgctccccagcagcctgccaaccttcagcgtgtccactgtgtcctcctcagtcctcaccaccctgagacccactggcttccccagctcccacttctctactccctgcttctgcagggcatttggacagtttttctcgcccggggaagtcatctacaataagaccgaccgagccggctgccatttctacgcagtgtgcaatcagcactgtgacattgaccgcttccagggcgcctgtcccacctccccaccgccagtgtcctccgccccgctgtcctcgccctcccctgcccctggctgtgacaatgccatccctctccggcaggtgaatgagacctggaccctggagaactgcacggtggccaggtgcgtgggtgacaaccgtgtcgtcctgctggacccaaagcctgtggccaacgtcacctgcgtgaacaagcacctgcccatcaaagtgtcggacccgagccagccctgtgacttccactatgagtgcgagtgcatctgcagcatgtggggcggctcccactattccacctttgacggcacctcttacaccttccggggcaactgcacctatgtcctcatgagagagatccatgcacgctttgggaatctcagcctctacctggacaaccactactgcacggcctctgccactgccgctgccgcccgctgcccccgcgccctcagcatccactacaagtccatggatatcgtcctcactgtcaccatggtgcatgggaaggaggagggcctgatcctgtttgaccaaattccggtgagcagcggtttcagcaagaacggcgtgcttgtgtctgtgctggggaccaccaccatgcgtgtggacattcctgccctgggcgtgagcgtcaccttcaatggccaagtcttccaggcccggctgccctacagcctcttccacaacaacaccgagggccagtgcggcacctgcaccaacaaccagagggacgactgtctccagcgggacggaaccactgccgccagttgcaaggacatggccaagacgtggctggtccccgacagcagaaaggatggctgctgggccccgactggcacaccccccactgccagccccgcagccccggtgtctagcacacccacccccaccccatgcccaccacagccgctctgtgatctgatgctgagccaggtctttgctgagtgccacaaccttgtgcccccgggcccattcttcaacgcctgcatcagcgaccactgcaggggccgccttgaggtgccctgccagagcctggaggcttacgcagagctctgccgcgcccggggagtgtgcagtgactggcgaggtgcaaccggtggcctgtgcgacctcacctgcccacccaccaaagtgtacaagccatgcggccccatacagcctgccacctgcaactctaggaaccagagcccacagctggaggggatggcggagggctgcttctgccctgaggaccagatcctcttcaacgcacacatgggcatctgcgtgcaggcctgcccctgcgtgggacccgatgggtttcctaaatttcccggggagcggtgggtcagcaactgccagtcctgcgtgtgtgacgagggttcagtgtcggtgcagtgcaagcccctgccctgtgacgcccagggtcagcccccgccgtgcaaccgtcccggcttcgtaaccgtgaccaggccccgggccgagaacccctgctgccccgagacggtgtgcgtgtgcaacacaaccacctgcccccagagcctgcctgtgtgcccgccagggcaggagtccatctgcacccaggaggagggcgactgctgtcccaccttccgctgcagacctcagctgtgttcgtacaatggcaccttctacggggttggtgcaaccttcccaggcgcccttccctgccacatgtgtacctgcctctctggggacacccaggacccaacggtgcaatgtcaggaggatgcctgcaacaatactacctgtccccagggctttgagtacaagagagtggccgggcagtgctgtggggagtgcgtccagaccgcctgcctcacgcccgatggccagccagtccagctgaatgaaacctgggtcaacagccatgtggacaactgcaccgtgtacctctgtgaggctgagggtggagtccatttgctgaccccacagcctgcatcctgcccagatgtgtccagctgcagggggagcctcaggaaaaccggctgctgctactcctgtgaggaggactcctgtcaagtccgcatcaacacgaccatcctgtggcaccagggctgcgagaccgaggtcaacatcaccttctgcgagggctcctgccccggagcgtccaagtactcagcagaggcccaggccatgcagcaccagtgcacctgctgccaggagaggcgggtccacgaggagacggtgcccttgcactgtcctaacggctcagccatcctgcacacctacacccacgtggatgagtgtggctgcacgcccttctgtgtccctgcgcccatggctcccccacacacccgtggcttcccggcccaggaggccactgctgtctgagaacgttctgcctccatccccatgctctgtccacctggagccaggatgtgcattgtctgatcatgaaaaccttgggcctcctctgcggagccccccggcctgtgtgtggcaccccgcgctccgtgctcctgctgcccaccccgtgggtgaaaccggccccagaagggtgaggggccagcaggacccctttcgggagggcgccactcaggagtcctaccctgggagagcctgtggcccaccttggccttgcccctccctgatgtcactgggacgccctggaacaaactaagcatgtgcgggcctatgtgtccctgccacggccggagcgcccgcgcagcacggattccagctggccacgtccggccgctggggcagacaggctggtccaggcaaggccagctgctgccaggaagctgcgacaggcaaggcggccgcctgtccatgcctgctgcagggtaactcagggctgaggtcgcaacggccaggtcagagaggggtcagcatcccaaagccccctctgctcaacccagcccagttttgcaaataaaccctgagcattgagtacgtt

SEQ ID NO: 128586 - DNA, 17911 bp, Artificial Sequence
  derived and/or modified sequence
acccggcccggctccctccctgcccgtccccgtccccccacccgtgccagcccccaggatgggtgccccgagcgcgtgccggacgctggtgttggctctggcggccatgctcgtggtgccgcaggcagagacccagggccctgtggagccgagctgggagaatgcagggcacaccatggatggcggtgccccgacgtcctcgcccacccggcgcgtgagctttgttccacccgtcactgtcttccccagcctgagccccctgaacccggcgcacaatgggcgggtgtgcagcacctggggtgacttccactacaagaccttcgacggcgacgtcttccgcttccctggcctttgcaactacgtgttctctgagcactgccgcgccgcctacgaggacttcaacgtccagctacgccgaggcctagtgggctccaggcctgtggtcacccgtgttgtcatcaaggcccaggggctggtgctggaggcgtccaacggctccgtcctcatcaatgggcagcgggaggagctgccttacagccgcactggcctcctggtggagcagagcggggactacatcaaggtcagcatccggctggtgctgacattcctgtggaacggagaggacagtgccctgctggagctggatcccaaatacgccaaccagacctgtggcctgtgtggggacttcaacggcctcccggccttcaacgagttctatgcccacaacgccaggctgaccccgctccagtttgggaacctgcagaagttggatgggcccacggagcagtgcccggacccgctgcccttgccggccggcaactgcacggacgaggagggcatctgccaccgcaccctgctggggccggcctttgcggagtgccacgcactggtggacagcactgcgtacctggccgcctgcgcccaggacctgtgccgctgccccacctgcccgtgtgccacctttgtggaatactcacgccagtgcgcccacgcggggggccagccgcggaactggaggtgccctgagctctgcccccggacctgccccctcaacatgcagcaccaggagtgtggctcaccctgcacggacacctgctccaacccccagcgcgcgcagctctgcgaggaccactgtgtggacggctgcttctgccccccaggcacggtgctggatgacatcacgcactctggctgcctgcccctcgggcagtgcccctgcacccacggcggccgcacctacagcccgggcacctccttcaacaccacctgcagctcctgcacctgctccggggggctatggcagtgccaggacctgccgtgccctggcacctgctctgtgcagggcggggcccacatctccacctatgatgagaaactctacgacctgcatggtgactgcagctacgttctgtccaagaaatgtgccgacagcagcttcaccgtgctggctgagctgcggaagtgcggcctgacggacaacgagaactgcctgaaagcggtgacgctcagcctggacggcggggacacggccatccgggtccaagcggacggcggcgtgttcctcaactccatctacacgcagctgcccctgtcggcagccaacatcaccctgttcacaccctcgagcttcttcatcgtggtgcagacaggcctggggctgcagctgctggtgcagctggtgccactcatgcaggtgtttgtcaggctggaccccgcccaccagggccagatgtgcggcctgtgtgggaacttcaaccagaaccaggctgacgacttcacggccctcagcggggtggtggaggccacgggcgcagccttcgccaacacctggaaggcccaggctgcctgtgccaatgccaggaacagctttgaggacccctgctccctcagtgtggagaatgagaactacgcccggcactggtgctcgcgcctgaccgatcccaacagtgccttctcgcgctgccactccatcatcaaccccaagcccttccactcgaactgcatgtttgacacctgcaactgtgagcggagcgaggactgcctgtgcgccgcgctgtcctcctatgtgcacgcctgtgccgccaagggcgtacagctcagcgactggagggacggcgtctgcaccaagtacatgcagaactgccccaagtcccagcgctacgcctacgtggtggatgcctgccagcccacttgccgcggcctgagtgaggccgacgtcacctgcagcgtttccttcgtgcctgtggacggctgcacctgccccgcgggcaccttcctcaatgacgcgggcgcctgtgtgcccgcccaggagtgcccctgctacgctcacggcaccgtgctggctcctggagaggtggtgcacgacgagggcgccgtgtgttcatgtacgggtgggaagctaagctgcctgggagcctctctgcagaaaagcacagggtgtgcagcccccatggtgtacctggactgcagcaacagctcggcgggcacccctggggccgagtgcctccggagctgccacacgctggacgtgggctgtttcagcacacactgcgtgtccggctgtgtctgtcccccggggctggtgtcggatgggagtgggggctgcattgccgaggaggactgcccctgtgtgcacaacgaggccacctacaagcctggagagaccatcagggtcgactgcaacacctgcacctgcaggaaccggaggtgggagtgcagccaccggctctgcctgggcacctgcgtggcctacggggatggccacttcatcacctttgatggcgatcgctacagctttgaaggcagctgcgagtacatcttggcccaggactactgtggggacaacaccacccacgggaccttccgcatcgtcaccgagaacatcccctgtgggaccaccggcaccacctgctccaaggccatcaagctcttcgtggagagctacgagctgatcctccaagaggggacctttaaggcggtggcgagagggccgggtggggacccaccctacaagatacgctacatggggatcttcctggtcatcgagacccacgggatggccgtgtcctgggaccggaagaccagcgtgttcatccgactgcaccaggactacaagggcagggtctgcggcctgtgcgggaacttcgacgacaatgccatcaatgactttgccacgcgtagccggtccgtggtgggggacgcactggagtttgggaacagctggaagctctccccctcctgcccggacgccctggcacccaaggacccctgcacggccaaccccttccgcaagtcctgggcccagaagcagtgcagcatcctccacggccccaccttcgccgcctgccgctcccaggttgactccaccaagtactacgaggcctgcgtgaacgacgcgtgtgcctgcgactcgggtggcgactgcgagtgtttctgcacggctgtggctgcctacgcccaggcctgccacgacgcgggcctgtgtgtgtcctggcggactccggacacctgccccttgttctgtgacttctacaacccacatgggggctgtgagtggcactaccagccctgcggggcaccctgcctaaaaacctgccggaaccccagtgggcactgcctggtggacctgcctggcctggaaggctgctacccgaagtgcccacccagccagcccttcttcaatgaggaccagatgaagtgcgtggcccagtgtggctgctacgacaaggacggaaactactatgacgtcggtgcaagggtccccacagcggagaactgccagagctgtaactgcacacccagtggcatccagtgcgctcacagccttgaggcctgcacctgcacctatgaggacaggacctacagctaccaggacgtcatctacaacaccaccgatgggcttggcgcctgcttgatcgccatctgcggaagcaacggcaccatcatcaggaaggctgtggcatgtcctggaactccagccacaacgccattcaccttcaccaccgcctgggtcccccactccacgacaagcccggccctcccggtctccaccgtgtgtgtccgcgaggtctgccgctggtccagctggtacaatgggcaccgcccagagcccggcctgggaggcggagactttgagacgtttgaaaacctgaggcagagagggtaccaggtatgccctgtgctggctgacatcgagtgccgggcggcgcagcttcccgacatgccgctggaggagctgggccagcaggtggactgtgaccgcatgcgggggctgatgtgcgccaacagccaacagagtcccccgctctgtcacgactacgagctgcgggttctctgctgcgaatacgtgccctgtggcccctccccggccccaggcaccagccctcagccctccctcagtgccagcacggagcctgctgtgcctaccccaacccagaccacagcaaccgaaaagaccaccctatgggtgaccccgagcatccggtcgacggcggccctcacctcgcagactgggtccagctcaggccccgtgacggtcaccccctcggccccaggtaccaccacctgccagccccggtgtcagtggacagagtggtttgatgaggactaccccaagtctgaacaacttggaggggacgttgagtcctacgataagatcagggccgctggagggcacttatgccagcagcctaaggacatagagtgccaggccgagagcttccccaactggaccctggcacaggtggggcagaaggtgcactgtgacgtccacttcggcctggtgtgcaggaactgggagcaggagggcgtcttcaagatgtgctacaactacaggatccgggtcctctgctgcagtgacgaccactgcaggggacgtgccacaaccccgccaccgaccacagagctggagacggccaccaccaccaccacccaggccctgttctcaacgccgcagcctacgagtagcccggggctgaccagggctcccccggccagcaccacagcagtccccaccctctcagaaggactgacatcccccagatacacaagcacccttggtacagccaccacgggaggccccacgacgcctgcaggctccacagaacccactgtcccaggggtggccacatccacccttccaacacgctcagcccttccagggacgacggggagcttgggcacatggcgcccctcacagccacccacgctggccccaacaacaatggcaacctccagagctcgcccgacaggcacagccagcaccgcttccaaagagccgctgaccacgagcctggcgccaacactcacgagcgagctgtccacctctcaggccgagaccagcacgcccaggacagagacgacaatgagccccttgactaacaccaccaccagccagggcacgacccgctgtcaaccgaagtgtgagtggacagagtggtttgacgtggacttcccaacctcaggggttgcaggcggggacatggaaacttttgaaaacatcagggctgctgggggcaagatgtgctgggcaccaaagagcatagagtgccgggcggagaactaccccgaggtaagcatcgaccaggtcgggcaggtgctgacctgcagcctggagacggggctgacctgcaagaacgaagaccagacaggcaggttcaacatgtgcttcaactacaacgtgcgtgtgctttgctgtgacgactacagccactgccccagtaccccagccaccagctccacggccacgccctcctcaactccggggacgacctggatcctcacaaagccgaccacaacagccactacgactgcgtccactggatccacggccaccccgacctccaccctgagaacagctccccctcccaaagtgctgaccaccacggccaccacacccacagtcaccagctccaaagccactccctcctccagtccagggactgcaaccgcccttccagcactgagaagcacagccaccacacccacagctaccagcgttacacccatcccctcttcctccctgggcaccacctggacccgcctatcacagaccaccacacccacggccaccatgtccacagccacaccctcctccactccagagactgcccacacctccacagtgcttaccgccacggccaccacaactggggccaccggctctgtggccaccccctcctccaccccaggaacagctcacactaccaaagtgccaactaccacaaccacgggcttcacagccaccccctcctccagcccagggacggcactcacgcctccagtgtggatcagcacaaccaccacacccacaaccagaggctccacggtgaccccctcctccatcccggggaccacccacaccgccacagtgctgaccaccaccaccacaactgtggccactggttctatggcaacaccctcctctagcacacagaccagtggtactcccccatcactgaccaccacggccactacgatcacggccaccggctccaccaccaacccctcctcaactcctgggacaactcccatccccccagtgctgaccaccaccgccaccacacctgcagccaccagcaacacagtgactccctcctctgccctagggaccacccacacacccccagtgccgaacaccatggccaccacacacgggcgatccctgccccccagcagtccccacacggtgcgcacagcctggacttcggccacctcgggcatcttgggcaccacccacatcacagagccttccacggtgacttcccacaccctagcagcaaccaccggtaccacccagcactcgactccagccctttccagccctcaccctagcagcagaaccaccgagtcacccccttctccagggacgaccaccccgggccacaccacggccacctccaggaccacagccacggccacacccagcaagacccgcacctcgaccctgctgcccagcagccccacatcggcccccataaccacggtggtgaccatgggctgtgagccccagtgtgcctggtcagagtggctggactacagctaccccatgccggggccctctggcggggactttgacacctactccaacatccgtgcggccggaggggccgtctgtgagcagcccctgggcctcgagtgccgtgcccaggcccagcctggtgtccccctgcgggagttgggccaggtcgtggaatgcagcctggactttggcctggtctgcaggaaccgtgagcaggtggggaagttcaagatgtgcttcaactatgaaatccgtgtgttctgctgcaactacggccactgccccagcaccccggccaccagctctacggccatgccctcctccactccggggacgacctggatcctcacagagctgaccacaacagccactacgactgagtccactggatccacggccaccccgtcctccaccccagggaccacctggatcctcacagagccgagcactacagccaccgtgacggtgcccaccggatccacggccaccgcctcctccacccaggcaactgctggcaccccacatgtgagcaccacggccacgacacccacagtcaccagctccaaagccactcccttctccagtccagggactgcaaccgcccttccagcactgagaagcacagccaccacacccacagctaccagctttacagccatcccctcctcctccctgggcaccacctggacccgcctatcacagaccaccacacccacggccaccatgtccacagccacaccctcctccactccagagactgtccacacctccacagtgcttaccaccacggccaccacaaccggggccaccggctctgtggccaccccctcctccaccccaggaacagctcacactaccaaagtgctgactaccacaaccacgggcttcacagccaccccctcctccagcccagggacggcacgcacgcttccagtgtggatcagcacaaccaccacacccacaaccagaggttccacggtgaccccctcctccatcccggggaccacccacacccccacagtgctgaccaccaccaccacaactgtggccactggttctatggcaacaccctcctctagcacacagaccagtggtactcccccatcactgaccaccacggccactacgatcacggccaccggctccaccaccaacccctcctcaactccagggacaacacctatccccccagtgctgaccaccaccgccaccacacctgcagccaccagcagcacagtgactccctcctctgccctagggaccacccacacacccccagtgccgaacaccacggccaccacacacgggcgatccctgtcccccagcagtccccacacggtgcgcacagcctggacttcggccacctcaggcaccttgggcaccacccacatcacagagccttccacggggacttcccacaccccagcagcaaccaccggtaccacccagcactcgactccagccctgtccagccctcaccctagcagcaggaccaccgagtcacccccttctccagggacgaccaccccgggccacaccagggccacctccaggaccacggccacggccacacccagcaagacccgcacctcgaccctgctgcccagcagccccacatcggccccaataaccacggtggtgaccatgggctgtgagccccagtgtgcctggtcagagtggctggactacagctaccccatgccggggccctctggcggggactttgacacctactccaacatccgtgcggccggaggggccgtctgtgagcagcccctgggcctcgagtgccgtgcccaggcccagcctggtgtccccctgcgggagttgggccaggtcgtggaatgcagcctggactttggcctggtctgcaggaaccgtgagcaggtggggaagttcaagatgtgcttcaactatgaaatccgtgtgttctgctgcaactacggccactgccccagcaccccggccaccagctctacggccacgccctcctccactccagggacgacctggatcctcacagagcagaccacagcagccactacgaccgcaaccactggatccacggccatcccgtcctccaccccgggaacagctccccctcccaaagtgctgaccagcacggccaccacacccacagccaccagttccaaagccacttcctcctccagtccaaggactgcaaccacccttccagtgctgacaagcacagccaccaaatccacagctaccagctttacacccatcccctccttcacccttgggaccaccgggaccctcccagaacagaccaccacacccatggccaccatgtccacaatccacccctcctccactccggagaccacccacacctccacagtgctgaccacgaaggccaccacgacaagggccaccagttccatgtccaccccctcctccactccggggacgacctggatcctcacagagctgaccacagcagccactacaactgcagccactggccccacggccaccccgtcctccaccccagggaccacctggatcctcacagagcccagcactacagccaccgtgacggtgcccaccggatccacggccaccgcctcctccacccgggcaactgctggcaccctcaaagtgctgaccagcacggccaccacacccacagtcatcagctccagagccactccctcctccagtccagggactgcaaccgcccttccagcactgagaagcacagccaccacacccacagctaccagcgttacagccatcccctcttcctccctgggcaccgcctggacccgcctatcacagaccaccacacccacggccaccatgtccacagccacaccctcctctactccagagactgtccacacctccacagtgcttaccaccacgaccaccacaaccagggccaccggctctgtggccaccccctcctccaccccaggaacagctcacactaccaaagtgccgactaccacaaccacgggcttcacagccaccccctcctccagcccagggacggcactcacgcctccagtgtggatcagcacaaccaccacacccacaaccagaggctccacggtgaccccctcctccatcccggggaccacccacaccgccacagtgctgaccaccaccaccacaactgtggccactggttctatggcaacaccctcctctagcacacagaccagtggtactcccccatcactgaccaccacggccactacgatcacagccaccggctccaccaccaacccctcctcaactccagggacaactcccatccccccagtgctgaccaccaccgccaccacacctgcagccaccagcagcacagtgactccctcctctgccctagggaccacccacacacccccagtgccgaacaccacggccaccacacacgggcggtccctgccccccagcagtccccacacggtgcgcacagcctggacttcggccacctcgggcatcttgggcaccacccacatcacagagccttccacggtgacttcccacaccccagcagcaaccaccagtaccacccagcactcgactccagccctgtccagccctcaccctagcagcaggaccaccgagtcacccccttctccagggacgaccaccccgggccacaccaggggcacctccaggaccacagccacagccacacccagcaagacccgcacctcgaccctgctgcccagcagccccacatcggcccccataaccacggtggtgaccacgggctgtgagccccagtgtgcctggtcagagtggctggactacagctaccccatgccggggccctctggcggggactttgacacctactccaacatccgtgcggccggaggggcagtctgtgagcagcccctgggcctcgagtgccgtgcccaggcccagcctggtgtccccctgcgggagttgggccaggtcgtggaatgcagcctggactttggcctggtctgcaggaaccgtgagcaggtggggaagttcaagatgtgcttcaactatgaaatccgtgtgttctgctgcaactacggccactgccccagcaccccggccaccagctctacggccacgccctcctcaactccggggacgacctggatcctcacaaagctgaccacaacagccactacgactgagtccactggatccacggccaccccgtcctccaccccagggaccacctggatcctcacagagccgagcactacagccaccgtgacggtgcccaccggatccacggccaccgcctcctccacccaggcaactgctggcaccccacatgtgagcaccacggccacgacacccacagtcaccagctccaaagccactcccttctccagtccagggactgcaaccgcccttccagcactgagaagcacagccaccacacccacagctaccagctttacagccatcccctcctcctccctgggcaccacctggacccgcctatcacagaccaccacacccacggccaccatgtccacagccacaccctcctccactccagagactgcccacacctccacagtgcttaccaccacggccaccacaaccagggccaccggctctgtggccaccccctcttccaccccaggaacagctcacactaccaaagtgccgactaccacaaccacgggcttcacagtcaccccctcctccagcccagggacggcacgcacgcctccagtgtggatcagcacaaccaccacacccacaaccagtggctccacggtgaccccctcctccgtcccggggaccacccacacccccacagtgctgaccaccaccaccacaactgtggccactggttctatggcaacaccctcctctagcacacagaccagtggtactcccccatcactgatcaccacggccactacgatcacggccaccggctccaccaccaacccctcctcaactccagggacaacacctatccccccagtgctgaccaccaccgccaccacacctgcagccaccagcagcacagtgactccctcctctgccctagggaccacccacacacccccagtgccgaacaccacggccaccacacacgggcgatccctgtcccccagcagtccccacacggtgcgcacagcctggacttcggccacctcaggcaccttgggcaccacccacatcacagagccttccacggggacttcccacaccccagcagcaaccaccggtaccacccagcactcgactccagccctgtccagccctcaccctagcagcaggaccaccgagtcacccccttccccagggacgaccaccccgggccacaccacggccacctccaggaccacggccacggccacacccagcaagacccgcacctcgaccctgctgcccagcagccccacatcggcccccataaccacggtggtgaccacgggctgtgagccccagtgtgcctggtcagagtggctggactacagctaccccatgccggggccctctggcggggactttgacacctactccaacatccgtgcggccggaggggccgtctgtgagcagcccctgggcctcgagtgccgtgcccaggcccagcctggtgtccccctgggggagttgggccaggtcgtggaatgcagcctggactttggcctggtctgcaggaaccgtgagcaggtggggaagttcaagatgtgcttcaactatgaaatccgtgtgttctgctgcaactacggccactgccccagcaccccggccaccagctctacggccatgccctcctccactccggggacgacctggatcctcacagagctgaccacaacagccactacgactgcatccactggatccacggccaccccgtcctccaccccgggaacagctccccctcccaaagtgctgaccagcccggccaccacacccacagccaccagttccaaagccacttcctcctccagtccaaggactgcaaccacccttccagtgctgacaagcacagccaccaaatccacagctaccagcgttacacccatcccctcctccacccttgggaccaccgggaccctcccagaacagaccaccacacccgtggccaccatgtccacaatccacccctcctccactccggagaccacccacacctccacagtgctgaccacgaaggccaccacgacaagggccaccagttccacgtccaccccctcctccactccggggacgacctggatcctcacagagctgaccacagcagccactacaactgcagccactggccccacggccaccccgtcctccaccccagggaccacctggatcctcacagagctgaccacaacagccactacgactgcgtccactggatccacggccaccccgtcctccaccccagggaccacctggatcctcacagagccgagcactacagccaccgtgacggtgcccaccggatccacggccaccgcctcctccacccaggcaactgctggcaccccacatgtgagcaccacggccacgacacccacagtcaccagctccaaagccactccctcctccagtccagggactgcaactgcccttccagcactgagaagcacagccaccacacccacagctaccagctttacagccatcccctcctcctccctgggcaccacctggacccgcctatcacagaccaccacacccacggccaccatgtccacagccacaccctcctccactccagagactgtccacacctccacagtgcttaccgccacggccaccacaaccggggccaccggctctgtggccaccccctcctccaccccaggaacagctcacactaccaaagtgccgactaccacaaccacgggcttcacagccaccccctcctccagcccagggacggcactcacgcctccagtgtggatcagcacaaccaccacacccacaaccaccacacccacaaccagtggctccacggtgaccccctcctccatcccggggaccacccacaccgccagagtgctgaccaccaccaccacaactgtggccactggttctatggcaacaccctcctctagcacacagaccagtggtactcccccatcactgaccaccacggccactacgatcacggccaccggctccaccaccaacccctcctcaactccagggacaacacccatcaccccagtgctgaccagcacggccaccacacccgcagccaccagctccaaagccacttcctcctccagtccaaggactgcaaccacccttccagtgctgacaagcacagccacaaaatccacagctaccagctttacacccatcccctcctccaccctgtggaccacgtggaccgtcccagcacagaccaccacacccatgtccaccatgtccacaatccacacctcctctactccagagaccacccacacctccacagtgctgaccaccacagccaccatgacaagggccaccaattccacggccacaccctcctccactctggggacgacccggatcctcactgagctgaccacaacagccactacaactgcagccactggatccacggccaccctgtcctccaccccagggaccacctggatcctcacagagccgagcactatagccaccgtgatggtgcccaccggttccacggccaccgcctcctccactctgggaacagctcacacccccaaagtggtgaccaccatggccactatgcccacagccactgcctccacggttcccagctcgtccaccgtggggaccacccgcacccctgcagtgctccccagcagcctgccaaccttcagcgtgtccactgtgtcctcctcagtcctcaccaccctgagacccactggcttccccagctcccacttctctactccctgcttctgcagggcatttggacagtttttctcgcccggggaagtcatctacaataagaccgaccgagccggctgccatttctacgcagtgtgcaatcagcactgtgacattgaccgcttccagggcgcctgtcccacctccccaccgccagtgtcctccgccccgctgtcctcgccctcccctgcccctggctgtgacaatgccatccctctccggcaggtgaatgagacctggaccctggagaactgcacggtggccaggtgcgtgggtgacaaccgtgtcgtcctgctggacccaaagcctgtggccaacgtcacctgcgtgaacaagcacctgcccatcaaagtgtcggacccgagccagccctgtgacttccactatgagtgcgagtgcatctgcagcatgtggggcggctcccactattccacctttgacggcacctcttacaccttccggggcaactgcacctatgtcctcatgagagagatccatgcacgctttgggaatctcagcctctacctggacaaccactactgcacggcctctgccactgccgctgccgcccgctgcccccgcgccctcagcatccactacaagtccatggatatcgtcctcactgtcaccatggtgcatgggaaggaggagggcctgatcctgtttgaccaaattccggtgagcagcggtttcagcaagaacggcgtgcttgtgtctgtgctggggaccaccaccatgcgtgtggacattcctgccctgggcgtgagcgtcaccttcaatggccaagtcttccaggcccggctgccctacagcctcttccacaacaacaccgagggccagtgcggcacctgcaccaacaaccagagggacgactgtctccagcgggacggaaccactgccgccagttgcaaggacatggccaagacgtggctggtccccgacagcagaaaggatggctgctgggccccgactggcacaccccccactgccagccccgcagccccggtgtctagcacacccacccccaccccatgcccaccacagccgctctgtgatctgatgctgagccaggtctttgctgagtgccacaaccttgtgcccccgggcccattcttcaacgcctgcatcagcgaccactgcaggggccgccttgaggtgccctgccagagcctggaggcttacgcagagctctgccgcgcccggggagtgtgcagtgactggcgaggtgcaaccggtggcctgtgcgacctcacctgcccacccaccaaagtgtacaagccatgcggccccatacagcctgccacctgcaactctaggaaccagagcccacagctggaggggatggcggagggctgcttctgccctgaggaccagatcctcttcaacgcacacatgggcatctgcgtgcaggcctgcccctgcgtgggacccgatgggtttcctaaatttcccggggagcggtgggtcagcaactgccagtcctgcgtgtgtgacgagggttcagtgtcggtgcagtgcaagcccctgccctgtgacgcccagggtcagcccccgccgtgcaaccgtcccggcttcgtaaccgtgaccaggccccgggccgagaacccctgctgccccgagacggtgtgcgtgtgcaacacaaccacctgcccccagagcctgcctgtgtgcccgccagggcaggagtccatctgcacccaggaggagggcgactgctgtcccaccttccgctgcagacctcagctgtgttcgtacaatggcaccttctacggggttggtgcaaccttcccaggcgcccttccctgccacatgtgtacctgcctctctggggacacccaggacccaacggtgcaatgtcaggaggatgcctgcaacaatactacctgtccccagggctttgagtacaagagagtggccgggcagtgctgtggggagtgcgtccagaccgcctgcctcacgcccgatggccagccagtccagctgaatgaaacctgggtcaacagccatgtggacaactgcaccgtgtacctctgtgaggctgagggtggagtccatttgctgaccccacagcctgcatcctgcccagatgtgtccagctgcagggggagcctcaggaaaaccggctgctgctactcctgtgaggaggactcctgtcaagtccgcatcaacacgaccatcctgtggcaccagggctgcgagaccgaggtcaacatcaccttctgcgagggctcctgccccggagcgtccaagtactcagcagaggcccaggccatgcagcaccagtgcacctgctgccaggagaggcgggtccacgaggagacggtgcccttgcactgtcctaacggctcagccatcctgcacacctacacccacgtggatgagtgtggctgcacgcccttctgtgtccctgcgcccatggctcccccacacacccgtggcttcccggcccaggaggccactgctgtctgagaacgttctgcctccatccccatgctctgtccacctggagccaggatgtgcattgtctgatcatgaaaaccttgggcctcctctgcggagccccccggcctgtgtgtggcaccccgcgctccgtgctcctgctgcccaccccgtgggtgaaaccggccccagaagggtgaggggccagcaggacccctttcgggagggcgccactcaggagtcctaccctgggagagcctgtggcccaccttggccttgcccctccctgatgtcactgggacgccctggaacaaactaagcatgtgcgggcctatgtgtccctgccacggccggagcgcccgcgcagcacggattccagctggccacgtccggccgctggggcagacaggctggtccaggcaaggccagctgctgccaggaagctgcgacaggcaaggcggccgcctgtccatgcctgctgcagggtaactcagggctgaggtcgcaacggccaggtcagagaggggtcagcatcccaaagccccctctgctcaacccagcccagttttgcaaataaaccctgagcattgagta

SEQ ID NO: 128587 - DNA, 558 bp, Artificial Sequence
  derived and/or modified sequence
tcctccaccccagggaccacctggatcctcacagagccgagcactacagccaccgtgacggtgcccaccggatccacggccaccgcctcctccacccaggcaactgctggcaccccacatgtgagcaccacggccacgacacccacagtcaccagctccaaagccactcccttctccagtccagggactgcaaccgcccttccagcactgagaagcacagccaccacacccacagctaccagctttacagccatcccctcctcctgggcaccacctggacccgcctatcacagaccaccacacccacggccaccatgtccacagccacaccctcctccactccagagactgtccacacctccacagtgcttaccaccacggccaccacggggccaccggctctgtggccaccccctcctccaccccaggaacagctcacactaccaaagtgctgactaccacaaccacttcacagccaccccctcctccagcccagggacggcacgcacgcttccagtgtggatcagcacaaccaccacacccacaaccagaggttcc

SEQ ID NO: 128588 - DNA, 957 bp, Artificial Sequence
  derived and/or modified sequence
acgaaggccaccacgacaagggccaccagttccatgtccaccccctcctccactccggggacgacctggatcctcacagagctgaccacagcagccactacaactgcagccactccccacggccaccccgtcctccaccccagggaccacctggatcctcacagagcccagcactacaccgtgacggtgcccaccggatccacggccaccgcctcctccacccgggcaactgctggcaccctcaaagtgctgaccagccaccacacccacagtcatcagctccagagccactccctcctccagtccagggactgcaaccgcccttccagcactgagaagcacagccaccacacccacagctaccagcgttacagccatcccctcttcctccctaccgcctggacccgcctatcacagaccaccacacccacggccaccatgtccacagccacaccctcctctactccagagactgtccacacctccacagtgcttaccaccacgaccaccacaaccagggccaccctgtggccaccccctcctccaccccaggaacagctcacactaccaaagtgccgactaccacaaccacggcacagccaccccctcctccagcccagggacggcactcacgcctccagtgtggatcagcacaaccaccacacccacaaccagaggctccacggtgaccccctcctccatcccaccacccacaccgccacagtgctgaccaccaccaccacaactccactggttctatggcaacaccctcctctagcacacagaccagtggtacccccatcactgaccaccacggccactacgatcacagccaccggctccaccaccaacccctcctcaactccagggacaactcccatccccccagtgctgaccaccaccgcccacacctgcagccaccagcagcacagtgactccctcctctgccctagggac

SEQ ID NO: 128589 - DNA, 17377 bp, Artificial Sequence
  derived and/or modified sequence
acccggcccggctccctccctgcccgtccccgtccccccacccgtgccagcccccaggatgggtgccccgagcgcgtgccggacgctggtgttggctctggcggccatgctcgtggtgccgcaggcagagacccagggccctgtggagccgagctgggagaatgcagggcacaccatggatggcggtgccccgacgtcctcgcccacccggcgcgtgagctttgttccacccgtcactgtcttccccagcctgagccccctgaacccggcgcacaatgggcgggtgtgcagcacctggggtgacttccactacaagaccttcgacggcgacgtcttccgcttccctggcctttgcaactacgtgttctctgagcactgccgcgccgcctacgaggacttcaacgtccagctacgccgaggcctagtgggctccaggcctgtggtcacccgtgttgtcatcaaggcccaggggctggtgctggaggcgtccaacggctccgtcctcatcaatgggcagcgggaggagctgccttacagccgcactggcctcctggtggagcagagcggggactacatcaaggtcagcatccggctggtgctgacattcctgtggaacggagaggacagtgccctgctggagctggatcccaaatacgccaaccagacctgtggcctgtgtggggacttcaacggcctcccggccttcaacgagttctatgcccacaacgccaggctgaccccgctccagtttgggaacctgcagaagttggatgggcccacggagcagtgcccggacccgctgcccttgccggccggcaactgcacggacgaggagggcatctgccaccgcaccctgctggggccggcctttgcggagtgccacgcactggtggacagcactgcgtacctggccgcctgcgcccaggacctgtgccgctgccccacctgcccgtgtgccacctttgtggaatactcacgccagtgcgcccacgcggggggccagccgcggaactggaggtgccctgagctctgcccccggacctgccccctcaacatgcagcaccaggagtgtggctcaccctgcacggacacctgctccaacccccagcgcgcgcagctctgcgaggaccactgtgtggacggctgcttctgccccccaggcaggtcttgcacggtgctggatgacatcacgcactctggctgcctgcccctcgggcagtgcccctgcacccacggcggccgcacctacagcccgggcacctccttcaacaccacctgcagctcctgcacctgctccggggggctatggcagtgccaggacctgccgtgccctggcacctgctctgtgcagggcggggcccacatctccacctatgatgagaaactctacgacctgcatggtgactgcagctacgttctgtccaagaaatgtgccgacagcagcttcaccgtgctggctgagctgcggaagtgcggcctgacggacaacgagaactgcctgaaagcggtgacgctcagcctggacggcggggacacggccatccgggtccaagcggacggcggcgtgttcctcaactccatctacacgcagctgcccctgtcggcagccaacatcaccctgttcacaccctcgagcttcttcatcgtggtgcagacaggcctggggctgcagctgctggtgcagctggtgccactcatgcaggtgtttgtcaggctggaccccgcccaccagggccagatgtgcggcctgtgtgggaacttcaaccagaaccaggctgacgacttcacggccctcagcggggtggtggaggccacgggcgcagccttcgccaacacctggaaggcccaggctgcctgtgccaatgccaggaacagctttgaggacccctgctccctcagtgtggagaatgagaactacgcccggcactggtgctcgcgcctgaccgatcccaacagtgccttctcgcgctgccactccatcatcaaccccaagcccttccactcgaactgcatgtttgacacctgcaactgtgagcggagcgaggactgcctgtgcgccgcgctgtcctcctatgtgcacgcctgtgccgccaagggcgtacagctcagcgactggagggacggcgtctgcaccaagtacatgcagaactgccccaagtcccagcgctacgcctacgtggtggatgcctgccagcccacttgccgcggcctgagtgaggccgacgtcacctgcagcgtttccttcgtgcctgtggacggctgcacctgccccgcgggcaccttcctcaatgacgcgggcgcctgtgtgcccgcccaggagtgcccctgctacgctcacggcaccgtgctggctcctggagaggtggtgcacgacgagggcgccgtgtgttcatgtacgggtgggaagctaagctgcctgggagcctctctgcagaaaagcacagggtgtgcagcccccatggtgtacctggactgcagcaacagctcggcgggcacccctggggccgagtgcctccggagctgccacacgctggacgtgggctgtttcagcacacactgcgtgtccggctgtgtctgtcccccggggctggtgtcggatgggagtgggggctgcattgccgaggaggactgcccctgtgtgcacaacgaggccacctacaagcctggagagaccatcagggtcgactgcaacacctgcacctgcaggaaccggaggtgggagtgcagccaccggctctgcctgggcacctgcgtggcctacggggatggccacttcatcacctttgatggcgatcgctacagctttgaaggcagctgcgagtacatcttggcccaggactactgtggggacaacaccacccacgggaccttccgcatcgtcaccgagaacatcccctgtgggaccaccggcaccacctgctccaaggccatcaagctcttcgtggagagctacgagctgatcctccaagaggggacctttaaggcggtggcgagagggccgggtggggacccaccctacaagatacgctacatggggatcttcctggtcatcgagacccacgggatggccgtgtcctgggaccggaagaccagcgtgttcatccgactgcaccaggactacaagggcagggtctgcggcctgtgcgggaacttcgacgacaatgccatcaatgactttgccacgcgtagccggtccgtggtgggggacgcactggagtttgggaacagctggaagctctccccctcctgcccggacgccctggcacccaaggacccctgcacggccaaccccttccgcaagtcctgggcccagaagcagtgcagcatcctccacggccccaccttcgccgcctgccgctcccaggttgactccaccaagtactacgaggcctgcgtgaacgacgcgtgtgcctgcgactcgggtggcgactgcgagtgtttctgcacggctgtggctgcctacgcccaggcctgccacgacgcgggcctgtgtgtgtcctggcggactccggacacctgccccttgttctgtgacttctacaacccacatgggggctgtgagtggcactaccagccctgcggggcaccctgcctaaaaacctgccggaaccccagtgggcactgcctggtggacctgcctggcctggaaggctgctacccgaagtgcccacccagccagcccttcttcaatgaggaccagatgaagtgcgtggcccagtgtggctgctacgacaaggacggaaactactatgacgtcggtgcaagggtccccacagcggagaactgccagagctgtaactgcacacccagtggcatccagtgcgctcacagccttgaggcctgcacctgcacctatgaggacaggacctacagctaccaggacgtcatctacaacaccaccgatgggcttggcgcctgcttgatcgccatctgcggaagcaacggcaccatcatcaggaaggctgtggcatgtcctggaactccagccacaacgccattcaccttcaccaccgcctgggtcccccactccacgacaagcccggccctcccggtctccaccgtgtgtgtccgcgaggtctgccgctggtccagctggtacaatgggcaccgcccagagcccggcctgggaggcggagactttgagacgtttgaaaacctgaggcagagagggtaccaggtatgccctgtgctggctgacatcgagtgccgggcggcgcagcttcccgacatgccgctggaggagctgggccagcaggtggactgtgaccgcatgcgggggctgatgtgcgccaacagccaacagagtcccccgctctgtcacgactacgagctgcgggttctctgctgcgaatacgtgccctgtggcccctccccggccccaggcaccagccctcagccctccctcagtgccagcacggagcctgctgtgcctaccccaacccagaccacagcaaccgaaaagaccaccctatgggtgaccccgagcatccggtcgacggcggccctcacctcgcagactgggtccagctcaggccccgtgacggtcaccccctcggccccaggtaccaccacctgccagccccggtgtcagtggacagagtggtttgatgaggactaccccaagtctgaacaacttggaggggacgttgagtcctacgataagatcagggccgctggagggcacttatgccagcagcctaaggacatagagtgccaggccgagagcttccccaactggaccctggcacaggtggggcagaaggtgcactgtgacgtccacttcggcctggtgtgcaggaactgggagcaggagggcgtcttcaagatgtgctacaactacaggatccgggtcctctgctgcagtgacgaccactgcaggggacgtgccacaaccccgccaccgaccacagagctggagacggccaccaccaccaccacccaggccctgttctcaacgccgcagcctacgagtagcccggggctgaccagggctcccccggccagcaccacagcagtccccaccctctcagaaggactgacatcccccagatacacaagcacccttggtacagccaccacgggaggccccacgacgcctgcaggctccacagaacccactgtcccaggggtggccacatccacccttccaacacgctcagcccttccagggacgacggggagcttgggcacatggcgcccctcacagccacccacgctggccccaacaacaatggcaacctccagagctcgcccgacaggcacagccagcaccgcttccaaagagccgctgaccacgagcctggcgccaacactcacgagcgagctgtccacctctcaggccgagaccagcacgcccaggacagagacgacaatgagccccttgactaacaccaccaccagccagggcacgacccgctgtcaaccgaagtgtgagtggacagagtggtttgacgtggacttcccaacctcaggggttgcaggcggggacatggaaacttttgaaaacatcagggctgctgggggcaagatgtgctgggcaccaaagagcatagagtgccgggcggagaactaccccgaggtaagcatcgaccaggtcgggcaggtgctgacctgcagcctggagacggggctgacctgcaagaacgaagaccagacaggcaggttcaacatgtgcttcaactacaacgtgcgtgtgctttgctgtgacgactacagccactgccccagtaccccagccaccagctccacggccacgccctcctcaactccggggacgacctggatcctcacaaagccgaccacaacagccactacgactgcgtccactggatccacggccaccccgacctccaccctgagaacagctccccctcccaaagtgctgaccaccacggccaccacacccacagtcaccagctccaaagccactccctcctccagtccagggactgcaaccgcccttccagcactgagaagcacagccaccacacccacagctaccagcgttacacccatcccctcttcctccctgggcaccacctggacccgcctatcacagaccaccacacccacggccaccatgtccacagccacaccctcctccactccagagactgcccacacctccacagtgcttaccgccacggccaccacaactggggccaccggctctgtggccaccccctcctccaccccaggaacagctcacactaccaaagtgccaactaccacaaccacgggcttcacagccaccccctcctccagcccagggacggcactcacgcctccagtgtggatcagcacaaccaccacacccacaaccagaggctccacggtgaccccctcctccatcccggggaccacccacaccgccacagtgctgaccaccaccaccacaactgtggccactggttctatggcaacaccctcctctagcacacagaccagtggtactcccccatcactgaccaccacggccactacgatcacggccaccggctccaccaccaacccctcctcaactcctgggacaactcccatccccccagtgctgaccaccaccgccaccacacctgcagccaccagcaacacagtgactccctcctctgccctagggaccacccacacacccccagtgccgaacaccatggccaccacacacgggcgatccctgccccccagcagtccccacacggtgcgcacagcctggacttcggccacctcgggcatcttgggcaccacccacatcacagagccttccacggtgacttcccacaccctagcagcaaccaccggtaccacccagcactcgactccagccctttccagccctcaccctagcagcagaaccaccgagtcacccccttctccagggacgaccaccccgggccacaccacggccacctccaggaccacagccacggccacacccagcaagacccgcacctcgaccctgctgcccagcagccccacatcggcccccataaccacggtggtgaccatgggctgtgagccccagtgtgcctggtcagagtggctggactacagctaccccatgccggggccctctggcggggactttgacacctactccaacatccgtgcggccggaggggccgtctgtgagcagcccctgggcctcgagtgccgtgcccaggcccagcctggtgtccccctgcgggagttgggccaggtcgtggaatgcagcctggactttggcctggtctgcaggaaccgtgagcaggtggggaagttcaagatgtgcttcaactatgaaatccgtgtgttctgctgcaactacggccactgccccagcaccccggccaccagctctacggccatgccctcctccactccggggacgacctggatcctcacagagctgaccacaacagccactacgactgagtccactggatccacggccaccccgtcctccaccccagggaccacctggatcctcacagagccgagcactacagccaccgtgacggtgcccaccggatccacggccaccgcctcctccacccaggcaactgctggcaccccacatgtgagcaccacggccacgacacccacagtcaccagctccaaagccactcccttctccagtccagggactgcaaccgcccttccagcactgagaagcacagccaccacacccacagctaccagctttacagccatcccctcctcctccctgggcaccacctggacccgcctatcacagaccaccacacccacggccaccatgtccacagccacaccctcctccactccagagactgtccacacctccacagtgcttaccaccacggccaccacaaccggggccaccggctctgtggccaccccctcctccaccccaggaacagctcacactaccaaagtgctgactaccacaaccacgggcttcacagccaccccctcctccagcccagggacggcacgcacgcttccagtgtggatcagcacaaccaccacacccacaaccagaggttccacggtgaccccctcctccatcccggggaccacccacacccccacagtgctgaccaccaccaccacaactgtggccactggttctatggcaacaccctcctctagcacacagaccagtggtactcccccatcactgaccaccacggccactacgatcacggccaccggctccaccaccaacccctcctcaactccagggacaacacctatccccccagtgctgaccaccaccgccaccacacctgcagccaccagcagcacagtgactccctcctctgccctagggaccacccacacacccccagtgccgaacaccacggccaccacacacgggcgatccctgtcccccagcagtccccacacggtgcgcacagcctggacttcggccacctcaggcaccttgggcaccacccacatcacagagccttccacggggacttcccacaccccagcagcaaccaccggtaccacccagcactcgactccagccctgtccagccctcaccctagcagcaggaccaccgagtcacccccttctccagggacgaccaccccgggccacaccagggccacctccaggaccacggccacggccacacccagcaagacccgcacctcgaccctgctgcccagcagccccacatcggccccaataaccacggtggtgaccatgggctgtgagccccagtgtgcctggtcagagtggctggactacagctaccccatgccggggccctctggcggggactttgacacctactccaacatccgtgcggccggaggggccgtctgtgagcagcccctgggcctcgagtgccgtgcccaggcccagcctggtgtccccctgcgggagttgggccaggtcgtggaatgcagcctggactttggcctggtctgcaggaaccgtgagcaggtggggaagttcaagatgtgcttcaactatgaaatccgtgtgttctgctgcaactacggccactgccccagcaccccggccaccagctctacggccacgccctcctccactccagggacgacctggatcctcacagagcagaccacagcagccactacgaccgcaaccactggatccacggccatcccgtcctccaccccgggaacagctccccctcccaaagtgctgaccagcacggccaccacacccacagccaccagttccaaagccacttcctcctccagtccaaggactgcaaccacccttccagtgctgacaagcacagccaccaaatccacagctaccagctttacacccatcccctccttcacccttgggaccaccgggaccctcccagaacagaccaccacacccatggccaccatgtccacaatccacccctcctccactccggagaccacccacacctccacagtgctgaccacgaaggccaccacgacaagggccaccagttccatgtccaccccctcctccactccggggacgacctggatcctcacagagctgaccacagcagccactacaactgcagccactggccccacggccaccccgtcctccaccccagggaccacctggatcctcacagagcccagcactacagccaccgtgacggtgcccaccggatccacggccaccgcctcctccacccgggcaactgctggcaccctcaaagtgctgaccagcacggccaccacacccacagtcatcagctccagagccactccctcctccagtccagggactgcaaccgcccttccagcactgagaagcacagccaccacacccacagctaccagcgttacagccatcccctcttcctccctgggcaccgcctggacccgcctatcacagaccaccacacccacggccaccatgtccacagccacaccctcctctactccagagactgtccacacctccacagtgcttaccaccacgaccaccacaaccagggccaccggctctgtggccaccccctcctccaccccaggaacagctcacactaccaaagtgccgactaccacaaccacgggcttcacagccaccccctcctccagcccagggacggcactcacgcctccagtgtggatcagcacaaccaccacacccacaaccagaggctccacggtgaccccctcctccatcccggggaccacccacaccgccacagtgctgaccaccaccaccacaactgtggccactggttctatggcaacaccctcctctagcacacagaccagtggtactcccccatcactgaccaccacggccactacgatcacagccaccggctccaccaccaacccctcctcaactccagggacaactcccatccccccagtgctgaccaccaccgccaccacacctgcagccaccagcagcacagtgactccctcctctgccctagggaccacccacacacccccagtgccgaacaccacggccaccacacacgggcggtccctgccccccagcagtccccacacggtgcgcacagcctggacttcggccacctcgggcatcttgggcaccacccacatcacagagccttccacggtgacttcccacaccccagcagcaaccaccagtaccacccagcactcgactccagccctgtccagccctcaccctagcagcaggaccaccgagtcacccccttctccagggacgaccaccccgggccacaccaggggcacctccaggaccacagccacagccacacccagcaagacccgcacctcgaccctgctgcccagcagccccacatcggcccccataaccacggtggtgaccacgggctgtgagccccagtgtgcctggtcagagtggctggactacagctaccccatgccggggccctctggcggggactttgacacctactccaacatccgtgcggccggaggggcagtctgtgagcagcccctgggcctcgagtgccgtgcccaggcccagcctggtgtccccctgcgggagttgggccaggtcgtggaatgcagcctggactttggcctggtctgcaggaaccgtgagcaggtggggaagttcaagatgtgcttcaactatgaaatccgtgtgttctgctgcaactacggccactgccccagcaccccggccaccagctctacggccacgccctcctcaactccggggacgacctggatcctcacaaagctgaccacaacagccactacgactgagtccactggatccacggccaccccgtcctccaccccagggaccacctggatcctcacagagccgagcactacagccaccgtgacggtgcccaccggatccacggccaccgcctcctccacccaggcaactgctggcaccccacatgtgagcaccacggccacgacacccacagtcaccagctccaaagccactcccttctccagtccagggactgcaaccgcccttccagcactgagaagcacagccaccacacccacagctaccagctttacagccatcccctcctcctccctgggcaccacctggacccgcctatcacagaccaccacacccacggccaccatgtccacagccacaccctcctccactccagagactgcccacacctccacagtgcttaccaccacggccaccacaaccagggccaccggctctgtggccaccccctcttccaccccaggaacagctcacactaccaaagtgccgactaccacaaccacgggcttcacagtcaccccctcctccagcccagggacggcacgcacgcctccagtgtggatcagcacaaccaccacacccacaaccagtggctccacggtgaccccctcctccgtcccggggaccacccacacccccacagtgctgaccaccaccaccacaactgtggccactggttctatggcaacaccctcctctagcacacagaccagtggtactcccccatcactgatcaccacggccactacgatcacggccaccggctccaccaccaacccctcctcaactccagggacaacacctatccccccagtgctgaccaccaccgccaccacacctgcagccaccagcagcacagtgactccctcctctgccctagggaccacccacacacccccagtgccgaacaccacggccaccacacacgggcgatccctgtcccccagcagtccccacacggtgcgcacagcctggacttcggccacctcaggcaccttgggcaccacccacatcacagagccttccacggggacttcccacaccccagcagcaaccaccggtaccacccagcactcgactccagccctgtccagccctcaccctagcagcaggaccaccgagtcacccccttccccagggacgaccaccccgggccacaccacggccacctccaggaccacggccacggccacacccagcaagacccgcacctcgaccctgctgcccagcagccccacatcggcccccataaccacggtggtgaccacgggctgtgagccccagtgtgcctggtcagagtggctggactacagctaccccatgccggggccctctggcggggactttgacacctactccaacatccgtgcggccggaggggccgtctgtgagcagcccctgggcctcgagtgccgtgcccaggcccagcctggtgtccccctgggggagttgggccaggtcgtggaatgcagcctggactttggcctggtctgcaggaaccgtgagcaggtggggaagttcaagatgtgcttcaactatgaaatccgtgtgttctgctgcaactacggccactgccccagcaccccggccaccagctctacggccatgccctcctccactccggggacgacctggatcctcacagagctgaccacaacagccactacgactgcatccactggatccacggccaccccgtcctccaccccgggaacagctccccctcccaaagtgctgaccagcccggccaccacacccacagccaccagttccaaagccacttcctcctccagtccaaggactgcaaccacccttccagtgctgacaagcacagccaccaaatccacagctaccagcgttacacccatcccctcctccacccttgggaccaccgggaccctcccagaacagaccaccacacccgtggccaccatgtccacaatccacccctcctccactccggagaccacccacacctccacagtgctgaccacgaaggccaccacgacaagggccaccagttccacgtccaccccctcctccactccggggacgacctggatcctcacagagctgaccacagcagccactacaactgcagccactggccccacggccaccccgtcctccaccccagggaccacctggatcctcacagagctgaccacaacagccactacgactgcgtccactggatccacggccaccccgtcctccaccccagggaccacctggatcctcacagagccgagcactacagccaccgtgacggtgcccaccggatccacggccaccgcctcctccacccaggcaactgctggcaccccacatgtgagcaccacggccacgacacccacagtcaccagctccaaagccactccctcctccagtccagggactgcaactgcccttccagcactgagaagcacagccaccacacccacagctaccagctttacagccatcccctcctcctccctgggcaccacctggacccgcctatcacagaccaccacacccacggccaccatgtccacagccacaccctcctccactccagagactgtccacacctccacagtgcttaccgccacggccaccacaaccggggccaccggctctgtggccaccccctcctccaccccaggaacagctcacactaccaaagtgccgactaccacaaccacgggcttcacagccaccccctcctccagcccagggacggcactcacgcctccagtgtggatcagcacaaccaccacacccacaaccaccacacccacaaccagtggctccacggtgaccccctcctccatcccggggaccacccacaccgccagagtgctgaccaccaccaccacaactgtggccactggttctatggcaacaccctcctctagcacacagaccagtggtactcccccatcactgaccaccacggccactacgatcacggccaccggctccaccaccaacccctcctcaactccagggacaacacccatcaccccagtgctgaccagcacggccaccacacccgcagccaccagctccaaagccacttcctcctccagtccaaggactgcaaccacccttccagtgctgacaagcacagccacaaaatccacagctaccagctttacacccatcccctcctccaccctgtggaccacgtggaccgtcccagcacagaccaccacacccatgtccaccatgtccacaatccacacctcctctactccagagaccacccacacctccacagtgctgaccaccacagccaccatgacaagggccaccaattccacggccacaccctcctccactctggggacgacccggatcctcactgagctgaccacaacagccactacaactgcagccactggatccacggccaccctgtcctccaccccagggaccacctggatcctcacagagccgagcactatagccaccgtgatggtgcccaccggttccacggccaccgcctcctccactctgggaacagctcacacccccaaagtggtgaccaccatggccactatgcccacagccactgcctccacggttcccagctcgtccaccgtggggaccacccgcacccctgcagtgctccccagcagcctgccaaccttcagcgtgtccactgtgtcctcctcagtcctcaccaccctgagacccactggcttccccagctcccacttctctactccctgcttctgcagggcatttggacagtttttctcgcccggggaagtcatctacaataagaccgaccgagccggctgccatttctacgcagtgtgcaatcagcactgtgacattgaccgcttccagggcgcctgtcccacctccccaccgccagtgtcctccgccccgctgtcctcgccctcccctgcccctggctgtgacaatgccatccctctccggcaggtgaatgagacctggaccctggagaactgcacggtggccaggtgcgtgggtgacaaccgtgtcgtcctgctggacccaaagcctgtggccaacgtcacctgcgtgaacaagcacctgcccatcaaagtgtcggacccgagccagccctgtgacttccactatgagtgcgagtgcatctgcagcatgtggggcggctcccactattccacctttgacggcacctcttacaccttccggggcaactgcacctatgtcctcatgagagagatccatgcacgctttgggaatctcagcctctacctggacaaccactactgcacggcctctgccactgccgctgccgcccgctgcccccgcgccctcagcatccactacaagtccatggatatcgtcctcactgtcaccatggtgcatgggaaggaggagggcctgatcctgtttgaccaaattccggtgagcagcggtttcagcaagaacggcgtgcttgtgtctgtgctggggaccaccaccatgcgtgtggacattcctgccctgggcgtgagcgtcaccttcaatggccaagtcttccaggcccggctgccctacagcctcttccacaacaacaccgagggccagtgcggcacctgcaccaacaaccagagggacgactgtctccagcgggacggaaccactgccgccagttgcaaggacatggccaagacgtggctggtccccgacagcagaaaggatggctgctgggccccgactggcacaccccccactgccagccccgcagccccggtgtctagcacacccacccccaccccatgcccaccacagccgctctgtgatctgatgctgagccaggtctttgctgagtgccacaaccttgtgcccccgggcccattcttcaacgcctgcatcagcgaccactgcaggggccgccttgaggtgccctgccagagcctggaggcttacgcagagctctgccgcgcccggggagtgtgcagtgactggcgaggtgcaaccggtggcctgtgcgacctcacctgcccacccaccaaagtgtacaagccatgcggccccatacagcctgccacctgcaactctaggaaccagagcccacagctggaggggatggcggagggctgcttctgccctgaggaccagatcctcttcaacgcacacatgggcatctgcgtgcaggcctgcccctgcgtgggacccgatgggtttcctaaatttcccggggagcggtgggtcagcaactgccagtcctgcgtgtgtgacgagggttcagtgtcggtgcagtgcaagcccctgccctgtgacgcccagggtcagcccccgccgtgcaaccgtcccggcttcgtaaccgtgaccaggccccgggccgagaacccctgctgccccgagacggtgtgcgtgtgcaacacaaccacctgcccccagagcctgcctgtgtgcccgccagggcaggagtccatctgcacccaggaggagggcgactgctgtcccaccttccgctgcagacctcagctgtgttcgtacaatggcaccttctacggggttggtgcaaccttcccaggcgcccttccctgccacatgtgtacctgcctctctggggacacccaggacccaacggtgcaatgtcaggaggatgcctgcaacaatactacctgtccccagggctttgagtacaagagagtggccgggcagtgctgtggggagtgcgtccagaccgcctgcctcacgcccgatggccagccagtccagctgaatgaaacctgggtcaacagccatgtggacaactgcaccgtgtacctctgtgaggctgagggtggagtccatttgctgaccccacagcctgcatcctgcccagatgtgtccagctgcagggggagcctcaggaaaaccggctgctgctactcctgtgaggaggactcctgtcaagtccgcatcaacacgaccatcctgtggcaccagggctgcgagaccgaggtcaacatcaccttctgcgagggctcctgccccggagcgtccaagtactcagcagaggcccaggccatgcagcaccagtgcacctgctgccaggagaggcgggtccacgaggagacggtgcccttgcactgtcctaacggctcagccatcctgcacacctacacccacgtggatgagtgtggctgcacgcccttctgtgtccctgcgcccatgagccccccggcctgtgtgtggcaccccgcgctccgtgctcctgctgcccaccttggccttgcccctccctga

SEQ ID NO: 128590 - DNA, 17121 bp, Artificial Sequence
  derived and/or modified sequence
atgggcgcccccagcgcctgccggaccctggtgctggccctggccgccatgctggtggtaccacaggccgagactcaggggcccgtagaaccttcctgggagaacgcaggccacaccatggacggaggcgccccaactagcagcccaacacgacgggtttcatttgtccccccggtcaccgtgtttccatctttaagccccttgaatcctgcacataacgggcgggtgtgtagcacctggggagactttcattacaaaacgttcgatggggatgtgttcagatttcccggcctctgcaattatgtgttcagcgagcactgccgtgctgcctacgaagacttcaatgtccaactgcgaagagggttggtggggtcccggcccgttgtcacccgggtcgtgattaaggcccaggggctggtactggaagcaagtaacggaagcgtgctaattaacgggcagcgcgaagagctgccttactctagaaccggactgctggtggagcagagtggagattacatcaaagtgtctattcgtctggtcctgacttttctgtggaatggggaggacagcgcattgctcgaactggatccaaagtatgccaaccagacctgtgggctctgtggcgacttcaacggcctgcccgcttttaatgagttctatgcacacaatgctaggctcacccctctgcagttcgggaacctgcagaagttagacgggcctactgaacagtgccctgaccccctccctctgccggcaggaaattgcaccgatgaagagggcatctgtcataggaccttactgggccccgcattcgccgagtgtcacgctctggtcgactcaactgcttatctggccgcttgcgctcaggacctgtgtagatgtcctacttgtccatgtgcaacattcgtagagtatagccgtcagtgtgctcatgccggtgggcagccgagaaactggcggtgccccgagctctgtccccgaacatgccctctgaacatgcagcatcaggaatgtggatccccgtgtacagatacctgttccaatccccaacgggcacagctgtgtgaggaccactgcgtcgacggatgtttctgtcctccgggatccactgttctggatgatataacccacagcggatgtcttccactcgggcagtgcccatgtacccacggtggcaggacctatagccccggcacctccttcaacacaacatgctctagctgcacctgcagcggagggttgtggcagtgccaggacctgccttgccccggaacatgcagtgtccaaggaggggctcacatcagcacctatgatgaaaagctatacgacttgcatggcgattgttcttacgtgctctccaagaagtgcgccgattcttcttttactgtcttggccgaacttagaaagtgcggtctgacggacaacgaaaactgccttaaagccgttaccctaagcctggacggcggtgatacagccatacgcgtgcaggcagacggaggcgtttttcttaacagcatctatacacaactcccattatctgctgccaatatcaccctcttcactccatctagtttctttatcgtggtgcaaaccggactgggcctccagctgctagtccagctggtgccattaatgcaggtcttcgtgcgccttgacccagctcaccagggccagatgtgcggactttgtgggaatttcaaccagaaccaggcagacgatttcaccgcactgagtggcgtggtcgaggcaacaggagccgctttcgcaaatacatggaaggcacaagcggcttgtgccaatgccaggaattcattcgaggacccatgcagtctcagcgtagaaaatgagaattacgcacggcactggtgcagcaggctaactgaccccaattccgcattctcacgctgtcatagtattattaaccccaaaccatttcattcaaattgtatgttcgatacgtgtaactgtgaacgctccgaggactgtctctgtgccgcccttagcagctatgttcacgcttgtgcagctaaaggggtccagctgagtgattggcgtgatggggtgtgtaccaaatatatgcaaaactgccccaagtcccagaggtacgcatacgtggtagacgcatgtcaacctacctgcaggggcctctctgaagctgatgtcacttgctctgtctctttcgtgccggttgacgggtgtacgtgtcccgctgggaccttccttaatgatgcgggagcctgcgtacccgcgcaggagtgcccatgctacgctcatggtactgtccttgcacctggggaggtggtgcacgatgaaggtgcagtctgttcctgcacaggcggtaagctgtcatgcctgggggcctcactgcaaaaatcaaccggttgcgccgccccaatggtgtatctagattgctctaacagcagtgcaggtactccaggcgccgaatgcctgcgctcatgtcatactctggatgtcggctgcttttcaacacactgcgtgagcggatgcgtgtgtcctcctggcttggtgtccgacgggagcggtggatgcatcgctgaggaggattgcccatgtgttcataacgaggcaacatataaaccgggtgagactatccgcgtggactgtaatacctgtacttgtcgtaataggagatgggagtgcagtcacaggctgtgcctaggaacctgtgtggcttacggggacggccacttcataacatttgatggtgacaggtactcttttgagggctcctgcgagtatattctggcccaggattattgtggcgataataccacccacgggactttcaggatcgtgactgaaaatattccgtgcggcactaccggtacaacatgttcaaaagccattaaattatttgtagagagttatgaactgatcctgcaggagggtacttttaaggctgtagctcggggtccgggcggggatcccccttacaagattcgttacatgggcatatttctcgttatagagacacacggtatggctgtgtcttgggaccgaaagacttctgtgttcatacggctccaccaggactataagggacgagtgtgtggactgtgcggcaacttcgacgataacgccatcaatgattttgcgactcgctccagatccgtagtcggtgatgcccttgagttcgggaacagctggaaactcagtcctagttgtcccgatgcactcgcccccaaagacccttgcactgccaaccccttcagaaagagttgggcccaaaagcagtgctcaatcctgcacggacccaccttcgccgcatgtcgcagccaggtggactctaccaaatactatgaggcatgcgtgaacgacgcgtgcgcgtgcgatagtggaggcgattgtgagtgcttctgtacagcggtggcagcgtacgcgcaggcttgccacgacgccggcctgtgtgtttcgtggcggaccccggacacttgtccactgttttgcgacttttacaatccgcacggcgggtgcgaatggcactatcagccttgcggtgccccttgccttaaaacctgccgaaatcccagcggccactgcctggtggatttaccaggcctggagggctgctaccctaaatgtccaccgtcgcaacctttttttaacgaggaccagatgaagtgtgtggcccagtgcgggtgttacgataaagacggaaactattatgatgtaggtgccagggtgcccaccgctgagaattgccagagctgcaactgcaccccatctggcattcagtgcgctcattccctggaggcatgtacttgtacttatgaagaccgtacttattcctatcaggacgtcatctacaacactaccgacgggctcggcgcttgccttatcgccatctgcggctccaacggaaccattataaggaaagccgtggcctgtcctggaacaccggcaaccacccctttcactttcactaccgcctgggtcccacactcaaccacatctccagcacttccagtgagcactgtatgtgttcgggaggtttgtagatggagctcatggtataatggccataggccggaaccaggtctcggaggcggcgattttgagacctttgagaacttgcgccagcgagggtaccaggtatgcccagtgctcgccgacatcgaatgccgagccgcacagttgccagatatgcctctggaggaactggggcagcaagttgattgtgaccgtatgcgcggcttgatgtgcgctaactcgcaacagagtcccccactgtgtcatgattatgagctaagagtactgtgttgtgagtatgtgccctgtggccctagccccgcccccggcacgagcccccagccctctctgagtgcttctaccgaacccgccgttcccactccaactcagaccacagcaaccgagaagactacactttgggtgacacctagcattcgcagcactgccgccctcacttcccagaccgggtcctcttccggcccggtgacagtgaccccttccgcgcccggcacgacgacctgccagcctaggtgtcagtggaccgaatggttcgatgaggactatcctaaaagcgagcagctgggaggcgacgtagagtcttacgacaaaattagggccgcgggaggccatctctgccagcagcctaaagacatcgagtgccaggccgaaagcttccctaattggaccctggcgcaggtggggcagaaagttcattgcgatgtccatttcggcttagtgtgtaggaactgggagcaggaaggggtgtttaagatgtgttacaactaccgaattcgagtgctatgttgctccgatgaccactgccgcggcagggccacaactccaccccctaccaccgaactagagacagccacaaccacaactactcaggcacttttttctaccccacaaccaaccagttctccaggactgactcgtgcaccccctgccagcacgacagccgtccctactctgtccgaggggttaacttcgccccgttatacatctacccttgggaccgccaccaccgggggacctaccacacccgcagggagcacagaacctacagtgcctggagtagccacatccaccctgcccacacgctctgcattgcccggaaccactggaagcctgggcacctggagaccttctcagcctcctacactggcacctactacaatggctacatcccgcgcgaggcccacaggtaccgctagtaccgcctctaaggagcctttaactacttctttagcccccacgttaactagcgaactcagcacctcacaagcagaaacgtccaccccacggacagagaccactatgtcacccctgactaatactaccacaagccaaggtacgacccgctgccagcctaagtgtgagtggacagaatggtttgatgttgacttccctacatccggtgtagctggcggcgacatggagacctttgaaaatattagggctgcaggaggcaaaatgtgttgggcaccaaagtctatcgaatgccgcgcggagaactatcccgaagtctcgatcgaccaggtaggccaggtactgacttgctcattagagacgggcctgacttgcaagaatgaagaccagaccgggcgattcaatatgtgctttaactacaacgttagagtgctctgctgcgatgactattctcactgcccttctactcccgccacaagttctacagccaccccttcctccacaccaggcacaacatggattctgacaaagccgactactaccgccactacgacagcctctactgggtcaactgccaccccaacatctacactgaggactgctccgcccccgaaagtgctgactacgactgccactacccccacggtcacctccagtaaggcaacccctagcagttcacctggcaccgcgactgctttgcctgccttacgttcaactgctactaccccgacagccactagcgtgacccccatcccgagcagctctctggggacaacctggacccggttaagccaaactaccactccaactgccacaatgtctacggcaaccccctcctcaacacccgaaactgctcacacctctaccgtgctgaccgcgaccgctactactacaggcgccacaggcagtgttgccaccccatcttctacgcctggaacagcacacaccactaaggtgccaactacgactacaactgggtttactgctacaccctctagcagccccggcactgccctgacaccccccgtttggatttctaccacgaccacccccacaaccagagggtcaaccgtcacaccctcaagcatccccggtacaacccataccgccaccgtcttgactacgacaacaaccacagtggcaacaggatcgatggccaccccttctagtagcacgcagacgagcggcacaccaccctccctgaccaccaccgcaacaactattacagctaccggctctaccaccaacccatcctctaccccaggcaccacaccaatcccccctgtgctaaccaccacggccactacgcccgctgccacctccaacacagtcacacccagctcagccttggggacaacacataccccacccgttcccaatactatggcaacaactcacggaagatctctgcccccttcgagtccacacactgtcagaactgcctggacttcagccacaagcggcattttagggactacacacattaccgaacctagcaccgtaacctcacacacactggccgcgactaccggtaccactcagcattctacgcctgcgctgtccagtccacacccttcatctcggaccaccgagagcccaccttctccgggaacaaccacacccggtcacactactgccactagtcggaccaccgctacagcaaccccgagtaagactagaacatcaaccctgctgccttcttcgccaacatccgcgccgatcactacagttgtgaccatgggctgtgagccgcagtgtgcatggagcgaatggctcgattactcttaccccatgccaggcccttcagggggggacttcgatacctatagcaacatccgagccgccgggggcgctgtatgtgaacagcccctgggtctcgagtgtagggcccaggcacagcccggcgttccattgcgggagctgggccaggtggttgaatgctctctggactttgggctagtgtgcagaaaccgcgagcaggttggcaagtttaaaatgtgttttaactacgagattagagtgttttgctgcaattacgggcattgcccttccactccagcaacttctagtacagccatgccctcgtctacacctgggacaacttggattttgactgagctgacaaccacagccaccactaccgagtcaacaggctctaccgccacaccttcatccacacctgccactgcgggcactccccacgtgtctaccactgccaccacgccgactgtgacatcgagtaaggccacacccttcagctccccagggactgcgactgcactaccagcactcaggtcaacagctaccactccaactgctacaagtttcactgcgatcccctcttcatcactgggcaccacctggaccaggctaagtcagactactacccctacagctaccatgtcaacggcgactccaagttctacacctgagaccgttcacacctctaccgtgctgaccaccacagcaactacaacaggcgccacgggtagcgtggcaacaccctcgagcacaccgggcacagcccacaccaccaaagtgctgactaccactaccaccggcttcacagcgacccccagttcttcccccggaaccgccaggacgcttcccgtgtggatttcaaccacaactacaccaactaccagaggctccaccgtgacacccagctccataccggggacaacccatactccgactgtcctaacaactactacaaccactgtcgcgaccggctctatggctactccctcaagctcaacacaaacctctggaacacctccctctctcacaaccaccgctaccaccattacagcaactggctctacaaccaacccctcatctacccccggcaccaccccaatccctccagtgctcacgactaccgcaactacacccgcggctactagctccaccgttactccctcatccgcactcggcactacccacaccccacctgtcccaaacaccacagccaccactcacggcagaagcctctcgccatcctctcctcatacagttcggaccgcctggacttcagccacgagcggcacgctaggtaccacccacattaccgagccttctacaggcaccagccacactcctgctgccacaaccggcactacacagcacagcacccctgcactcagcagtcctcacccctctagcagaaccacagagagcccccctagccctggcacaactacccccggccacacacgcgctactagccgaaccaccgctaccgctactccttctaaaaccagaaccagcacgcttcttccctcctcacctacgtccgcaccaattacaactgttgtgacgatgggctgcgaaccgcagtgtgcctggagcgagtggcttgactactcgtaccccatgccaggacctagcggtggtgatttcgacacatactctaacattcgcgccgccggaggtgctgtctgtgagcaacctctagggctggagtgtagagctcaggcccagcctggcgtgcccctgcgggaactggggcaagttgttgagtgttccctggatttcggactggtttgtagaaatcgagagcaggtcggaaaatttaagatgtgttttaactatgagatccgggttttttgttgcaactatggacactgcccctccacccctgctacatctagcacagcaactccctccagcacacccggcacaacttggatactcaccgaacagactactgccgccactaccacggccacaacgggcagcacagccatccccagctcgacaccgggaaccgctcctccacctaaggttctcacttccaccgccaccaccccaaccgccacctcaagtaaagccacaagttcatccagtcccaggactgctaccactctccccgttcttacttctacggccaccaaaagcaccgccacttcctttacacctattccaagctttacactgggcacaaccgggaccctaccggagcagacaactacacctatggctaccatgagcactattcatccctccagcacccctgagactactcatacctctaccgtgttgaccactaaggccacgacaactcgggctacatcttcaatgtccacacctagtagcacccccgggactacttggatcctgactgagctcaccactgccgctacgaccaccgcagctacaggccccacagccacgccaagttccacccctgggacgacctggattttgacagaaccctccaccaccgcaacagtgaccgtccccacaggatctacagccaccgccagtagcacccgcgccaccgccggtacactcaaagtgctgacctccaccgctacaacacccaccgttatttcctctcgggccacccccagcagttcccccggaacagccactgcgttgccggctctcaggtccacggcgaccacacccactgccactagcgtcactgccattccatccagtagtctcggaactgcttggactaggctgtctcaaaccaccaccccaaccgccaccatgtcgacagccactccttcttctacaccggagacggtccatacctccacggtactgacaactacgaccacaaccaccagggccactggcagtgtagctacgccttccagcaccccaggaacggcacatacgacaaaggtgccgacaacaacaaccactggttttacggctactccatcgtctagccccggaactgcactgaccccacccgtgtggatttctactactaccacccctacgacaagggggagcactgtcacgccaagctccatacctgggactacccacacggccactgttcttacaactacgaccacaaccgtcgctacagggtcaatggccaccccatcctcctccacccagacctccggcactccacccagcttgaccacaacagcaacaaccattacggccacaggctcaacaaccaaccccagcagtacacccggcacgacccctatccctcccgtgttgaccacaaccgccacaactcctgcagcaaccagctctaccgtgacccctagctccgccctggggactacccatacacctcccgtgccgaacaccaccgcgactactcacggtaggtccttgcctcccagctcaccccacactgtgcgtactgcgtggaccagcgccacttcggggatactgggcacaacgcatatcacggagccgtcaaccgtgacatcacatacaccggctgctacgacctccactacacagcactccaccccagctctatcatcacctcatccatcttccaggaccacagaatctcccccttcgccaggaaccacaacccctgggcacacaagaggcacgagtagaacaactgcgacagcgaccccaagtaaaacgaggaccagtaccttgttgccatcgtcccccacctcagcacctattaccaccgtggtcaccaccggctgtgagcctcagtgtgcctggagcgagtggttggactattcttatcctatgcctgggccgtccggcggcgattttgatacctattccaatatcagggcagccggaggggcggtgtgcgaacagcccctgggtctagagtgccgagcacaggctcagcccggtgttccacttagggagctgggccaggtcgtggaatgttcattggactttggacttgtctgccgaaaccgtgagcaggtcgggaaattcaagatgtgctttaattatgaaatcagagtgttttgctgcaattatggacattgtccgagcactcccgccacgtccagcacagctactccttcaagcactcctggaactacctggatcctcacgaaactgacaaccactgcaacgaccactgagtccacgggttcaacagccacaccctctagtacacccggtgccactgctggaacccctcacgtttcaaccacagccaccacacccacagttacctccagcaaggccactccattctcctctccaggaaccgctacagcgctccctgcactgcgctctacagccactacaccaaccgctacctcctttacggccatcccaagcagctctttgggcaccacatggacgcggttgagccagacaacaacgcccactgctaccatgtctacagccaccccatcaagcacgccagaaaccgctcatacaagtaccgtgctgacgacaaccgctaccactactagggctacaggttccgtggcaaccccttcaagtacacccggaaccgctcacaccaccaaggttcccactacaacgactaccggatttactgtgaccccgagctcctcgccaggcacggctagaactcctccagtgtggatatcaactactaccactcccacgacctccggtagcacagtgacaccgagttccgtccccggtacaactcacaccccaactgtgctgactaccaccaccactaccgtggctaccggaagtatggccacgccctcttcttctacccagacttcagggactcctccatccctcattacaactgctacaactattaccgccaccggcagcactactaacccaagttccactcctgggacaaccccaatcccccccgtcctgacgacaactgctacaacacctgctgctaccagctcgacagtgacgccaagcagcgccttggggaccacacatacacctccagtgcccaatactacggctaccacccatggaagatctctttcgccctcttcccctcataccgttagaactgcctggacttccgctacctctgggactctggggactacccatatcacggagcctagtactggtacatcccataccccagcagcaacaacaggaacaacgcagcactctacccctgcgctctctagcccgcaccccagttcccggaccaccgaatcgcctcctagcccagggacaacaactcctggccacacgaccgctactagtcgtaccactgctacagcaacaccctccaagactcggacctcaaccttactgccgtccagccctacatccgcaccaattactaccgttgtgacgaccggatgcgagccgcagtgcgcctggagcgaatggctggactactcctatccaatgcctggtcctagcggcggagacttcgacacatactcaaatatcagagcagcaggaggtgccgtctgtgagcagccactgggcctggagtgcagggcccaggcacagccaggggtgcctttgggtgagttgggccaagtggttgaatgttcattagactttggcttggtctgccggaaccgagagcaggtagggaagtttaagatgtgcttcaactacgagatcagagtgttctgctgtaactatggacattgtccatctacccctgccacctcttcgacagctatgccttcttctactcctggcacaacgtggattctgacagagctaacaactacggctaccaccacagcctcaacaggatcaaccgctacaccaagttctactcctggaactgctcctcctccaaaagtattaacctccccagctaccacaccaacagccacatcttcgaaagccacgagctccagttctcccaggaccgctaccacccttccggtcctgacttccactgccaccaaaagtactgcaacctctgtaacgccgattccatctagcaccctcgggacgacaggcactttacctgagcagaccaccacacccgtggctacaatgtctacaattcatcccagtagtacccctgaaaccacccataccagcacagttttgaccacaaaggctaccactacacgggcgaccagcagcacttcaactccctcatctacacctgggaccacttggatccttaccgagctgaccacggctgcaaccaccaccgccgctaccggccccacagccactccctcctctacccccgggaccacctggattctcacggagctgacaacaactgctaccactaccgcatccaccggttcaaccgccaccccgtcgtcgaccccagggactacttggattctgacagagccgtccactactgcaacagtgaccgttcccacgggcagtacggccacagcgtcgagtacacaggcgactgccggcaccccccatgtgtccacgaccgccaccaccccaacagtgacctcctccaaggctacaccaagctcttcacctgggactgctacagctctgccagccttgaggtctacagccaccacgccaacagcaacctcattcaccgcaataccatcatcttcgttaggcactacgtggacccgcttgagccagaccacaacacccacggcaaccatgagcactgcgacgccttcctctactccagagaccgttcatacgagcactgtattaactgccaccgccacaacgactggcgcaaccggtagcgtcgccacacccagctcaacacccggaactgcccataccaccaaggtgccaactaccacaaccacgggctttactgcaacaccctcgagttctccaggcacagcactgactccaccagtgtggatctcaaccaccactactcccacgacaacaacccccactacgagcgggtctaccgtcacacctagcagcatcccaggtaccacacacaccgcaagggttctgacaaccactactacaaccgtggccaccggctctatggccaccccaagtagctcaacacaaactagcggtaccccacccagcctcacaacaaccgccaccaccattaccgcaacaggctccacaactaatccatcttcgaccccaggcacaacccctataacgcctgtgctcacttcgaccgcaactacacctgctgccactagttccaaagctacgtccagctcctcaccccgcaccgccactactctgcctgtgctcaccagcactgctacaaagtccactgctaccagtttcacgccaataccctcctccacattatggaccacttggaccgtccctgctcagaccaccacacccatgtctacaatgtccacaatccacacatcatctactcccgagacaacacatacctccactgtgctaactaccactgccaccatgactcgcgcgaccaattcaaccgcaaccccatcatccacattgggtacgacaaggatattgactgaactgacaactaccgcaactacgacagcagcgactgggagtacggccactctgtctagcacgcctgggaccacctggatactcacagaacccagtactatcgccactgtgatggtgccaaccggttctaccgccactgcttcgtctactttgggaactgctcacacgccaaaggtcgtcacgaccatggctacgatgccgactgcaactgcctccaccgtcccctccagctccacggtaggcactacgcggacccccgctgtgcttccgtcatccctccctacattctccgtgagcacggtgagcagtagcgtactgacgactctacgccccaccggcttcccatcttcccatttttccacaccctgcttctgccgcgcttttggacagtttttcagtccgggagaggttatctataataagactgaccgagccggatgtcacttctacgctgtctgtaatcagcactgcgacatcgacaggttccagggggcctgtcctacatctccgcctcctgttagcagcgcccctctgtcctcaccatccccagctcccggttgtgataacgccatcccattaagacaggtgaacgaaacgtggactctggagaactgcacggtggctagatgcgtgggagacaatagagtagtgctgctcgatcccaaacctgtggcaaacgtcacctgtgtgaataaacatcttcctatcaaagtgagcgatccctcacaaccctgtgactttcattatgaatgtgaatgtatctgctccatgtggggcggatcccattactccacttttgacggcacaagttacacctttcgcggcaattgcacgtatgtgttgatgagagaaatacacgcacgcttcggaaacttgagcctgtacttggataaccattattgcacggcctctgctactgccgctgcggccaggtgtccccgcgcccttagcatacactacaagagcatggacatcgtacttacagtgacgatggtccatggcaaagaagaaggcttgatcctgtttgaccagatacctgttagtagtggttttagcaagaacggtgtgctcgtgtccgtgctgggaactaccacaatgcgcgttgatatcccagccctgggggtgtcggtcacttttaatgggcaggtcttccaggcgaggctgccgtactcactcttccacaacaacactgaaggtcaatgtgggacctgtactaataaccagcgggatgactgcttgcagagagacggtacgaccgctgcatcttgcaaagacatggccaaaacctggctagtgcctgactctcgtaaagatggttgctgggcacccaccggcaccccgcccacggctagtcctgcagcacccgtgagttcaactccaacgcctaccccctgccctcctcagcctctctgcgatctgatgttgtcccaggtgttcgctgagtgccataatctggtgcctccaggaccgttcttcaacgcgtgcatttcagatcactgcagaggaagactcgaggttccctgccagtctttggaggcctatgcagagctttgtcgggcacgcggcgtatgtagtgactggcggggagccaccgggggcttgtgtgatcttacctgccccccaaccaaagtatacaaaccctgcggccccattcagcccgccacgtgtaacagccggaaccagagccctcagctggaagggatggctgaagggtgtttttgtccagaggatcaaatcctcttcaatgcacacatggggatttgcgtgcaggcctgtccgtgcgtcggaccagacggctttcccaaattccctggcgaacgctgggtgagtaattgtcagtcttgtgtctgtgacgagggatccgtgtcagtgcaatgcaaaccacttccatgcgacgctcagggccagccccccccttgcaacagacccgggtttgttaccgtgacgcgacctcgcgcagagaatccctgttgcccggaaactgtgtgtgtgtgtaacaccacgacctgcccccaaagtctcccagtgtgtccacctgggcaggagtcaatctgcacccaggaagagggagattgttgcccgacatttcgttgccgcccacagctgtgctcctacaacggaaccttctatggagtaggagcaacctttcccggtgccctgccttgccacatgtgcacgtgcctgtcgggggatacccaagatcctacagtgcagtgtcaggaggacgcctgtaataataccacatgtccccagggattcgagtataaaagagtggccggccagtgctgtggagagtgtgttcagacagcttgtctcacacccgatggacagcccgtgcagttaaatgagacctgggtaaatagccatgtggataactgtacagtgtatttgtgcgaggcagaaggcggtgtgcaccttctgacaccccaacccgcctcatgccctgatgtaagttcgtgtcggggtagcttgcgcaagaccggctgctgttactcttgcgaagaggactcttgccaagtccggattaatacaacaatcttatggcatcagggttgcgaaaccgaagtaaacattaccttctgcgaagggtcatgccccggagcctccaagtacagcgcggaagcacaggcaatgcagcaccagtgcacctgctgtcaggagcgacgagtccacgaagagacagtaccactccattgtccaaatggctctgcgatcctgcacacctatacgcatgtggatgagtgtggatgcaccccattttgtgtccccgctcccatggctcctccacacacccggggatttcccgcacaagaggctaccgctgtgtag

SEQ ID NO: 128591 - DNA, 16587 bp, Artificial Sequence
  derived and/or modified sequence
gccccccggatgggcgcccccagcgcctgccggaccctggtgctggcacttgcagcaatgctcgttgtcccacaggctggcaaatccccccccctcagaccgctgtccagaaattctggagccggacttgatggtggagcgccaacaagcagccccacaagaagggtcagcttcgtgccacctgtgactgtgtttcctagcctgagccggaagcaaatgcttccgctgccggcgggaaaaggcgtgttcgccagcccaaaggggggagggccagaccttggagttcagctgccccctgcactgaatcctgcccacaatggccgagtgtgcagtacttggggcgatttccactacaaaacatttgatggggatgtcttcagatttccaggcctgtgtaattacgttttttctgagcactgcagggccgcttacgaagatttcaacgtccaattgcgaaggggccttgttggaagcaggcccgtggtgacgcgggtcgtgattaaggcccaaggcctcgttctggaggccagcaacggatccgtgctgatcaatggacaacgcgaagaactcccttactcccggaccggcttactcgtggagcagtctggtgattacataaaagttagcatccggctcgtgctcacgtttctttggaacggagaagattcagcattactggagttggacccaaagtacgccaaccagacttgtggactgtgcggggacttcaacggacttcctgcctttaacgaattctacgctcacaacgcccggctcacccctctccaattcggcaatctccagaagctggacggtcctactgaacagtgccctgaccccctgcccctgccagccggaaactgtacagatgaggagggaatatgtcaccgtacactgttgggccctgccttcgctgaatgtcatgcactcgttgatagcaccgcgtacttggctgcgtgcgctcaggatctctgtagatgccccacttgcccctgtgccacattcgttgagtatagtcgacagtgcgctcacgcgggcggtcagcctagaaattggagatgcccggaactttgccctcgcacctgcccactgaacatgcaacaccaggaatgtggatccccgtgcactgacacttgcagcaacccgcagagagctcagctgtgtgaggaccactgcgtggacggctgcttctgccccccaggacgctcctgcaccgtgttagacgacattacccattcggggtgtttgcctctcgggcaatgtccttgtacgcacggtggccgaacctactctccaggtacttcatttaacacgacatgctcgtcttgtacttgctctgggggactttggcagtgccaggacttaccatgtcctggtacttgttccgtgcagggcggagctcatatctccacgtacgacgagaaactctacgacctgcatggcgactgctcatacgtgctgtccaaaaaatgtgctgattcttcctttacagtgctggccgaactgagaaaatgtggactcactgacaatgaaaattgcttaaaggctgtgaccctttccttggacggcggagacaccgccatccgagtgcaggccgacgggggcgtatttctgaattcaatttacacccagcttccgctgtcagctgctaacattaccctatttaccccgtcatcattctttatcgtggttcagaccggcctcgggctacagctcctggttcagctggtgcccctgatgcaggtgttcgtccgcctggatccagctcatcaaggccagatgtgtggcttgtgcggaaactttaaccaaaatcaagctgatgatttcaccgccctctcgggtgtggtcgaagccaccggtgcagctttcgcgaatacatggaaagcccaggcggcatgtgccaatgctcgcaatagctttgaagacccttgcagcctgtccgtcgaaaacgaaaattatgctaggcattggtgtagccgtttaactgatcctaatagcgcattttccaggtgtcactctatcataaatcctaagcccttccactccaattgcatgttcgatacgtgtaattgcgagcggagcgaggactgtctttgtgccgccctgtcctcatatgtgcatgcgtgcgccgctaaaggggttcaactctccgattggcgggacggagtctgcactaagtacatgcagaactgccccaagagccagcgatatgcatatgtagttgatgcgtgccaacccacctgtcgagggttgtctgaagccgatgtgacttgtagcgttagtttcgtacctgtcgatgggtgtacatgccccgcaggaaccttccttaacgatgcaggagcctgcgtcccagcgcaggaatgcccatgttacgcacatggtacagtgttggcacccggcgaggtggtgcacgacgaaggtgccgtctgcagctgcactggcggcaaactgagttgcctaggtgccagcctgcagaaatccactgggtgcgcagctcctatggtttacctggattgctccaacagttcagctggcaccccaggagcagagtgccttcgctcttgtcacacactcgacgtgggctgcttctccactcattgcgtgtctggttgcgtctgcccccccgggctggtgagcgatgggagcggcggctgtatcgccgaagaagattgtccctgcgtccataacgaggccacctataagcccggagagaccatccgagttgattgcaacacctgtacctgtcgcaacagaagatgggagtgcagccatcgtctgtgtctcgggacctgcgttgcgtacggggatggccactttatcaccttcgacggtgatagatactcctttgagggctcatgtgagtatattctggcacaagactactgcggcgacaatacgacgcatggaactttcagaatcgtcacagagaatatcccgtgtgggactaccggcactacttgttcgaaagctataaagttgttcgtcgaggttcgaactgccccggctgtgagcaccccggatccagcggctaatgagccagccccccgtgaggcttctgtgggctttcggcagaggctgccacctctccagagctacgagctcattctgcaggaagggaccttcaaggcagtggctcgcggacctggcggagacccgccgtacaaaatccgctacatggggatctttctcgtgattgagacgcacgggatggcggtgtcgtgggatagaaagacatctgtgttcattcgtctgcatcaggattacaagggcagagtgtgcggtctttgtggcaactttgatgacaacgccattaatgattttgcgacacgtagtagaagtgtcgtgggagacgccctggaatttggcaacagctggaaactgtctcccagctgtcccgatgccctagccccgaaagacccttgcacagccaatccattccgcaagtcgtgggcacagaagcagtgcagtatacttcatggaccgaccttcgcagcgtgccgcagccaggtggactctacaaagtattacgaggcttgtgtgaacgatgcctgtgcttgcgacagcgggggtgactgtgagtgtttttgtacagcagttgcggcctacgcccaagcctgtcatgacgctggactgtgtgtcagctggcggacgcccgatacatgtcctctattttgtgacttttataacccacatggagggtgcgagtggcactatcagccatgcggtgccccgtgtctcaagacgtgcagaaacccatcggggcactgcctggtggatctcccgggtcttgagggctgctatcctaagtgccctccctcccagccattcttcaatgaggaccagatgaagtgcgtggcccagtgtggatgctatgacaaagatggcaactactatgatgttggagctcgggttccaactgccgagaactgccaaagttgcaactgcacacccagtggaattcagtgtgcgcacagcctggaggcatgcacctgtacatatgaggaccgcacttatagttaccaggacgtcatttataacacaacggatgggctgggtgcctgcctgatcgccatatgtgggtctaatggaaccattattagaaaagcagttgcatgccccgggacccctgcaaccactcccttcacatttaccacagcctgggtccctcactccacaacctcccctgcccttccagtatcaacggtctgcgtccgggaagtttgtagatggtcaagctggtataatggtcacagacctgagcccggcctggggggtggggactttgagactttcgaaaacctccgccagcgcgggtatcaagtttgccccgtgttagcagatattgaatgcagagctgcccagctccccgatatgccactcgaagagttgggccagcaagtcgattgcgacagaatgcgtgggttgatgtgcgcaaacagtcagcaaagccctcccctatgtcacgattatgagctccgcgtgctatgttgcgagtacgttccatgtgggcctagcccagcccctggaacctcccctcagccaagcctttcagcgtctacagaaccagccgtccctaccccgactcaaaccacggcaaccgagaagactaccctctgggtgactccgtcaatacggtctaccgccgctctgacaagtcagacaggcagttctagtggacccgtgacggttacgccaagtgcaccgggtaccactacatgtcaaccaaggtgccaatggaccgagtggttcgatgaagactatcccaagtctgaacagcttggtggggatgtggaatcatatgacaaaattcgggcagctggaggccacctgtgtcagcagcccaaggacatagaatgtcaggctgaatccttccctaattggacattagcgcaagtgggccagaaggttcactgcgatgtgcactttggcttggtctgtcgcaattgggagcaagaaggcgtatttaagatgtgctacaattaccgcatccgagtactatgctgctcggacgaccattgcaggggccgcgcaaccacgcctccacctacaaccgagttggaaaccgccactacgaccaccacacaagccctgttctctacaccacagcccacctcctcgccagggcttacccgggcaccaccggcctcgaccaccgcagtgcctacgttaagcgagggactcactagcccacgttacacgagcacgctgggcactgctaccacaggcggccctacaactcctgctgggtcaaccgagcccactgttccaggggtcgcaacctcaacattaccaactcggtccgcattgcctggtaccacaggtagcctggggacttggaggccgagccagccccctaccctggcacccacaacaatggcaacttcacgggcacggcctaccggtaccgcctcaacagcatctaaggaaccactcaccactagcctcgctccaacactgaccagtgagctgtccacatcccaagctgaaaccagcacacctcgcaccgagaccacaatgtctcccctgaccaacactaccacctcccagggcaccactcgctgccagccgaaatgtgaatggacagaatggttcgatgtcgacttccctacgtctggagtcgctggaggagacatggagacctttgaaaacatcagagctgcaggcgggaagatgtgttgggcaccaaagagcattgagtgcagggcagaaaattatcctgaggtttctattgaccaagtggggcaagttctgacctgttcgctggagactggacttacctgtaaaaacgaggaccagacgggtaggttcaacatgtgcttcaattacaacgtgcgcgtgctctgctgtgatgactattctcactgtcctagtactcctgcaacctcctccactgccacaccgtcgagcactcccggcactacatggatcctaaccaagcccaccaccacagctacgactacagccagcactggctcaacagcaacacccacgtccaccctccgtacagcgcctccacccaaggttctcaccactaccgccacgactccgacagtgacttcatcgaaagcaactccgtccagttccccagggacagcaacagcattgccggctctgcggtctaccgctactacgccaacggctacctcggtgactcctattccttccagctccctgggcactacatggaccaggttgtcccagacaaccacacctacagccaccatgtcgaccgcaacccctagttctacccccgaaaccgcacatacatcaaccgttctgaccgcaaccgcaaccacaacaggcgctaccggcagcgttgcaactccaagtagcacccccggtactgcccacacaacgaaggtgcctactactaccactacaggattcacagcgaccccatcaagctcaccaggtacagcgctgaccccacccgtttggatctctactaccactacacccacgacccgggggagcacggtcacaccatcatccattcctgggactacccacactgccacggttttaactactacaacaaccactgttgccacaggatccatggctaccccatcaagcagcacccagacgtctggtacgacacacactcctcctgttcctaatactatggcgaccacacacggcagatcactgccaccatcctcccctcacacagtgcgcactgcgtggacgagtgcaacaagcgggattctggggactacacacataacggagcctagcactgtgacatcacacaccctagcagccactacaggcactactcaacattccactccagccctgtcctctccccatcccagctcaagaacaactgaaagccccccatctcccgggaccacgacacccggacacactactgctacttcccggaccacagcaacagccactcctagtaagacaaggacttccactttgctgccatcttcccccaccagcgccccaatcaccacagtggtaacaatgggttgcgaaccacagtgcgcttggtctgagtggctggactactcctacccgatgccaggaccttcaggaggtgacttcgacacatatagcaacattcgggccgctggaggagctgtctgcgagcagcccctgggtctggaatgtagagcccaggctcagccaggtgtgcccttgagagagctcggccaagtggttgagtgttcccttgactttggactagtgtgtagaaaccgagagcaggtgggtaaatttaagatgtgtttcaattatgagatccgcgtgttctgttgtaattatggacactgcccctctacccccgctacttccagtaccgccatgccatccagtacccccgggactacctggatcctgactgaactgaccaccacagccactaccacagaatcaaccgggagtaccgctaccccttcttccacacctggcacaacctggattctaactgagccttccacgactgccactgtgaccgtcccgacaggctctactgccaccgccagttcaactcaggctacagctgggactccgcatgtgtccaccacagccaccacccccacggtgaccagttcaaaggccacgccattctccagtcccggcaccgctacagcacttccagcactccgtagcaccgccaccacgcccaccgccacttcttttaccgccattccatcctcttctttaggcaccacttggaccagactgagccaaactaccacgcccacagcgacgatgagcacagccacccccagttctaccccagaaacagtgcacacctccaccgttctcaccaccacagctactacaacaggggccacagggagcgtagccacaccctccagtacacctggcactgctcacacaaccaaagtgctcacaacaaccacaaccgggtttaccgcgaccccgtccagttctcctggcacagctcggactctgcctgtctggatcagcaccacgactaccccaacaacccgcggttcaaccgtaactccctcttctatccccgggacgacccacacgcctaccgtgctgactaccaccacaacaacggtcgctaccgggagcatggccactccgagctccagcacacagaccagcggcaccacccacactccgccagtgccaaatactactgcaaccacccatgggaggtctttgtccccttccagccctcataccgtgcgcaccgcatggacttcagccacgtctggcaccctcggtaccacccacattaccgaaccctccaccgggacatcccacacaccagctgctactaccggcactacccagcattcaacccccgccttgtcttcaccccacccgagctcccgaactacagagtcccctccgtcccctggaactaccacacctggtcacacaagagcaacatctcgaacaactgctactgcaaccccaagtaagacgagaacctcaaccctgctgccgtcctccccaaccagcgctcccatcaccaccgtagtcaccatgggctgcgaaccacaatgcgcatggagcgaatggctggactattcctatcccatgcctggtccttctgggggggattttgacacctattccaacattcgggccgcaggaggggccgtgtgcgagcaacccctgggccttgagtgtagggctcaggctcagccaggggtgccactcagggaacttggccaagtagttgagtgctcacttgatttcggcctggtttgtcggaatagggaacaggtggggaagtttaaaatgtgcttcaattatgagatccgagttttctgttgtaattatgggcactgcccctccacaccggcaacgagttctacagctactcctagttccactccaggaacaacttggattttgacagagcagacaacagctgctaccactacagctacgacaggtagcaccgcaattccatcctcaacacctggcaccgcccctcctcccaaggttctgacatccaccgcaaccacccctactgccacatcttccaaggcaacatcctctagctcccccaggacggcgacaacactcccagtccttaccagtaccgctaccaaatctaccgctacttcctttaccccaatcccttcgtttacactgggcaccactggtacactgcctgaacagacaactactccgatggcgaccatgtctacgatccacccttcttccaccccagagactacacataccagcacagttctgaccaccaaggccacaacaactcgcgcaacatcaagcatgagcacaccaagttccactcccggcactacctggatcctaacggagctcacgaccgccgctacaacaacagccgccacaggaccaaccgccaccccctcctcgactcccggtaccacgtggatcctgactgagccaagtacaaccgcaaccgtaacagtgcccactgggagcaccgcaacagcctcttccacccgggcaactgccggaactcttaaagtcctcacctccaccgctaccacacctacggtcatatcctcacgggctactccctcatccagtcccggcaccgccacggccctccctgccctgcgttccaccgccactactcccacagccacttctgtgacggccatcccaagcagttcactcggtaccgcgtggacacgccttagccagactacgacgcctacagctacaatgtctacagcgactcctagtagcacacccgaaacagtgcatacttcgactgtacttacaaccaccactaccactactagggccacagggtcagtggcaacaccatcatcaactcctggtacagcccacaccaccaaagtgcctacaactactactacagggtttaccgcaacgccaagctcaagccctggcactgctctgaccccacccgtttggataagtaccacaactacccctactacacgaggttcaactgtcacccctagcagcatccctgggacaactcatacagctacggtcctgaccacaaccacaaccaccgtggccactggctctatggctaccccctctagctcgacgcagactagcggcaccacacacacaccccctgtgcccaacaccaccgccacaactcacggaaggtcattgcccccaagctcccctcatactgttcgtactgcctggacctcagcgacctcaggcatactgggcacaacccacatcaccgagccgtccactgtcacatcccatacccctgcagccaccacctctacaactcaacacagcaccccggcactgtcctccccacatccctcaagccgcacaaccgaatcgccaccatctccaggcaccaccacaccagggcacacacgtggcacttcgagaactaccgcgactgcaaccccatcaaagacccggaccagcaccctcttaccgagcagcccaactagtgcacccatcaccacggtggtgacaactggctgcgagccacagtgtgcttggtctgagtggctcgattactcataccccatgcccggcccaagcggcggggattttgacacatattcaaacatacgggcagccggtggagcagtctgtgagcagcccttagggctcgagtgccgtgctcaggcacagcccggagtgccgttgagggaattgggacaagtggtcgagtgttcacttgatttcggtctcgtgtgccggaacagagaacaagtgggaaagttcaagatgtgctttaactacgagatccgtgtcttctgctgtaactatgggcattgtccaagcacacccgccacatcatccaccgcaactcccagttccacgcctggtaccacctggatactcacgaaacttaccacgaccgcaactactacagagtctacaggatccactgccactccgtcttctacgcctggcaccacttggattctgacagagccttccaccaccgcaaccgtcaccgtgcccaccgggtctaccgctactgcatccagtacacaggctacagccggcactcctcacgtttctacaacagccacgactccaaccgttacctctagcaaagccacaccatttagtagtcctggcaccgctaccgctctgcctgccctccgctcaactgctaccacccccacagcgacatcgttcaccgccattccatccagctctctgggtaccacatggacaaggttgagccaaaccacaacccccactgccacgatgagcactgccacccccagttccacgcccgagaccgcacacactagtactgtcctaaccacgaccgccaccaccacacgggcaacaggatcagtcgccactccctcttctaccccgggtaccgcccatacaacgaaagtgccaactacaacaacgacaggatttactgtgacgccttcctcttctcccgggaccgctaggacgccgcctgtgtggatatcaactaccaccaccccaactactagcggtagcaccgtcaccccttctagtgttcctggcactacccataccccaaccgtgctcactactactaccactactgtcgcaaccgggtccatggccacaccctcttcaagtactcaaacatctggcaccacgcatacccctccagtccccaataccaccgctaccactcacggcagaagcttgtcaccaagctcccctcacacggtacgcaccgcgtggacaagtgccacatccggtactctggggacaacccatattaccgaacccagcacaggcacttcccatacccctgccgcaactaccgggactacacaacactctacccctgccctgtcatcaccccatccctccagccgaaccacagagagtccaccttcaccaggaacaaccacccccgggcatacaaccgcgacttctagaaccacagcgaccgcaactccctctaagactaggacttccacactcctgccctcctcccccacatctgccccaattaccacagtggtcaccacaggctgcgagccacagtgtgcttggagcgagtggcttgactacagctatcctatgcccgggcctagtgggggcgactttgatacctacagcaacatacgagcagccggcggagccgtgtgcgagcagccattgggtttggagtgtcgggcccaggcccagcccggggtaccattgggcgaattaggccaagtcgtggaatgttctctggatttcggccttgtgtgtcggaaccgcgagcaagtcggtaaattcaaaatgtgcttcaattacgaaatccgggttttttgctgcaactacggacattgtccttccacccccgccaccagctcgaccgcgatgccctcatcaacccctggcacaacctggatcctgacggaactgacgaccaccgcaaccactacagccagtaccggaagcacggctaccccgtctagtactccgggcactgcccctcccccgaaagtgctgacatctccggccaccacccctacagccacctcttctaaagcaacatcgagctcttcaccccgcaccgcaacaacactgccggttctcacgtccacagcaacaaagtcaactgccacttccgtgacacctataccgagttcaacacttggcaccaccgggacgttgcctgagcagaccaccacccccgtcgcaactatgtctacgattcacccaagctccacaccggagaccacgcacacttctacggtactgaccactaaagccacaaccaccagagcaacatcaagcaccagcacccccagttccacacctggcaccacatggatcctgaccgaactgactaccgctgcaaccacaaccgccgctaccggccctacagctacaccttcctctacaccgggcactacgtggatcctgactgagctaactaccacagcaacaaccactgcatcaaccggcagcacagccactccttcttctacccctggtacaacttggatcctaacagagccttctactaccgcaaccgttactgtgccgacaggatccaccgcgactgcctccagcacccaggctaccgctgggacaccacacgtcagcaccaccgctacaaccccaaccgtcacatcttccaaagccactcccagtagttctcctggaacagccacagctctcccagctctgcggagtaccgcaacaacacccacagccaccagtttcaccgccatcccctcgtcctctctgggcaccacctggactcgcttatctcaaactaccacacctactgcaacgatgtccactgccacccctagcagtacacctgagaccgtgcacacctctactgtacttaccgctaccgctacaaccacgggcgcaacaggcagcgttgccactccgtctagtactccgggaactgcccatacgaccaaggttccaaccactaccacaaccgggtttactgcaacaccatcatcctctcccggtacagcgctcacaccccccaccaccacacccatgtctaccatgtcaactatacatacatccagtacccccgaaaccacccacacctccacagtgctcacgacaaccgccaccatgactcgggccaccaattcgacagccacaccgtcttccacgctcggtaccacaaggatactcaccgaactaactaccaccgccactaccaccgctgcgaccggctcgactgctactcttagcagcactcccggtactacctggattctcaccgagccgtccaccattgccacagttatggtgccaaccgggtccactgcgacagcctcatccactctgggcaccgcccatacaccaaaggtcgtgacaaccatggcgacaatgcctaccgctactgcctccaccgtaccaagctcttcaaccgtgggtaccacgaggacacccgcagtgcttccttctagccttcctacgtttagcgtcagcacagtatcttcaagtgtgctcacgaccctgaggcctaccggcttcccctcatctcacttttcaaccccgtgtttctgccgtgccttcggacaattcttcagcccaggcgaagtcatctacaataagacagaccgggctggatgccacttttatgccgtgtgcaatcagcattgtgacatcgaccgctttcagggggcttgtcccacctcacctccgccagtaagtagtgctcccctcagcagcccaagtccagccccgggttgtgacaatgccatcccactccggcaggtgaacgagacatggactctcgagaactgcactgtggctcggtgcgtgggggataaccgggttgtgctgttggatccaaaacctgtggcgaacgttacatgcgtgaacaaacatctacccatcaaagtgagcgatcctagccaaccctgtgactttcactacgaatgtgagtgtgaatgcgttggtggccgcggaatcacaccaggagcgggcatctgctccatgtggggagggtcccattattctacctttgacggcacttcttataccttccgggggaattgtacctatgtgctgatgagagagattcatgcccgatttggcaatctctctctgtatctggataaccactattgcaccgctagtgcgaccgcagctgctgctcggtgtccccgagctctgtctatccattataaaagcatggatatagtcctgaccgttaccatggtccacggtaaagaggagggcctgatcctcttcgaccagattcccgtgtcttcaggctttagtaagaacggggtgttggtgtctgtcttgggtaccacgaccatgcgcgtggacatccctgccctgggcgtgtcggtaaccttcaacggccaggtgttccaagctcgacttccgtactcactctttcataataatacagaaggacagtgtggaacctgcaccaataaccagagggatgactgcttgcaaagagacggcaccacagcggcctcttgtaaggatatggccaagacctggttggtaccagattctaggaaagacggatgttgggctcccaccggtaccccccctaccgcgagccctgcagcccccgtgtcctccactcctactcccactccttgtcccccacagccattgtgtgatctgatgctgagccaagtatttgccgagtgtcacaacctggtacccccaggaccgtttttcaatgcctgtatttccgaccactgccgcgggaggttggaagtgccttgccagtctctcgaagcatacgccgaactgtgcagggcccgcggcgtgtgttccgactggaggggcgccacaggtggactgtgtgacctgacctgtccccctactaaagtgtacaagccttgcgggccaattcagcccgcgacgtgcaacagccggaatcagtccccccaactagagggcatggctgaggggtgtttctgccccgaagaccaaattctgttcaatgcacatatgggaatctgtgtacaggcttgcccttgcgtcgggccagacggcttccctaagttcccaggagagaggtgggtatctaactgccaatcctgtgtttgtgatgagggtagtgtatccgtacagtgcaaaccacttccttgtgatgcccaagggcaaccacccccatgtaataggcctgggtttgttaccgtgacacgacctcgagcggaaaacccatgttgcccagagactgtgtgtgtctgtaacaccactacctgcccacagtctctcccagtgtgcccccccgggcaggaaagcatttgcacccaggaagagggcgactgctgcccaaccttccgctgccggccacagttgtgctcatacaacgggaccttctacggagtaggcgcgacgtttcccggggctctgccctgccacatgtgcacgtgtttgtcaggagacacccaagatcccacagtgcagtgccaggaggacgcgtgtaacaacacaacctgtccccagggattcgagtacaagcgtgtcgcaggccagtgttgtggcgagtgcgtgcagaccgcatgcctcaccccggatggccagcctgtgcagctcaatgagacctgggtcaattcccatgtggataactgcaccgtgtacttatgcgaggccgagggaggagtgcatttgcttaccccacagccagcatcatgccccgacgtcagttcatgccgagggtccctcaggaagaccggatgctgttactcctgcgaggaagactcctgtcaagttcggattaataccaccattctctggcaccagggatgtgaaactgaagtgaacatcaccttctgcgaggggtcgtgccccggggcctctaaatacagtgccgaagcacaggcaatgcagcaccagtgcacatgttgccaggagcggagagtccatgaggaaaccgtacctctgcactgtcctaacggtagtgccattctgcacacatatacccatgcggtacaggtgctctgtgggcttctcgcatggggcctacaggccggaggacacatcaggggggcagttcaagacccacagcaaccactgaaagatcaggaggcatctggcaaggctcggcaggggggcgggtatcgccaaacggttgcatggggagacaagtcaaacgctagagcctggctgcaaaaacccgttgtgtgggtgcagtcaggcgccttcccgaccccagggccggcgtccgcactgtgcccatggtag

SEQ ID NO: 128592 - DNA, 17298 bp, Artificial Sequence
  derived and/or modified sequence
atgggcgcccccagcgcctgccggaccctggtgctggccctggccgctatgctggtggtcccgcaggcagaaacccaaggtcctgtggagccgtcttgggaaaatgctggccacactatggatggaggagctccaaccagtagtccaacacgtagggtgagttttgtcccccctgtgaccgtatttccttcactgtccccacttaatcctgcccacaatggacgggtgtgttccacttggggagatttccactataagacattcgatggcgatgtattccgcttccccggcctctgtaactatgttttctcagaacattgcagggctgcctatgaggacttcaatgttcaactcaggaggggcctggtgggcagtcgtcctgtcgtcacccgcgtggtcatcaaggcccaagggttagtactggaggccagcaacggctcagtcttgatcaatggccaacgcgaggaactaccctattctaggactggtctgttggtagagcagagcggagattatataaaagtgtcaatccggttggttctgacctttctctggaacggggaagactcggccttactcgaactggatccaaagtacgcaaaccaaacatgcggcctgtgtggcgacttcaacggcctgccagccttcaatgaattctatgctcacaacgctagattaacgcctctacagtttggcaacctgcaaaagctcgacggccccaccgagcagtgtcccgacccgctgccccttccagcgggcaactgtaccgacgaggagggcatctgccaccgtaccctccttgggccagcgttcgccgagtgccatgcgctcgttgacagcacagcatacctggccgcctgcgcccaggatctgtgtcgctgccctacctgcccctgtgcaacattcgtggaatattctcggcagtgcgcacacgctggcgggcaaccacggaactggcgatgtccagagctttgtccgcgaacatgcccgctgaacatgcagcaccaggagtgcggctcaccctgcaccgacacatgctcaaacccgcagcgagcccagctttgtgaggatcactgcgtggacggctgtttttgtcccccaggcagaagctgcaccgttcttgacgacattactcacagtggttgcttgcctctgggccagtgcccctgcactcacggcggacggacctactcccctgggacatcgttcaacacgacgtgcagctcttgtacatgttcagggggcttatggcagtgccaagacctgccttgcccggggacctgtagcgttcagggcggtgcacacattagcacatacgatgaaaagctatacgatctgcacggggattgctcttacgtgctcagtaaaaaatgcgcagactcttcattcacggttctggctgagttaaggaagtgtggcctgactgacaatgaaaattgcctgaaggcagtgacattatcactcgacgggggtgataccgcgatccgtgtgcaggccgatgggggagtgttcctgaactcaatttacactcagctgcctttaagtgctgctaatatcacacttttcactccgtctagcttcttcattgtggtgcagacagggcttggcttgcagcttttagtgcaacttgtccctcttatgcaagtttttgtaaggttagaccctgcccatcaagggcagatgtgcggcctgtgtggcaattttaaccagaatcaggccgatgacttcacagcactctcaggtgtcgtggaagctacaggtgccgccttcgccaacacatggaaggcccaggccgcctgtgctaatgctagaaattccttcgaggatccatgtagcctgagtgtggagaatgagaattacgccaggcactggtgcagcaggctgaccgatcccaactcagcatttagtcggtgccatagcatcatcaacccaaaacccttccactcaaattgcatgttcgacacctgtaactgtgaacgaagcgaagactgtctgtgtgcggctctgagcagctacgttcatgcctgcgccgcaaaaggtgtgcagctctcagactggcgcgacggtgtatgtaccaaatacatgcaaaattgtcctaagtctcagcgatacgcttacgtggtggatgcctgtcagccaacctgtcgaggcctctccgaagcagacgtgacttgctcagttagtttcgtcccagtggacggctgcacatgtccagccggaaccttcctgaacgatgccggggcttgtgtgccagctcaagagtgtccttgttacgctcacggcaccgtccttgcgcccggagaggtcgtccacgacgaaggcgccgtctgctcatgtaccggcggcaagttgtcctgcctaggtgcttcgctgcagaaatcaacaggatgcgccgccccgatggtgtacttggattgctctaactcctccgccgggacacctggtgctgaatgcctacggagttgccacaccctcgacgtcggatgcttctccacgcattgtgtgtctgggtgcgtttgccccccagggcttgtttcagacgggagtggcggctgcattgcagaagaggactgtccgtgcgtgcataacgaagccacttataaacctggggagaccatccgggtagactgcaatacctgtacctgtagaaacagaaggtgggaatgcagccatcgcctgtgtctcggcacgtgcgtcgcttacggcgacggccattttatcacatttgacggcgaccgttatagttttgaaggatcctgtgagtacattctggcacaagactactgtggcgataacaccacacatggcaccttccggattgttactgaaaacattccctgtggcacgacggggaccacctgctctaaggctataaagctgttcgtcgagtcttacgagctcatcctgcaggaggggaccttcaaggccgtggctcgtggtccaggtggcgatcccccatacaaaatacgctatatgggcatcttcctggttattgaaacacacggcatggcggtgagttgggatcggaaaactagcgtgtttattcgcctccaccaggattacaaaggccgagtttgtggtctgtgtggcaactttgacgataatgctattaatgattttgcaacccggtctagatcagttgtcggggatgctctcgagtttggaaacagttggaagctaagtcctagctgtcccgatgcactggcacctaaggatccttgtacagctaacccttttcgtaaaagctgggcccagaaacagtgctctatcctgcatggacctacgttcgccgcctgcaggagtcaggtcgacagtactaagtattacgaggcatgcgtcaacgacgcttgtgcttgcgacagtgggggtgattgtgaatgcttttgcacagcggtcgccgcatacgcgcaagcctgtcacgacgccggcttatgtgtgagctggcgcaccccagatacatgcccccttttttgcgacttttataacccacacggcgggtgcgaatggcactaccagccgtgtggtgccccatgcttaaagacctgtcgcaacccttctggacactgcttggtggacctgcctggactggaaggttgctatcccaagtgccctccttcacagcccttcttcaatgaagatcagatgaagtgcgtggctcagtgtggctgttacgataaagatggtaactactacgacgtgggggctagggtgcccacagccgagaattgtcaatcctgtaactgtacaccctctggaatccaatgtgcccattctctagaggcttgtacatgcacttacgaagatcgaacttactcctaccaggatgtgatttataataccaccgacggccttggagcttgccttattgccatctgtgggtcaaacggtacaatcatcagaaaggcagtagcatgccctggtaccccagccaccaccccatttacattcaccactgcctgggtgcctcattctaccactagcccagcgttgcctgtgtccacagtttgcgttcgcgaggtgtgcagatggtctagctggtacaacggacaccgtccggagcccggtctcggcgggggcgatttcgagacctttgagaacctccgtcaaagagggtatcaggtatgtccagtgcttgcagatattgagtgcagagcagcgcagctgccagatatgccccttgaagagctgggccagcaggtagactgtgaccggatgaggggcctgatgtgtgccaactcacagcagagcccacctttatgccacgattatgagctaagagtgctttgctgcgagtacgtaccctgtggacccagccctgctcctggcactagtccacagccatcacttagcgcctcgacagagcctgccgtccctaccccaactcaaaccaccgctactgaaaagacaaccctctgggtgacccctagtataaggtcaacagccgctctgactagccagactggcagtagctcaggcccggttaccgttacaccttcagcacctggcaccacgacctgtcagccaaggtgtcagtggactgagtggttcgacgaagattaccctaaaagtgaacagttagggggggacgtcgaaagctacgataaaattagagctgccggcggtcacctatgtcagcagcctaaggacatagagtgccaagccgaatcatttccaaactggaccttggcccaggttgggcagaaggtgcactgcgatgtgcactttggcctggtgtgccgcaactgggagcaagagggtgtgtttaagatgtgttataactacaggattcgcgttttatgttgctccgatgaccactgtagaggacgggccaccacgcccccccctacaacggaactcgaaaccgcgactactaccactacccaagctttgttttccacaccgcagcccacctcctcaccaggccttacacgagctcctcccgccagcaccaccgctgttcctaccctctctgaaggattgaccagccctaggtatacttccactctcgggaccgcaacaacaggaggcccgaccacccccgctgggtccaccgaacctaccgtgccaggagtggccacatctactttacccactaggagcgccctcccaggcactaccgggagtctggggacatggcggccgtcgcagcctccaacactagcccccaccactatggcaacctcacgcgcccggcccacggggactgcctcgaccgcgagcaaagagcctttgacaacttcactggcaccaacactcacatccgagctcagcacctcccaggccgagacctctacgcccaggactgagacaaccatgagccctttgacgaacacgacaacctctcagggcaccacccgatgtcaacctaagtgcgagtggaccgaatggttcgatgtggatttccctacttccggcgtggccgggggcgacatggagactttcgagaacatccgtgccgctggcggtaaaatgtgttgggctcccaagtccattgagtgtcgggctgaaaattaccctgaagtctcaatcgatcaggttgggcaggttctaacatgtagtctggagaccggactgacctgtaaaaatgaggaccagaccggtaggtttaacatgtgcttcaattataatgtgagagtgctgtgctgcgatgattattcccactgtcccagcaccccagcaacatcctccactgctaccccatcaagcacaccaggcacgacatggatcctgaccaagccaactaccactgccaccaccaccgcctccacagggtcaactgccacaccaacttcaacacttcggactgcccctcccccaaaggtgttgaccaccaccgccacaacccccaccgtaacatcaagcaaagcgacacctagctcctctccggggaccgcaacagccctcccagctctccggtccacagccacaactcctaccgctacttctgtgacccctatcccaagctctagcctgggcacgacatggacaagactgagtcagacaacgaccccgactgccaccatgagcacagcgaccccctcgtctacccccgaaaccgctcacacaagcacagtcctcaccgccacggccaccactactggggcaactggaagcgttgcaactccgagctccacacctggtaccgcacacacaacaaaggttccgaccacgaccacaactggatttaccgccactcctagctcgagtcccgggacggcgctcaccccgccagtgtggataagtacaaccactaccccaaccacaaggggcagcactgtgaccccctcttccattccggggactacgcatacagcgaccgtgctgacaactacaacaacaacagtcgccacgggctccatggctactcccagttcctctacccagactagcggaacacccccgtcccttaccaccacagccactacaataacggctacagggagcacaacaaatccctccagcactcctggaacaactccgattccaccagtcctgacaacaacagccaccacgcccgctgccacaagtaatacagtgactccatcctcagcgctaggcaccactcataccccccccgtcccaaacaccatggcaaccacccatgggaggagcttgccgcccagttctcctcatacggtaagaactgcctggacttccgcgacgtccggcattctgggcaccactcatatcacggaaccctccacagtcacctcacacacgctggcggccacaactgggacgacccagcatagcactcctgcgctgtcctcccctcatccatcttctagaaccaccgagtcaccaccctcccccggcactacaacaccaggccataccacagctaccagccggacgacagcaacagccacccccagcaaaaccagaacaagtactcttctgccttctagccctacctccgcaccaatcaccacggtggtcacaatgggatgcgaacctcagtgcgcttggtctgagtggctggactattcttaccccatgccgggcccaagtggcggagacttcgatacctattcaaacattagagccgcagggggtgctgtctgcgagcagccactaggattagagtgcagggctcaagcacagcctggggtccccctgcgcgagctgggccaggtcgttgagtgctccctcgactttggcctggtgtgtcgaaaccgggaacaagtgggcaagttcaagatgtgctttaactacgagatccgggtgttttgctgcaactacggccattgcccttctacaccagctactagctcgacagccatgcccagctcaaccccaggcacaacttggatcctgacggaactgactaccacagccaccactacggagtccaccgggtcgacagctaccccttctagcacccctggtactacgtggatcctgactgagccttccactacagcaacagtcactgtccctaccggcagtactgcgactgcatcctccacacaggccacagccgggaccccccacgtcagcaccactgctaccacacctactgtcacctccagtaaagccaccccattctcatcgccaggcacagctaccgccctgcctgccctgagatccacggcgacaactccaaccgccaccagcttcaccgcaatcccctcctcatcgctgggtaccacctggacccgcctctctcagactaccactccaaccgccacaatgtctactgcaacaccaagctccacccctgaaactgtgcacacttccacagtcctgactacaacggctacgacaacaggggcaactggctccgtcgctactccatcctccaccccaggaaccgcgcataccaccaaagtgttaactacaacaacaactggcttcaccgccactccctcctcgtcaccaggaaccgccagaaccctccccgtgtggataagtactaccaccacccccactactagaggcagtacagtcacaccttcttcaataccaggcacgacacacacccctaccgtccttacgactacaaccacaaccgtggccaccggctccatggccaccccttcatcttccacccaaaccagcggtactcctccgagcctgacaacaaccgctaccacaattactgcaactggctcaacgaccaatcccagctccacccccggaacaacacctatcccaccagtccttaccaccacagctaccaccccggcagcaacgtccagcaccgtaaccccctcatcagcgctgggtaccacacatactcctcccgtgcctaatactaccgccactacccacggtcggtccctcagtccgagctccccacacaccgttagaaccgcctggaccagcgcgacaagcggaacattaggaacgacccacattaccgaacctagcacaggcacctctcatactcccgctgcgacaacagggacaacccagcattccacgcctgccctgtccagtccacacccgtcttcacggacgactgagagcccccccagtccaggcaccaccactcctggccatacccgtgctacaagcaggactaccgccactgctacgcccagcaagaccaggacgagcactcttcttccaagctcgccgacatctgctccaatcaccacagtggtaaccatggggtgtgagccacagtgtgcatggtccgaatggctggactattcgtatccaatgccaggtccgtcaggaggggacttcgatacatattccaacatccgggccgccgggggggctgtttgtgagcagcccctgggactggagtgcagagcccaggctcagcccggggtgccacttcgtgagctgggtcaagtggtggaatgctccttggactttgggttggtttgtcgaaacagggagcaggtagggaaatttaaaatgtgttttaattatgagatcagagtgttctgctgtaactatggacactgcccgagcacacctgcaaccagctccacagcaaccccctcatctactccgggcacaacctggatcctgactgagcagacaacagccgccactacaaccgcaacaacaggctcgaccgcaattcctagttcaacacctgggaccgctcctccccctaaagtcctcacctctacagctacaactcctacagccacatcatctaaggctacatcgtccagcagcccaagaaccgctaccacgctgccagtgcttacgagcacggcaacaaagagcaccgccacctcttttacccctattccatcttttactctgggtacgacaggtacactgcctgagcaaacaacaacccctatggccactatgtctaccattcacccatcatccacccctgaaaccactcataccagcaccgtcctaaccaccaaggccaccacaactcgtgctacttctagtatgtcaaccccatcctccacacctgggaccacctggatcctgaccgagctgactactgcagctaccaccacggcagcgactgggccaacagccaccccctccagcacaccagggacaacttggatcctgactgagcccagcacgactgcgacagtgacagttcccacaggttcgaccgcaactgccagctccacccgcgcaactgctggtactctaaaagtgcttacttccactgccacaacaccgacggtcatcagtagcagagccaccccgagtagttccccagggacagctaccgcgcttcctgcgttaaggtccaccgcaaccaccccgaccgccacttctgtgacggctattccctcatccagcctcggaacggcttggacgcggttgagtcagactacaaccccgaccgcaactatgtcaaccgcaacccccagtagtactccagagacagttcatacttccaccgtgttgacaaccaccacaaccactacaagagccactggttccgtggctactccgtcttcaaccccaggaacagcacatacgaccaaggtccccacgactaccacaaccgggttcaccgcaacacccagttcttcacctggtactgctctcacaccccccgtctggatctccaccacaacaacacccacgacgaggggatccacagtcactccttcaagcatacctgggaccacgcataccgccacagttctcaccactacaacgaccactgtggcgactggatcaatggccaccccctcctcaagcactcagacaagtggaacaccaccctctttgaccaccaccgcaaccacaatcacggcaacggggtcaacaaccaacccaagctcgactcccggcacgacccccatccccccggtcctcaccacgactgcaactaccccagcggctactagctccaccgtaaccccatccagtgcgcttggaacaacccatactccccccgtaccgaatactacggccaccactcatggccgctcattaccacctagctctccacacacagttcgcaccgcctggacatccgcaacttctgggatccttggtacaacgcatatcaccgagccatctacagtgacgtcacataccccggctgctactacctccacgacccagcactcaaccccggccctgtctagtccacatccgtcaagccggactacagagagcccacctagccccggcacaacaacccctgggcatacacgtggaacaagccgcaccacagctactgccactccttcaaaaacaaggacgagcacacttctacccagttcgcctacatctgccccaattaccaccgttgttaccaccggctgtgaacctcagtgtgcctggtcagaatggcttgattattcctatccaatgccaggtcccagtggcggcgatttcgatacatattctaacataagggctgccggaggcgccgtttgcgaacagccactaggcctggagtgccgggcccaagcccagccaggcgtccctcttagagagctggggcaagtagttgaatgttctctggacttcgggcttgtctgtcggaaccgggaacaagttggaaaattcaagatgtgtttcaactatgaaattcgcgttttctgttgtaattacggccactgcccttccacacctgctacttcttctactgccactcccagctctacccctgggaccacctggatccttaccaaacttacaaccacagccactactacagagtcaaccgggtcaaccgctaccccctcaagcacacctgggaccacctggattctgaccgagccttctaccacggccactgttaccgtgccgaccggcagtaccgcaaccgcgtcctctacgcaggccaccgctggcactccccacgtgagcaccacagccacaacacctactgtgacatcctcaaaggcgactcccttctctagcccaggcacagccaccgccctgccagccttgcggtccacggctaccactccaaccgctacctcatttacagccatccccagtagttcgctaggtaccacatggacccgactgagccagaccacaacacctacagccacaatgtcaacagctacgccttccagcactcccgaaaccgcacacacttccacggtactcacaacaactgctactacgacccgggccaccgggagcgtcgccacaccatcctctactccgggcactgcacataccaccaaagtccccacaaccacaactacaggatttactgtgacacccagttcttcacctggcacagccagaacccccccagtgtggatcagcactacaaccactcccaccacgtcggggtctaccgtcactccttcatctgtgcccgggaccacacacactccgaccgtgctgacaacaacgacgacaaccgtggctactggcagcatggcaacccccagctccagcacacagacctccggaactcctccctctttgatcactacagctactaccattacagccaccggcagtacaacgaatccgtccagcacaccggggactacacccattccgcccgtgttaaccaccacggccaccacccctgcagcgacatcttccaccgtgactccgtcttctgcactgggaaccacgcatacgccccccgtgcctaatactaccgcaacgacacacgggcggagtctgtcaccctcatctccacatacggttaggaccgcttggacatcagctacatcaggaacactaggaacaacacatattacagaaccctctacggggaccagccacacccctgctgctacgacaggcacgactcagcactctacgcccgccctttcatcacctcacccaagctcacggaccaccgaaagtccgccttcccccgggaccaccacgcccggtcacaccacagctacaagtcgaacaaccgcaaccgcaaccccatccaagacccgaacctctacgcttttaccctcatctcctacctccgctccaattacgacggtggtgactactggttgtgaaccgcagtgcgcgtggagcgagtggctcgattatagttatcccatgccgggcccatccggaggtgacttcgatacctactctaatatcagggcggctggcggtgccgtatgtgagcagcctctcggcctggagtgccgagcccaggcacagccaggcgtccctttaggagagcttggtcaagtcgtggagtgttcccttgatttcggactggtctgtcgcaaccgtgagcaggttggtaagttcaaaatgtgcttcaactatgagattcgcgtattctgttgcaactatgggcactgtccatcgaccccagccacctcatcaacggccatgcccagctccactcctggcactacgtggattctgacagagctaacgacgacagcaacaacgaccgcatccaccggctcgacagctacccccagttccacccctggaaccgctccacctccaaaggtcctgacctcaccagccaccacaccgaccgccacaagctcaaaagccacttcctcctcttcaccacgcacagcaaccacattgcctgtgctcaccagcacggccactaagagcaccgccacttcggtgacccccataccttcctctaccctgggaactactggcactttaccggaacagactacgaccccagtggcaaccatgtccacaattcatccaagcagcactccagagactacgcatacctccactgtgctgacaacgaaggcaaccaccactagggccacctcgtcaaccagtacccccagctcaacaccgggcactacctggattctgaccgagctgaccaccgccgctaccacgactgcagcgaccggtcccacagccactccaagctctaccccggggacgacatggatcctgaccgaactgacgactaccgcaaccacaaccgccagcactggatctaccgcaaccccttcatctacccccggaaccacatggatactgactgagccttcaactaccgccaccgtgaccgtcccgacgggaagcacggcgacggcttcctctacccaggccacagctggcacaccccacgtctccacaacagccacgacacccactgttacttcgagcaaagctactcctagctcatcgcccggaacagctaccgccctaccagctctcaggtcaaccgcgactactcctaccgctaccagcttcaccgcgattccctcttcttcgctcggaacaacctggacgcggctcagtcagactactacacctaccgcaactatgtccacagccaccccatcttcgaccccggagacggtccacacatccactgtgcttaccgccacggcgacgaccaccggtgcaaccggctccgttgccactccatctagtacacctggcacagcccatactacaaaagtaccgacaactaccacgaccggatttacagctaccccttcctcatccccaggaacagcactgacccccccagtttggatctctacaactaccacacctactacgaccacacctaccacgtctggcagtacagtgacccctagcagcattcccggcaccacacacactgcccgcgtcctcacaaccacaaccaccaccgtcgccaccggcagtatggccacccccagctcctccactcagacctccgggacccctcctagtctgaccaccacagccaccaccataacagctaccggatctacgacgaatccctcttccacgcccggcaccacaccaatcacgcccgtcctaaccagtactgccactacacctgccgcaacttcatccaaggctacaagtagcagctcccccaggaccgcaaccactttgccagtgctgacttcaactgccacaaagtccacggccaccagttttacgcctatcccttcctccacattgtggactacttggacagttcccgctcagacaacgactcccatgtctacaatgagcaccattcacactagttctaccccagagactacgcatacgagtactgtgctgacaacgactgcaaccatgacaagagccactaactccaccgcaaccccgtcctcaacactcgggacgacacgaattctgactgagctcaccaccactgccaccactacagcagccactggatctacggccacattgtcgtccactcccggaacgacatggatcctgaccgagccttcaacaatcgcaaccgtcatggttccaacaggatccactgccaccgctagttccactctgggaactgcccacacaccaaaggttgtgacgactatggcgactatgccgacggcaacagccagtaccgtcccaagcagctccacagtagggacaacaaggacccccgctgtcctccctagttcactccccacattcagcgtgtccactgtgtccagcagcgtgctgactacactgagaccgaccggattcccaagttcccacttttctactccatgtttttgcagagcattcgggcagtttttctcacccggagaggtgatatacaacaagactgaccgggccgggtgccacttctacgcagtttgcaaccagcactgtgatattgaccgtttccagggtgcatgccctacatcccccccccccgttagctctgccccgttatctagccctagccctgcccctgggtgcgataatgcaatcccactacgccaggtaaacgagacgtggaccctggaaaactgcaccgtcgcccgttgtgttggggacaacagagtggtcctgctggatccaaaaccagtcgctaacgtcacatgtgttaacaaacacttgcccatcaaagtctccgacccctcacagccttgtgacttccactacgaatgcgagtgtatatgttccatgtggggtggcagccactattccaccttcgacggaacctcctatacttttcgggggaactgcacttacgtgcttatgcgggagatacacgctcggtttggtaacctgagcctttaccttgataaccactattgcaccgcgtccgctacagccgctgccgcaagatgccccagagcactctcaatacactacaagagcatggacatcgtgttgaccgtgaccatggtgcatggcaaagaagaggggctgatcctgttcgaccagattccggtgtccagtggattctccaaaaacggcgttctcgtgagtgttctggggacaaccaccatgcgggtagacatcccagcgctgggagtctcggtaacctttaacggtcaagtcttccaggcaagactcccctacagcctgtttcacaataataccgagggacagtgtggaacctgcacaaataatcagagggacgattgtcttcagagagacgggaccaccgccgcatcatgtaaggatatggctaagacctggctagtcccagattcgcgtaaggatgggtgttgggctccaaccgggacccctccgactgcctcccccgctgcaccagtcagtagtactcccactccaacaccctgtcccccgcagcccctgtgtgacctgatgttgagccaggtgttcgctgaatgtcacaacttggtcccccccgggcccttcttcaacgcttgtattagtgaccattgcaggggaaggctagaggtgccatgccagagccttgaggcctatgccgagttgtgcagggctcgcggggtctgtagcgattggcgaggggccaccggcggcctttgtgatcttacatgccctccgaccaaagtttataaaccctgtggcccaatacaaccagccacatgcaactctcgcaaccagtcaccacagctcgagggcatggcagaaggctgcttttgccctgaggatcagatcctgtttaacgctcacatgggcatttgcgtgcaggcctgtccctgcgtggggcctgatggctttccgaagtttcctggcgagaggtgggtctccaactgccaatcctgcgtttgcgatgaaggcagcgtgagcgtgcagtgcaaacctctgccttgtgacgcccagggccagccccctccttgtaatcgacccggatttgtcaccgttacgcggcccagggctgaaaatccgtgctgcccagagactgtttgcgtgtgcaacaccaccacttgccctcagagcttgcctgtgtgtccaccaggccaggaatctatctgcactcaggaggagggggattgctgcccaacattcagatgccgcccacaattgtgttcatacaacggaaccttctacggcgtgggggccacttttccaggagccctcccatgccacatgtgcacatgcctgagtggcgacacacaagaccctaccgtgcagtgccaggaagatgcttgtaataataccacttgtccccaaggattcgagtacaaaagagtggcaggacaatgctgcggggagtgcgtccagactgcttgtctaacacctgacggccagccggtgcaactgaatgagacctgggtgaacagtcacgtggacaattgtacggtttatctgtgtgaggcagaagggggtgtgcaccttctgaccccccaacccgccagttgtcccgacgtttcatcctgtcgaggatcacttcgcaaaacgggctgttgttacagctgtgaggaggattcctgccaggtgaggattaatactacaatattatggcaccagggatgtgaaaccgaggtcaacattacattctgtgaaggcagttgtcccggcgcgagcaaatactcagcagaagctcaggcaatgcagcaccaatgtacctgctgtcaggaaaggcgcgtgcatgaagaaaccgtgcccctgcattgccctaacggctcagctatccttcatacttatacccacgtggacgaatgcggatgcacccccttttgtgtcccagcacccatggctcctcctcacacacgaggtttccccgcgcaagaggccactgcagtttag

SEQ ID NO: 128593 - DNA, 17289 bp, Artificial Sequence
  derived and/or modified sequence
atgggcgcccccagcgcctgccggaccctggtgctggccctggccgctatgctcgtggtgccccaggcggagactcagggaccggtcgagccctcttgggaaaacgctggacatacaatggatggaggagcaccaactagcagccctaccaggcgggtttcctttgtgcccccagttacggtgtttccaagcctgtcgcctctgaacccagcccataacggacgtgtttgcagtacttggggtgatttccactacaaaacattcgacggcgacgtgttccgcttcccaggcctctgtaactacgtgttcagcgaacattgtagagccgcgtatgaggacttcaacgtgcaactacggaggggtttggtgggcagcaggccagtggtaacccgagtagttatcaaagcacagggcttggtgttggaagcaagcaatgggagtgtccttattaatggccagcgggaggaactgccatattcgcgcacggggttgctggtggagcagagtggtgactacattaaggtttccatccggctggtccttaccttcctctggaacggagaagactctgctcttttagagcttgatccaaagtatgcaaatcaaacctgtggcctgtgtggcgatttcaatgggttaccggcattcaacgagttctacgcccacaatgccagattgacacccttacaatttggtaacctacagaagctggatggcccaactgagcagtgtcccgatccacttccgctgcctgctgggaattgcactgacgaggaaggcatatgccacaggaccctcctggggcctgctttcgccgaatgccatgcactggtagattcaaccgcatacctggcggcctgtgctcaggacctgtgtcggtgtcccacgtgtccctgtgccaccttcgtagaatactcccgacagtgtgcccacgccggtggtcaacctcgtaactggcgatgtcccgagttgtgtccaaggacctgccctttgaatatgcagcatcaagagtgcggaagtccatgcacagacacttgctcaaatcctcaacgagctcagctgtgcgaggatcattgcgtggacggatgcttttgtccacctgggaccgtgcttgatgacataacccattcagggtgccttccgctgggccagtgcccctgcacgcatggaggccgtacttactctccgggcactagttttaacacaacctgcagcagttgcacgtgctcggggggattatggcagtgccaggatcttccctgccccgggacttgctcggtccagggaggcgcccacatctccacctacgacgagaaactgtatgatctgcacggagattgctcttatgtcctctccaaaaagtgtgcagattcctcctttacggttttggcagagctccgaaagtgtgggctgaccgataacgaaaactgcctgaaggctgtcacactgagcttagacggcggggatacagctatacgtgtacaggcagatggaggagttttcctgaattccatttatacgcagctcccattatctgccgccaacattacactttttactccatcttcctttttcatcgtggtacaaacaggactagggctacagctgctagtacagcttgtccctctcatgcaggtatttgtccgactggatcccgcacaccagggacagatgtgcggcctctgcggaaatttcaatcaaaatcaagcagatgactttaccgctctcagtggagtggtggaggctacgggggccgccttcgcaaacacctggaaggctcaggccgcatgcgctaacgcaaggaacagctttgaggatccgtgctccctgtcagtcgagaacgagaattatgcccgccattggtgcagtcggctgacggacccaaattccgcattcagtcggtgccatagcatcattaatccgaagccgtttcatagcaattgcatgttcgatacttgtaactgcgagaggtcagaggattgcctttgcgccgctcttagcagttacgtgcatgcctgtgccgccaaaggagtgcagctctctgattggcgggatggagtttgcacaaaatatatgcagaactgtcctaagtctcagcgctacgcgtacgtggtggatgcatgtcagcctacctgtcggggtctgagtgaagccgacgtgacttgttcagtttcatttgttcctgtggacggctgcacctgtcctgcgggcacttttctgaacgatgctggtgcctgcgtccccgcccaagagtgtccatgctacgcgcacggcactgtgcttgcccccggcgaagtcgtacatgacgagggagctgtgtgctcctgcacgggagggaagttatcctgtctgggagcatcactgcagaagtccactggctgtgcagcgccaatggtgtacctggactgttcgaattcttctgccggaaccccaggagccgagtgtctgcgtagctgtcacacactggatgttgggtgcttttctacgcactgcgtgtccggctgcgtttgtcctccaggtctcgtgtctgatgggagtgggggctgtattgctgaagaggactgtccctgcgttcacaacgaagcaacctacaaacctggagagacaattagggtcgactgtaacacgtgtacgtgtcgaaatcggcggtgggagtgttctcaccgactgtgcctaggaacctgcgtcgcctacggcgatggccacttcattacatttgacggagaccgatattcctttgaaggctcctgtgaatatatcctggcccaagattactgtggggataacaccacgcacggtacatttaggattgtgacagagaacattccttgcggaaccacaggcactacatgttctaaagcaataaaactgtttgtcgaaagttacgagctcattttgcaggaggggacttttaaagctgttgcgagagggcctggtggtgaccccccttacaagatccggtacatgggcatatttcttgtcatagagacacacgggatggccgtaagctgggacagaaagacatccgtcttcatccgactgcaccaggactataaaggcagagtgtgcgggttgtgcggcaatttcgacgacaatgctatcaatgatttcgcaacccgcagccgatcagtggtgggggacgccctcgagtttggaaatagctggaagcttagccctagttgtcccgacgcacttgcaccaaaggatccgtgtaccgccaaccctttccgaaaaagttgggctcagaagcagtgctccatcctgcatggtccgacattcgcggcttgcagatctcaggtggattcaacaaaatattacgaagcctgcgtgaatgacgcttgcgcatgcgattctggaggagactgtgagtgtttttgcacggcagtggccgcgtacgcacaggcctgtcacgatgcaggcctgtgtgtgtcttggcgcaccccggacacttgtccccttttttgtgatttctataatccccacggtggatgcgagtggcactatcagccctgtggagccccatgtctgaagacctgtcggaacccttctgggcactgcctcgtagatctgcctggtttggagggatgctaccccaaatgcccacctagccaaccattttttaatgaggatcaaatgaaatgcgtggcccagtgtggttgctacgataaagacggaaattactacgatgtgggtgcacgcgtgcctacagccgagaactgtcagtcttgtaactgcacaccatccggaattcagtgtgcacatagtctggaagcgtgcacgtgcacctacgaagaccgtacctatagctatcaggacgttatctacaacaccactgatgggcttggcgcctgtctaattgccatctgtggttctaatggtaccatcatcagaaaggctgtggcttgtccgggaactccagcaacaaccccattcacattcacaactgcttgggtaccacactcaaccacaagcccggccctcccagtgtccaccgtctgcgtacgggaagtgtgcaggtggtcatcctggtataacgggcataggcccgagcccggtctgggaggaggcgacttcgagacgttcgagaatctaaggcaacggggctatcaggtctgccccgtcctcgccgacatagaatgtagagcagcacagctgcctgatatgccgctggaggaactgggacagcaggttgactgcgataggatgagggggttgatgtgtgctaatagccagcaatctccaccattgtgccacgattacgaactgcgggtgctgtgctgcgagtatgtgccttgcggcccctcccctgcgcccggcacctctcctcagccttccttgagcgctagtaccgagccagcagtccccacacccacgcagaccactgctaccgagaagactaccctgtgggtgacaccaagcattaggtccaccgcagcgctaaccagccaaacaggcagttcttcaggccccgtaaccgttaccccctctgcacccgggacaactacctgtcagccccgctgccaatggacagaatggtttgatgaagactatccgaagtccgagcagctcggcggcgatgttgagtcctatgacaagattagagcggctggggggcacctttgccagcagccaaaggatatcgaatgccaggctgagtcctttcccaactggactctcgcccaggtggggcagaaggtgcactgcgacgtccacttcggtctcgtgtgtcggaattgggaacaagaaggagtcttcaaaatgtgttataattacagaatacgggtcctctgctgctccgacgaccattgcaggggccgggccacaacgcccccaccaaccaccgagcttgagactgctactacgacaacgacccaagccttattttctacaccccagcctacaagctccccaggactcaccagggctcctcccgccagtacaacggctgttccgactctttccgagggcctgacgagtccaagatacacctccaccctggggactgccacaacaggaggacccacaactcccgcaggttcgaccgagccaaccgttcccggggtcgctacaagcacgctgcccacaaggtcagcattaccaggtactaccggctctcttggaacctggaggcctagccagcctcctactcttgcacctactacaatggctacctctcgggcccggccaaccggaaccgcgtccacagcttctaaagagccactgactaccagtctagcccctactttaaccagtgagttgtcaacgagccaagccgagaccagcaccccacggacagagacaacgatgtctcccctcactaatactacgacctctcagggtacgacaagatgtcagcctaagtgcgaatggacggaatggtttgacgtggattttcccacgtcaggggtggcgggaggggatatggaaacattcgagaacatccgagccgcaggcggaaagatgtgttgggccccaaaatcaatcgagtgtcgggccgagaactatcccgaggttagcatcgaccaggtgggacaagtgcttacctgctcactggaaaccggcctgacctgtaagaacgaggatcaaaccgggcggttcaacatgtgcttcaactacaatgtgagggtgctctgttgtgacgactactcccactgtccgtcgacccctgctacttcctccactgcgacccccagctcaacacccggcaccacctggatccttactaagcccacaaccacagctactactacagcaagcactggcagcacagccacccccacttccacccttaggactgcacctcccccaaaagtgctgaccacgaccgccaccacccctactgtgacctcaagtaaagcaacccccagttcttctccgggaactgcgacggctttaccagctctgcgcagtacagctacgacacccacagctacatcagtaactccaattccgtcatcctccctggggacgacatggactaggctgtcacagaccaccacaccgaccgcaacgatgagtacggcaacacctagcagcacaccagagacagcacatacttcaaccgtactcaccgctacagccacaaccacaggcgccaccggtagcgtggccacaccctcaagcaccccggggacagcacacactaccaaagtccccacaacaaccaccaccggattcaccgcgacgccatctagcagcccggggacagcactcacacctccagtgtggatatccactacaaccacccccaccacccgcgggagcacagtgaccccgtcgtctatacctggaaccactcataccgccaccgtactgaccaccaccacaacaaccgtggctaccggcagtatggctacaccctcttcgagtacccagactagcggaacccctccaagcctgaccactactgccactaccatcaccgctactggctctaccacaaatcccagctccacccctggcacgactccgatcccaccagtgctgaccacaacagctaccacccctgctgctacttctaatacggtcacacccagtagtgcactcgggactactcatacgcccccggtgccgaacacgatggcgaccacccatgggagaagtctgccccccagcagcccccacacggtgagaacggcctggacttcggccacgtctgggattcttgggacgactcatatcaccgagccaagcactgtgacatcacacactctggctgcaacgaccgggaccacacagcacagcacgcccgctctctcatccccccacccaagtagtcggacgactgaatcacctccttcccccggcactactacaccaggacataccaccgctacaagcaggacaaccgctaccgctaccccttcaaagacacgaacaagtacactgctccccagtagccccacatctgctcctattacaaccgtcgtcacaatgggatgcgagcctcagtgtgcctggtcagaatggttggactactcttacccaatgcctggaccaagcggaggagactttgatacgtactccaatatccgagctgcagggggagcagtgtgtgagcaacccctgggtcttgaatgtagggcccaagcccagccaggggtgccattgagggagctgggccaggtggtggagtgctctctcgatttcggcctggtctgccgtaatcgggaacaagtgggtaagtttaagatgtgcttcaattacgagattagagtcttctgttgtaattacggacactgtcctagtacaccagctacgagctccactgccatgccctcaagcacgccgggtaccacctggattctgacggagctcactacaaccgctacgaccaccgagagcacggggtctaccgctacccccagttctacaccagggactacatggattttaactgaacccagcaccacggccactgtgactgttcccactggaagcacagccactgcgtcgtccacacaagctaccgccggcactccacatgtgtcgaccaccgctactactcctacagtgacaagctccaaggcaacaccttttagttcccccggcactgcaacagcactgcctgccctcagatccacggcaactactcctactgctacaagtttcacggccatacccagttcctctctcgggacaacctggacacgcctgtctcagactacaacgcctactgcaaccatgtccactgctacgcccagctcaactccagaaactgttcacacctctactgtcctgacaacgacagcaaccaccactggtgctacaggaagtgtcgctacccccagctcgaccccaggcacagcccatacgactaaagtgcttacaaccaccaccaccggttttactgctactccctcatcaagtccagggaccgcgaggaccctgcccgtgtggatcagcacaactacaacccccaccacgcgtggttctactgtgactccgtctagtatacccggcaccactcacaccccgaccgtattgaccacaacaaccaccaccgtggctaccggatccatggccactccgagctccagtactcagacatcaggcacgcctccatccctgacaactactgccacaactattactgctaccggtagtactaccaacccttcttccacccctgggacgactccaatcccacccgtgcttactaccaccgccaccacccccgccgctacaagtagcacggtgacaccatcctccgcccttgggaccactcacactccccctgtgccaaataccacagcaacaactcatggacggtccctctcgccatcctccccgcacaccgtacgcacagcctggacatccgcaaccagtggaacgttagggaccacacacatcaccgaaccttccacaggcaccagccacacgccggcggccactacaggcacaacccaacatagtaccccagcactgtcatcaccacacccaagcagcaggacaaccgaatcgcctccatctcctgggaccacaactccaggccacactcgggccacaagcagaactactgcaacagctaccccgtctaagactcgtacaagcactcttctcccttcaagccccacctctgctccaattaccacagtcgtgacgatgggttgcgagccgcagtgtgcgtggtccgaatggctggactattcttatccgatgcccggaccaagtgggggcgattttgacacctactctaacatcagggccgccggtggggctgtgtgtgagcagccactggggctcgaatgcagagctcaggcccagcctggtgtgcctctccgtgaattgggccaggtggtggagtgtagcctggacttcggtctggtgtgccgcaatagggaacaggtaggtaagtttaaaatgtgttttaactacgagatcagggtcttttgctgcaattacggacactgcccaagcacacccgcgacctctagcaccgccaccccttcttcaaccccaggcacgacatggatcctgaccgaacaaaccactgcggcaaccaccacagccacaaccggaagcacagcaataccttcttcaactcccggaacggctcccccccctaaagtgcttacaagcacggccacaacccctaccgccactagcagcaaagcgactagctcctccagccctcggactgccactactcttccggtattgacgtctaccgccaccaaatcaacggcaacatcctttacacctattccctcatttacgctggggacaacagggactctgccggaacagaccaccacacccatggcaactatgtcaacgattcatccctcttcgacacccgagacaacacacacatcaaccgtgctcacaaccaaggccacgactacaagagcaacatcatctatgagcacaccatctagcacgccaggtaccacatggatcctgactgaacttactaccgcagctactaccacggcagcaaccggtccaacggctaccccgagtagcacacctggcactacctggatcctaacagaaccctcaaccactgcaaccgtaacagtgcccacaggatcaaccgccactgccagctctacacgggccacggctggcaccctaaaggttttaacatcaacggctacaactcccaccgtgatcagctcacgggccactcccagcagctcccccggtaccgcaactgctctgcccgctcttaggagcacagcaacaactcctacggccaccagtgtaacagcgataccctcttccagcctgggcaccgcctggacacgactgagtcagaccactacccctacggcaacaatgagtaccgccaccccttcaagcactccagagactgtgcacacaagtacagttctgacaaccacgacaacgacaacaagagcaacaggctcagtggccaccccgtcctccacccctggcacagcccacaccacgaaggtcccaaccacaaccactacaggcttcaccgccactccatcgagctctcccggaacggccttgactcccccagtgtggatctcaacaaccaccacgccgacgacccgaggctccaccgttacgccatcaagtatccccggaactacgcataccgcaaccgtattgactaccacaaccactacagtcgcaactggctcaatggcaacccccagttccagtacacaaacctccgggacccctccctccctaaccaccaccgctacaacaatcacagccacagggtccaccactaacccatccagtactcccggcaccaccccaatcccgccggtactgacaacgaccgccaccacgcctgcggcaacatcatctaccgtaacaccctcaagcgctctgggaaccacgcatacaccccccgttccaaacacaactgccacaacacatggccgctccctgcccccttccagtcctcacacggtccgcacagcctggacatccgctacctccggaatcctcggcacgacccacatcaccgaacccagcaccgttacatctcatacgcctgccgctacaacctctactacacagcatagcactccagcactcagctcaccccatccatccagcaggaccacggaaagtcctccaagccctggtacaaccaccccgggccatacacgcggcactagccgaaccaccgcaaccgctacaccaagcaagactcggacatctacattgctcccaagctctcccacctctgccccaattacaaccgtcgtgaccaccgggtgcgagccacagtgcgcgtggtctgagtggttggactatagctatccaatgcctgggcccagcggcggagacttcgatacctattcaaacatccgcgctgctggcggagccgtctgcgagcaacctctcggactggagtgtcgggcacaggcccagccaggcgtgccgctccgagagttaggacaagtagtcgagtgctctctggatttcgggctggtttgtcgaaaccgggagcaagtgggcaagttcaagatgtgtttcaattatgagattcgcgtgttttgttgtaattacggtcactgtccttccacccctgctactagcagcacagcaacacccagcagtacacccggaaccacctggatcctgactaagctgacaaccaccgccaccacaactgagtccactggctctacggctacgcccagttccactccagggacaacatggattctgacagagccgagcaccacagcgacagtgacagttcctaccggatcaactgctaccgcgagcagcacgcaagcgacagcaggcacgccccacgtgagcactacagcaactacccctaccgtcacttcatccaaagccacaccattttcaagcccggggaccgcaacagcgctgcccgccttacggtccactgcgacaactcccactgcgaccagcttcacagccatcccttcttcgagcttgggaactacctggacccgcctcagtcagacaactacaccaaccgcgacaatgagcaccgcgacccccagttccacaccagagaccgcgcatacgagcacagtgctgaccaccacagcaacaactacaagggcaaccggatctgtcgcgacaccctcatcgactcccggcacagcacacacaactaaggtgcccacgaccacaactacaggcttcactgtgacgccctcctcctccccaggaaccgctcggactccgcctgtttggatttcaactaccactacgccaactacaagtgggtcgacggtcaccccctcttctgttccaggcaccacacacactcctactgtgttgactaccaccactaccacagtagccaccggctctatggcaacgccatctagctctacacaaacatcaggaacacccccgtctctgattactacagctaccacgattaccgcgacggggtcgaccaccaacccatcttccactccaggaacaacccccatcccacccgtgctcacgactaccgcgaccacccctgccgctacttcttcaactgtgaccccctcatcagctctaggaacaacacacactccgccagttcccaacactacagccactacacacgggaggtctctttccccgtccagtccgcacaccgtgcgcaccgcatggacctccgcgacttccggcactttggggaccacccatatcactgagccctccaccggcacaagccataccccagcagccaccacaggcaccacccagcactctacacctgcgctttcctcaccccacccctccagcagaacaacagagtctccaccctctcccggtactacaaccccaggccataccacagccacatccaggacaaccgcaacagctaccccttcaaaaacccggacttcaactctgctaccttcgagcccaacctccgccccaattaccacagttgtgacaactggatgcgaaccccagtgtgcgtggtccgagtggctggactacagctacccaatgcccggtccttccggcggtgacttcgacacttactctaatatccgcgcagcgggaggcgccgtttgcgagcagccacttgggttggagtgtagagcccaggcacagccaggcgtgcctctgggagaactcggtcaggtggtggagtgcagtctcgacttcgggctggtgtgcagaaatagagagcaagtagggaagttcaagatgtgcttcaattatgagatcagggtgttttgctgtaattatggccactgcccctccacgcccgctacctcttccacggcaatgccctcctctactcctggcactacttggattctgaccgagctcaccaccaccgctacgacaactgctagcacaggcagtacagctactccatcttccactccaggaacagcgccccctccaaaggtactaacttctccagccacaacgcccacagctactagctcaaaagctactagttcgtcttcacccagaaccgcgaccaccctgcccgtcttgacgtccactgccaccaaatcaaccgcgacgtccgtaactcccatccctagctccaccctgggaactacaggcaccctgcctgaacagaccacaacgcccgtcgccactatgtctactatccaccctagctccacccctgaaaccacccatacatccactgtcctcaccactaaagcaaccacaactcgtgctactagctcgacctccactccttccagcaccccaggtacgacttggatcctgacggagcttaccaccgccgcaactactaccgcggcgactggccctaccgcaactccgtcttcaacacccgggaccacatggatcttgacggagctcaccacaactgccactactacggccagtaccggctccactgcaacccccagttctacacccgggaccacttggatcttgaccgaaccttctacaactgcaacagtgaccgtgccgactggctccaccgccacagccagctccactcaggctactgctggcacgccacatgtttccaccaccgctacgacccccactgtgacttcaagtaaggcgacgccatcatcctcgcccggtacagctaccgccctgcccgcactgcgtagcactgccaccacccccacggccacatcttttaccgctataccaagttcctcattaggcacaacctggacccggttgtctcagaccacgacgcctacagcgactatgagcacggcgacaccttccagtacccctgagacagttcacacgtccaccgtactgactgcaacagccactaccactggggctacaggttccgtcgccacgccgagctcaacccctggaaccgcccacacaacaaaagtccctacaaccactacaacaggattcaccgccacaccatcttcctccccagggacagcactgactccacctgtctggatctccaccacgacaacccctaccacaactacaccgacaactagtggcagtacggtaacaccttcttccattcccgggacgacccacacggccagagtccttacaacaacaacgacgaccgtggcaacaggcagcatggctacacccagcagctcgacccagacgtctggtacccctcctagcttgaccactacagctactacaataacagccactggctccaccaccaaccctagcagtaccccgggcaccacacccatcacccctgtgcttacctctactgcgaccacgcctgcggcaacatcaagcaaggcaaccagcagcagttccccacggacagctactacgttgccagtgctcacaagtacggccaccaagtccaccgccacgtccttcacgccaatcccaagctctactctgtggactacttggacagtaccagcacagacaaccacacccatgtccacaatgagtaccatccatactagttctacgcccgaaacgacccatacctcaaccgtgctaaccacgaccgcaacaatgactagggccaccaacagcacggccacccccagttcaacactcggcaccacccggatccttacggaactgacgactactgccacgacaaccgccgcaactgggagcaccgctactctgtcatcaacccccgggaccacctggatcctcactgaacccagtactatcgccaccgtcatggtgcccaccggtagcactgccacagcttcgagcacacttggcactgcccatacgccaaaggtggttaccaccatggctacaatgcctaccgctacagccagtacggttccgtcatctagtactgtgggcacaacaagaactcccgctgtgctcccgtcttcgctgccaacattctctgtttctaccgtaagctctagtgtgctgactacacttcgacccaccggttttccgtcctcccacttcagcacgccttgtttctgtcgcgcttttggccagtttttctctccgggagaggtgatctacaacaaaacagatcgcgccgggtgccatttttatgcagtgtgcaatcagcattgtgacatagatagatttcagggtgcttgtccgacctctccccctcccgtcagcagtgcccctctctcgtccccgtcccctgctcccggctgtgataatgccattccactgagacaggtcaatgagacctggactctggaaaactgcactgtagcgcgctgcgtcggtgacaatagagtggtcctccttgaccccaagccagttgccaacgtgacatgcgttaacaagcacctgccaattaaggtttccgacccctcacagccatgtgactttcactatgaatgtgaatgcatctgctcgatgtggggggggtcccattacagtacattcgatggtacatcttatactttccgtggaaactgtacatacgttctgatgagggaaatccacgcacggtttggcaacctgtctttgtacttagataatcattattgtaccgcctccgcaaccgccgccgctgcacgctgcccccgggcactcagcattcattacaaaagtatggacatcgtgcttacggtgactatggttcacgggaaagaagaaggcctgattctgttcgatcagatccccgtgagcagcggctttagcaagaacggggtcctggtgagcgttcttggcacaaccaccatgagggtagacatccccgcgctgggagtctctgttacattcaacgggcaggtctttcaggcccgactgccatatagcctcttccataataacaccgagggacagtgtgggacatgcacaaataaccaaagggacgactgcttgcaaagagacggtaccacggccgcttcatgtaaagacatggcaaaaacctggctagtgcccgattcacggaaggatggctgttgggctccgactgggactccacctactgcaagccctgcagcccccgtttcttcgacacctacacccaccccttgtccgccccaacctctgtgtgacctgatgttgtcgcaagtctttgctgaatgccacaatctggtgccgcctgggccattctttaatgcctgtattagtgatcactgtagaggacggctggaggttccctgtcagtcacttgaagcctacgcggaactgtgccgtgccagaggggtgtgtagtgattggcggggcgctactggcgggctgtgcgatctgacatgcccccctactaaagtgtataaaccttgtggtcccatccagcctgcaacatgcaattctaggaaccaatccccacagctcgaagggatggccgagggctgtttctgtccagaggatcaaattctgtttaacgcccacatggggatttgtgttcaggcatgcccgtgtgtggggcccgatggcttccccaagtttccaggcgagcgctgggtgagcaattgccagtcatgcgtctgcgacgagggctctgtttctgtccagtgtaagcctctgccctgtgatgcccagggacagcctcccccgtgcaaccgccctggattcgtgaccgtgactaggcctagggccgagaacccttgttgcccagagacagtgtgcgtgtgcaataccaccacttgtccacaatcattgccggtttgtcctcctggccaggagtctatatgcactcaggaagaaggagactgttgtcctactttcagatgccgacctcaactctgctcctataacgggactttctacggggtgggggccacctttcctggcgccctcccatgtcacatgtgtacctgtctaagtggggatacccaagatcctactgtgcagtgtcaggaggatgcctgtaacaatacaacctgtccccaaggtttcgagtataagcgcgtcgcgggccagtgctgcggggagtgtgtgcaaacagcatgtctgaccccggatgggcagcctgtccaactaaacgagacctgggttaatagtcatgtggataactgcacagtctatctttgtgaagctgagggcggcgtccacctgttgacccctcagcccgctagttgcccggatgtctcgagctgtaggggttccctcaggaaaactggatgctgctactcatgcgaggaggattcttgtcaggtgcggataaatactaccatcctttggcaccagggatgtgagactgaagttaatatcactttttgcgagggctcgtgtcccggagcaagtaaatacagcgccgaagcacaggcaatgcagcaccagtgcacatgctgccaggaacggcgggtgcatgaagagactgttccgttgcactgtccaaatggatctgcaattctccacacttatactcatgtcgatgaatgtggctgcacccctttttgcgtcccagcacccatggcccccccccacacccggggatttcctgctcaggaggcgaccgccgtctag

SEQ ID NO: 128594 - DNA, 561 bp, Artificial Sequence
  derived and/or modified sequence
agcagcacccccggcaccacctggatcctgaccgagcccagcaccaccgccaccgtcacggtccctaccgggagcacagcgacggcatccagcacacaggccacggctggtacacctcacgtttcgaccactgccaccactcccacagtaacgtcaagtaaggccaccccctttagcagcccaggaacagccaccgccctgccggcactgcgctcaaccgccacaactcctaccgccacttcattcaccgctattccaagttcttgggcccccccagggcccgcatatcaccgcccaccacatccccgcccaccttgccctcagcctcaccctcctcctctgcaaagactctccaccccccctcagtgtctgcctccaaggcctccccgtggtcatagactctgcggccatcccttgctgcaccctcgaaacagctctcattatcagtccgcggattaccacaaccatttcaccgccactcctagcagctccccagggactgccaggaccttacctgtttggattagcaccaccactacacccaccactcgagggagttag

SEQ ID NO: 128595 - DNA, 960 bp, Artificial Sequence
  derived and/or modified sequence
accaaggccaccaccacccgggccaccagcagcatgagcaccccctcctctactcctggtactacttggatcttaaccgaactgaccacggcggcaaccaccaccgccgccacacctcacggccaccctgtgctgcatcccagagaccatctggaccctcaccgggctcagcactacacagtgactgtgcccaccgggagtacagccactgcaagttcaactcgtgctacagcaggaacactgaaggttttaaccagccatcatactcacagtcatcagctgcagagtcacagcctcctgcagagtcgggattgtaacagacccagctctaccgaaaaacatagccatcacacccacagctaccaacggtactcacaccctctattcttgcctacggcctggactcgcctctcccaaacaaccacgcctacagctacaatgtctacggccaccccaagcagcactcccgaaaccgtacatacttccactgttttgacaacaactactaccaccacgcgagctaccctgtggccacctccccctcccccccaggagcagttaacactgccaaaatgtaggttgccacaacccaggcacagccatccactcctccagcctagggacggcactcatgcatctagtgttgaccagcacaatcaccacacacacaaccaaagattacacggtgatcctctgctgcatccaacaactcatacagcaaccgtcctgacgacaacaactaccactccactcgtcctgtggcagcatcctccactggcccatagacctgttgtaccccccagtttaaccacaactgccaccacgatcacagctaccggcagtactaccaaccccagcagcacaccaggtactactccgattccccccgtccttactacgacggcacatacgtgttcacatcaacaacattccgattcactcttatgcccacgcgattag

SEQ ID NO: 128596 - DNA, 2007 bp, Artificial Sequence
  derived and/or modified sequence
atgcgggagatccacgcccggttcggcaacctgagcctgtacctggacaatcactattgcactgccagtgccaccgctgccgcggcaaggtgtccacgcgctctgagcatacactataaatccatggacattgtcttaaccgtcacaatggttcatggaaaggaggagggcctgattctgtttgatcagatccctgtatctagtggatttagcaagaacggggttctggtatctgtgctagggactacgaccatgagagtcgacataccggccctgggagtatcagtgaccttcaatggacaggtgtttcaagcaagactgccatatagcttatttcataacaacaccgaagggcagtgtgggacctgcaccaacaaccagagggatgattgtctgcagagggatggtacgaccgcagcatcctgcaaggacatggcaaagacttggctggtccccgattcccggaaagacgggtgttgggccccgactgggacacctccgaccgcgtcaccagctgcccctgtgtcaagtaccccgacccccaccccttgcccccctcagccactgtgcgatctcatgctttcccaggtctttgccgaatgccacaacctcgtgccacctggccccttcttcaacgcttgcatttccgatcactgtagaggccgattggaagtaccatgtcagtcactggaggcttatgccgagctctgccgagcgaggggagtgtgctcagactggcgtggagcgacaggggggctttgcgacctcacttgtccccctacgaaggtgtacaagccatgtggacccatccaaccagccacctgtaattccagaaatcagagcccacagctcgaaggcatggcagagggctgcttttgccctgaagatcaaattctctttaacgcgcatatgggcatctgtgtgcaggcttgtccatgcgttggaccagacggatttcccaagtttccgggagaacggtgggtttccaattgtcagagttgtgtctgtgatgagggctccgtgagcgtgcagtgcaaaccattaccatgtgatgcccaaggccagccccctccatgcaacaggcctggattcgtgacagtcaccaggccacgcgccgaaaatccctgctgccctgagaccgtatgtgtctgcaacacaacaacctgtccacagtctctgcccgtttgcccgcccggccaggaatccatctgcacccaggaagagggggactgctgtccaactttcagatgccggccacaactttgctcctacaacggtactttttatggggtgggagccacttttccgggggcactaccctgccacatgtgcacctgcctttccggcgatacgcaggatcctacagtgcagtgccaggaggacgcatgcaacaatacaacttgtccgcagggtttcgaatataagagagtggccgggcagtgttgcggggaatgcgtccagacagcatgcctcacacccgatggacaaccggtacagctaaacgagacttgggtgaattctcatgttgataactgtaccgtctacctgtgcgaagcagaaggcggcgtgcatttactgacaccccaacctgcctcttgccctgatgtatcctcttgcagaggcagtctaaggaagaccggatgctgttatagctgcgaagaggactcgtgtcaggtgaggattaataccaccatcctttggcaccagggatgcgaaacagaagtgaatatcactttctgcgaggggagttgtcccggagcttcaaagtattctgcagaggcacaggccatgcagcatcagtgcacctgctgccaagagcgaagagttcacgaggaaaccgtacctctgcactgccccaacggcagcgcaatacttcacacatatacgcacgtcgatgaatgtggatgtactcccttctgcgtgcccgcccccatgagccctccagcatgcgtgtggcaccccgcattgagggcgcctgccgctcacttggggctggccccgccgtag

SEQ ID NO: 128597 - DNA, 186 bp, Artificial Sequence
  derived and/or modified sequence
atgaagctgggactgctgtgcgcactcttgtctctcctggctggaatctgcggctctgcgcttgagtcaaccactagcggcaatggacgcgtgcgttcatcctgttctggcttaagaacctctagccccacacttgcctcaacacggaccagcgccccaatgacaacaatgatgactagctgctag

SEQ ID NO: 128598 - DNA, 17120 bp, Artificial Sequence
  derived and/or modified sequence
atgggagccccaagcgcatgcagaaccctcgttctggccctcgcagctatgctggtggtcccccaggccgagacacaggggccagtcgagcctagctgggagaatgctggccacacaatggatgggggagcgcctacctctagccccacacgacgagttagctttgtaccaccagtgactgtttttccaagcctctctcctttaaatccggctcacaatggtcgcgtgtgtagtacatggggagacttccactacaagacgttcgacggcgatgttttcagattcccaggactgtgtaactacgtattctccgagcattgtcgcgcagcttacgaggatttcaacgtgcagttgcgcagaggacttgtgggttcacgaccggtcgtgacgcgggtggtgatcaaagctcaaggactggttttggaggccagcaacggctctgtcttgattaacggtcagcgggaggagctgccctactcacggacaggactcctcgtggaacagagtggcgattacatcaaagtgagcatccgactcgttctgacatttctgtggaacggcgaggattctgcccttttggagctggatccaaaatacgcaaaccagacttgtggcctgtgcggtgattttaacggtcttccggctttcaatgaattctacgcacacaacgctcggctcactcctctgcaatttggtaacctccagaaattggatggacccacagagcaatgccctgaccctcttccgctgcctgctggcaactgtactgatgaggaggggatttgccaccgcactctcttgggaccagctttcgctgaatgccacgcccttgtagattccaccgcatatctggccgcatgtgcccaggacctgtgccggtgccccacatgcccttgcgctactttcgtggagtactcgcgccaatgcgcccacgcaggcggacaaccccgtaattggaggtgtccggaactgtgtcccaggacatgtccccttaatatgcagcaccaagagtgtggcagcccatgtacagatacctgtagcaatcctcagagagcacagctgtgtgaggaccactgcgtcgacggatgcttctgtcctcccggaagcactgtcctggacgatattactcattctggatgtctccccctaggacagtgcccctgcacccacggcggtcgcacctatagtcccggaacttcgttcaacacaacctgctccagttgcacctgcagcggcggactttggcagtgtcaggatctcccttgcccaggtacatgcagtgtgcagggcggtgcgcacatctccacttacgatgaaaagctgtacgatctccacggtgactgttcttacgtcctgtcgaaaaaatgtgccgacagtagctttacagtgttagccgagctacgcaaatgtggcctgacggataacgagaactgcctcaaagctgtgaccctctccctggacggaggagacaccgctataagagtgcaggccgatggaggcgtcttccttaacagtatatacacccaactgccactgtccgccgctaatatcacattattcacgccctcatctttctttatagttgtccagacaggcctgggcctgcaactcctcgtgcaacttgtgcccctgatgcaagtcttcgtgcgcctggacccggcacaccaagggcaaatgtgcggactgtgcggaaactttaatcaaaaccaggctgatgattttaccgctcttagtggggtcgtggaggctacaggagctgccttcgcaaacacctggaaagcacaggccgcatgcgcaaatgctcgcaattcatttgaagatccatgcagcctctctgtcgagaacgagaactacgcccgacactggtgttcacgactgacagaccctaattccgctttttcccgctgtcactccatcatcaatccaaaaccattccactccaactgcatgtttgacacttgcaattgtgaaagaagcgaagactgtttatgtgctgccctcagttcctacgtgcatgcttgcgcagccaagggcgtccagctttccgactggcgagatggcgtgtgtactaagtacatgcagaactgccccaaaagccaaagatatgcatacgttgtcgacgcttgccaacccacttgtagaggcctgtcagaggctgacgtgacttgcagtgtgtcattcgtccctgtagatgggtgtacctgtcccgcaggcacattcttaaacgacgccggagcatgcgtccccgcacaagagtgtccgtgctacgctcatgggacagtgttagctcccggtgaagtggtgcacgatgagggggcagtctgcagctgcacgggcggaaagctgtcgtgcttgggcgcatccctccagaagtctacgggatgtgccgcaccgatggtgtatttagactgttcaaattcaagtgctggaacccccggagcagagtgtctccgctcatgccacacccttgatgtgggctgcttttccacacattgcgtgagcggctgtgtgtgccccccagggctcgtttccgatggaagcggcggatgcatcgctgaggaagactgcccctgtgtgcataatgaggccacatacaagcccggagaaaccatcagagtagattgcaacacttgtacctgtaggaaccgcaggtgggagtgttctcacagactgtgcctcgggacgtgcgttgcctacggggacggacacttcataacctttgacggcgaccgatactccttcgaggggtcctgcgagtatatattagcacaagattattgcggcgataatacaacccatgggaccttccggatcgtcaccgagaacattccctgcggaaccacaggcaccacatgtagcaaggcaatcaaactgtttgtcgagagttacgagttgatcctccaggaaggaactttcaaggcagtggccagaggtccgggtggagaccctccttataagatccgctatatgggcatatttctggttatcgaaacgcacggcatggctgtgagctgggatcgaaagacctcagtgtttattagactacatcaggactataaaggaagagtctgtgggctctgcgggaatttcgatgataatgcaattaatgacttcgccactagatcccggagcgtagttggcgatgcattagaatttggaaattcatggaagctatccccttcgtgtcctgacgctctggccccaaaggacccgtgtaccgctaatcccttccgcaagtcatgggctcagaaacagtgctcgatacttcacggacctactttcgccgcatgtcggtcacaggtggatagtaccaaatattacgaagcctgcgtaaatgacgcctgcgcctgcgatagtggcggtgactgtgagtgtttctgcactgccgttgccgcttatgcacaggcctgtcatgacgccggactgtgcgtgagctggagaacccccgatacttgtcccctgttttgtgatttctacaacccccatggtgggtgtgagtggcattatcagccttgcggcgcaccctgccttaagacctgtaggaacccatccggacactgtctcgttgacctgcctggtctggaaggatgctatccgaaatgccccccaagccagcccttctttaacgaagaccagatgaagtgtgtagctcagtgtgggtgttacgacaaggatggaaattattatgacgtgggtgcgcgagtcccgacagctgagaattgtcagtcctgcaattgtacaccctcaggcatccaatgcgctcactctttagaagcctgcacatgtacttacgaggaccgcacatattcctatcaggacgtcatttacaatacgaccgatggacttggtgcctgcctgattgccatatgcggaagcaacggcaccattattagaaaggcggttgcctgtccaggtactcctgccaccacaccctttacctttaccacggcatgggtcccacattcaaccacgagtcccgctttgccagtgtccactgtgtgtgtgagggaagtctgtagatggagctcttggtacaatggtcatcggccagaacccggtctcgggggtggtgattttgaaaccttcgaaaacctgcggcagcgaggatatcaggtttgcccagtgttagcggacatcgagtgtagagcggctcagctgccagacatgcctttagaggagctgggccagcaggtggactgcgatcggatgcgcggactgatgtgcgcaaattcacagcaaagcccccctctttgtcatgactatgaattgagggtgctctgctgcgagtacgtcccttgtggcccaagccctgccccaggaactagcccacaaccctcactctccgcatccacagagccagcagtccccactcctacccagactaccgcaaccgaaaagaccaccctctgggtgacacccagtatcaggtctaccgctgccctgaccagtcaaacaggttccagcagtggtcctgtgacagtgacgccctccgcacccggtacaaccacatgtcaacctagatgccaatggacagagtggttcgacgaggactaccctaagagcgagcagctgggcggagacgttgagagttatgacaagatccgggctgctggagggcacctgtgtcagcagcctaaagacatcgagtgccaagctgaatcctttcccaactggactctggcacaggtcgggcagaaggtgcactgcgatgtgcatttcggactggtctgcaggaactgggaacaggagggggtgttcaagatgtgttataactatcggattcgggtgctgtgttgctccgatgaccattgcaggggaagagcgacaacaccaccacccactactgaacttgagactgctacgactaccaccactcaggcgttgttcagcacgccccagccaaccagcagccccggtctgacccgtgcaccgcctgcctctacaaccgcggtgcctacgctttctgagggactgacctcacctaggtacacgtccacccttgggacagcaactacagggggacccaccactcctgccggaagcacagagcccacagtcccaggcgtggcaacgtctactttacctacccgtagcgcattgcccggaaccactggctccttgggaacatggcggccaagccagccccctacgctggctccgacgactatggcaacaagtcgtgccaggcctacaggaaccgccagcacagccagtaaagagcctctcaccacaagtctcgcccctaccctaacaagcgagctgagcacttctcaggccgagactagtacccctcgtaccgaaaccactatgtctcccctcacgaacactaccacttcccaaggcaccacccgctgtcagcctaagtgcgaatggacggaatggttcgacgtggacttccctacctctggagtggcagggggagacatggagactttcgaaaacattcgggctgccggaggaaagatgtgctgggctcccaaatctatcgaatgtcgggctgaaaattatccagaagttagtatcgaccaggtgggacaggtgctgacctgtagcctggagaccggtttgacctgtaaaaacgaagatcagacaggacggtttaacatgtgtttcaactacaacgtgcgggtgctttgttgtgatgattacagccattgcccttctactcctgcaactagcagcactgcaacacccagctcaacccccggaacaacctggatcttgacaaaacccaccaccactgccactacaactgctagcactgggagtactgccaccccaaccagtacactgcggaccgctccaccaccaaaggtactgacaaccaccgctaccacaccaactgtaacaagctcaaaggctactccaagtagttcccccggaacagcaacagctttgccagccctgcggagcacagctacaacgcccaccgccacgagcgttactcccatcccatcttcatctctgggcaccacttggactagattatctcagaccaccactccaaccgctacgatgagcactgctacaccttctagcaccccagaaacagcccacacgtccacagtcctaaccgcgactgcgacaaccaccggggctactgggtctgtagcaactccttccagcacacccggaactgcacataccacaaaggtgccgaccaccactacaaccggattcacggccaccccatcaagcagccctggaactgcactgacaccccctgtgtggatctcaaccacaactactccaactacccggggaagcacagtcactccctccagcattcccggtacaactcacaccgccaccgtgctgactaccacaacaacgacagtggccaccggctctatggctacacccagttctagcactcagactagcggcacgcctccttctttgacaaccaccgcgactaccattacagccacagggagtaccacaaacccctctagtactccaggcacaaccccaatcccgcctgttctcaccactaccgccactacaccggcagctacctcaaatacagtcaccccaagttccgcgttaggcactactcacactccgcctgtaccaaacacaatggcaaccacgcacgggcgatctctcccaccctcctctccccataccgtcagaactgcctggacgagcgcaacttcaggaattctggggacgacacacatcacagaaccatccaccgttacctcgcatacactagctgccacgacgggaactactcagcactcgactcctgccctgagttctcctcatccctcatcaagaacgaccgagtcgccgccatcacccggaactacaaccccagggcacaccactgccaccagccgaactaccgcaacagctactcctagcaagacccgcactagcaccctcctgccgtcgtcaccaacctcagcgcctattacaaccgtagtcacaatgggatgtgaaccccagtgtgcatggagtgagtggctggattacagctaccccatgcctggaccctctggaggcgacttcgacacttactcaaatatcagggccgcagggggtgctgtgtgtgagcagcctctgggccttgaatgccgggctcaggcacagcctggagtacctctgcgcgaactgggtcaagtagtcgagtgctctctcgattttgggctcgtttgccgcaatcgggaacaggtgggtaagtttaagatgtgctttaattacgagatacgcgttttttgttgcaattatggtcattgcccctctacgcctgccacaagcagtactgcaatgccctcatcaacccctggtacaacttggatccttaccgagttgactacaacagcaacaaccactgaatctaccggttcgaccgccactccctcctctactccagccacagccggaactcctcacgtctcaacaactgctactacgcctacagtgacttcctccaaggccacgcccttctccagtcccggaaccgccaccgcactgccagccctccgttccacagctacaacgcccaccgctacctcatttactgctatcccctccagctccctggggacaacctggacgcgactcagccaaacaaccacacctaccgctaccatgtctacagccacaccctcctcaacccccgagacagtccatacttcaaccgtactaacaaccaccgccacaaccacaggcgcaacagggtccgttgcgaccccatcatctactccaggaactgcacacaccacaaaggtgctgaccacaaccaccacagggttcaccgccacaccatccagcagcccaggcactgctcgcaccctgccagtgtggattagcacaaccacaactcctaccacaaggggctctaccgtgaccccttcttctattccaggaaccacccacacccccacggtcctgaccacaaccacgacaactgttgcaacaggttctatggctaccccttcttcctccactcagaccagtggcactccaccgtccttgaccactaccgccactactataaccgctactgggtccaccaccaatccctccagcacccccggtaccaccccaatcccccctgtacttactacaacagccaccacgcccgcagccacaagctcaaccgtgacacccagttctgctcttggaacgacgcatacccctcccgtgcctaatacgaccgctactactcatggcagaagtttgtctccctcttccccacacacagtgcggacggcatggactagcgctacttctggcactttgggtacaacccatatcactgaaccctctaccggcacgtcacatacccccgctgctaccactggtaccacacagcactccaccccggcactcagctccccacacccttccagcaggactacagaaagccccccttcacccggtaccaccacaccgggtcacacaagggctacttctcgtaccacagctactgcgacgccctcaaagacgcgcacctctactcttctcccaagcagccccacgtccgcccctattactaccgtggtgacaatgggctgcgagcctcaatgcgcctggtccgagtggctggattactcttatcccatgcctggtccttcaggcggagattttgatacgtactctaacatcagggccgctgggggtgctgtgtgtgaacagcccctgggactcgagtgtcgggctcaagcccagcccggagtgcccctgcgggagttggggcaagtggtggaatgctccctcgacttcgggttagtgtgtaggaacagagagcaagtcggcaagttcaaaatgtgcttcaattatgagatccgggttttttgctgcaactatggccattgtccatcaaccccagccacgtcctcgactgctactccatcttctacgcccggtactacctggatcctgactgagcagacaactgccgcaactacaaccgcgaccaccggcagcaccgccatcccctccagtactcccggtacagccccaccacctaaagtactaaccagcacagccacaacaccaaccgcaacgtcatctaaggccacttctagttcctccccacgcaccgcaacgactctacccgtcctgacctccaccgccactaaaagcactgctactagcttcactcctatcccatcctttacgctgggtacaacgggaaccctgcccgagcagacaacaacgccaatggctaccatgtcaactatccacccatcttcaactccagagactacacatacatctaccgtgcttacaacaaaagcaacgaccactcgggctacaagctcaatgtctacaccttcatccaccccgggaaccacgtggatcctcaccgagctcaccaccgcggcaacaactacagccgcaactggcccaaccgccaccccatctagcacccctggtaccacctggatcctcaccgagcccagcacgaccgccaccgtgacagtgcctacggggtctacggccactgcctcatcgaccagagctaccgccggtacattaaaggtcctcactagtactgctaccactcccactgtgatctcgagtagagccaccccaagctccagcccagggaccgccactgccctgcctgccctaagatctaccgccactaccccaacagcaacaagtgtgaccgctatcccttcatcttccctcggtactgcgtggacccggctgtctcagactactactcccacagccacaatgtccaccgctacaccctcctcaactccagagaccgtacatacatctacggttctgactaccacaaccacaacgactcgggcaacaggctccgtggctactcctagtagcacacccggaactgcccacacaactaaggtgcccacaacgaccacaaccgggtttaccgccacaccgagttccagccccggtactgcgctcacgccccctgtttggatctctactaccaccacacccactacaaggggcagtaccgtcaccccaagctcaatccccggaaccactcacacagccacagtgttgactaccacgacaaccacggtcgcaacaggctcgatggctactccatccagcagtacccagaccagcgggactcctccttccctcacaaccacagccacaacaatcacagctaccggctcgacaacaaatccatcctctacacctggtacaactccaatacctcctgtgcttaccacgactgccactacgcctgcagcaacaagtagtactgtgacacctagctcagctctgggtaccacccataccccacccgtgccaaacactactgccactacccatgggaggagtctccctccatcatccccacacactgtgaggacagcctggacatcagcgacttctggcattttggggaccacacacatcaccgagcccagcacagtgaccagccatacacccgcagctaccacgtcaacgacccagcactcaaccccagcactcagtagccctcacccatcgagtagaaccactgagtcccctccatccccgggaactacaacccctggtcacaccaggggaacctcacgcactacagctaccgccacgcccagtaaaacacgcacctccaccctgctgcccagtagccctacttctgcacccataacaaccgtcgttacaacgggatgcgagcctcagtgcgcctggtctgagtggcttgattactcatatcccatgcccggacccagtgggggagacttcgacacctactccaatatcagggctgccggaggagccgtatgcgagcagccattgggtctcgaatgcagagcccaggcacaacccggtgtcccactgcgtgagctggggcaggtggtagaatgtagtttagactttgggttggtctgtcggaacagagagcaggtgggaaagttcaaaatgtgctttaattatgagattcgagtattttgttgtaactatggacattgccccagcaccccagccacatcttccactgcgactccaagcagtaccccagggaccacatggatcttgaccaaacttactacaacagcaactaccacagaatccacaggttcaacagccacaccatcgagcacccccggagcaacagcaggtacaccacacgttagtacaactgcaacaactccaactgtcacgtctagcaaggccacacctttttcctccccagggaccgccacggcgctgccggcattgaggtcaactgctacgactcccaccgctactagcttcacagccatcccatcttcctcactgggtacaacgtggacccgtctcagtcaaactacaaccccaacagcaactatgtccaccgccacaccttcgtccacacccgaaaccgctcacacgtccacggtccttacaactaccgcaacaactaccagggctacggggtccgtcgcgaccccaagctcaactcccggaacagctcatacgaccaaggtgcctactacaaccaccaccggatttaccgttacgccttcctcctctccaggcaccgccagaactcccccagtctggatttctacgactaccacccccaccacaagtggcagtacagtgacccccagctcagtgcccggaactactcatacccctactgtgctgactaccacaacgactaccgttgctaccgggtcaatggcgaccccatcttccagcacccaaacctcgggaacgcctccctctttgataaccacagcaactactatcacagccacgggctcaactaccaacccatcttccaccccaggaacaactcctatacctccagtgctcactaccaccgctactacgccagccgcaacgagctcgactgtgacccccagcagcgcactgggaactactcatacgcccccagtccctaatactacagccactactcacggtcgctctctgtccccgagttctccccacaccgtgaggaccgcatggaccagcgctacgtcaggtacattggggaccacacacatcacagagccgagcacaggtacatctcacacccccgcagcaactaccggaacgactcagcatagtacaccagctctctccagcccccacccttcatcaagaactacggagtccccaccctcgccaggcacgacaactccaggacacacaaccgccacgtcacgcacaactgccaccgcgaccccaagtaagacgcgtacatccactctgctgccttctagccccacctctgcccctatcaccacagtggtgaccactggatgcgaaccccagtgcgcatggagcgagtggcttgactatagctaccccatgcccggtccttctggaggtgacttcgatacttatagtaatatcagagcagccggaggagccgtttgtgaacagccgctcggactggagtgtagggcacaggctcagcctggcgttcccctgggagagctgggtcaggtggtggagtgctccctggacttcgggttggtttgcaggaatagagaacaggtgggaaaattcaaaatgtgctttaattatgaaattagggtcttctgctgcaactacggacactgtccttccacgcccgctaccagtagcactgcaatgcctagctctacaccaggaacaacctggatcctgacggaattgactacaacagctactaccacagcttctaccggtagcacggctactccttctagcacccccggtactgcgcctcctcctaaggtgcttacgtccccggctactactcccactgcgactagtagcaaggcgacttcctcctcaagcccgcgaacggccacaacgctacccgtcttaacctcaacggccaccaaaagtactgccacgtccgtgactccaatcccctcttctactttgggcacgactggaaccctacctgaacagactacaacccctgtcgcaaccatgtctacaattcacccttctagtactcccgaaactacccacacctctaccgtgctgaccacaaaagctaccaccaccagagccacctcgtctacctcaacccctagctcaacaccagggacaacatggattctgacagaactaactaccgctgctacaactacagccgcaacgggacctactgccacacctagtagtactcccggaaccacatggatattgaccgaattaacgacaacagctaccaccaccgcttccactgggtctactgcaaccccgtcgagcacccccggaactacatggatcttgactgaaccctctaccacggcaaccgtgaccgtgccaacaggttccacagctaccgccagtagtacccaggctacagcaggaacaccacacgtaagcactacagctacgacccccaccgtcaccagctccaaagctaccccctcaagttctccaggaaccgccactgccctgcccgctctccgaagtacagcaaccacacctaccgcaacctcatttactgccatcccatctagtagcttgggaacgacatggactagactgtctcagacaacaacaccaaccgccaccatgtcaactgccacgccatcatcaaccccagaaacagtccatacatctaccgtactgactgctaccgcgaccacaactggcgcaactggatctgtggccactccgagttccacccccggtacagctcacactaccaaagtacctacaactaccacaacaggctttacagctactcctagcagtagtcctgggaccgccttgacaccacccgtttggatttccacaaccactactccaacgactacaaccccaacaaccagtggctcaactgtgacccccagttccatcccgggtaccactcacacagcacgggtcctgaccacaactacgacaaccgtggcgaccggatccatggcaacaccctcctctagcacccagacctccggcacccctccatcactgacaacaaccgctaccactattaccgcaactgggagcacaactaacccttcctctacacctggaactacacccatcactccggtcctgacctctaccgccaccacaccagcggcaaccagctccaaggccacctcttcatctagccctcggaccgccaccacgttgccagtcctgacctctacggctaccaaaagcaccgccacttccttcaccccaattccctccagtacactgtggactacgtggacagtccctgcacagacaacaacacctatgtctactatgtcaactatccacaccagctctacacctgagactacccatacttccaccgttctgaccacaaccgccaccatgactagagctaccaattctaccgcgacaccctctagcacactgggcacaactcgaatcctgactgaactcaccactacagcaaccactaccgctgccaccggatcaacagccactcttagctccactccaggcacaacctggattctgactgaacctagtaccattgcaacagtcatggtgcccacaggtagtactgccactgccagcagcaccctgggaaccgcgcatactccaaaagtggtgacgacaatggcaacaatgccgacagccaccgcctcaacagtcccctcctcttccaccgttggaacgacacggactcctgccgtccttccctcatctctgccaacattcagcgtcagtaccgtttcaagctctgtcctgaccacattgcgtcccacgggctttccttcaagtcatttctctaccccgtgtttttgccgagcctttgggcagttttttagtccaggggaggtaatttataataagacagatcgcgcagggtgtcacttctatgccgtttgcaaccagcactgtgacatcgatcgattccagggtgcatgcccaacttccccaccacctgtgtctagcgcccctctttcctccccgtcccccgctccgggttgtgacaatgctatccccctccggcaggtaaacgagacgtggaccttggagaactgtactgtggccagatgtgtcggagacaacagagtggtgctcctggatcctaaaccagtggccaacgtgacgtgtgtaaacaagcaccttcctattaaagtgtcagacccttctcagccctgtgatttccactatgagtgtgagtgcatttgcagtatgtggggcggttcacactattctactttcgacggaaccagctacacgttccgcggtaattgtacatacgtattgatgcgagaaatacacgcacggtttggcaacctctccctgtaccttgataaccactactgtaccgcttctgccaccgccgctgccgctcgatgccccagggcactctctatccattacaagagtatggatattgttctaacagtgacgatggtgcacggcaaagaagaaggcctgattctgtttgaccaaataccggtgtccagcgggttctcgaaaaatggcgtcctcgtctctgtgctgggaaccactactatgcgggtggacatccccgcactcggcgtgtctgtgaccttcaacgggcaggttttccaggccaggctcccctatagtttgttccacaataatacagagggccagtgtggaacctgtacgaacaatcaaagggacgattgcctgcaacgggacggcactaccgccgcaagctgcaaggacatggccaagacttggttagtgccagacagtcggaaggacgggtgttgggcaccgactggtaccccgcctactgcaagtcctgcggctcccgtttcatctacacctactccaacgccctgtcctccgcagcccctgtgcgacttgatgttgagccaggtctttgccgaatgtcacaatctagtgccacccggtccattttttaacgcctgcatcagcgaccattgcagaggtcggcttgaagtcccttgccagtctctggaagcttatgccgagctctgtcgagcacgcggagtgtgctcagattggaggggagccacaggcggactgtgtgatttgacttgtcccccaacaaaagtgtacaagccgtgtggacctatccagcccgctacttgcaactctcgtaaccaatccccacagctggaaggcatggcggagggatgtttctgtcccgaagatcagattttatttaatgcccatatgggcatttgtgtccaggcgtgcccctgcgtaggcccagatggcttccctaaatttcccggtgagagatgggtgagcaattgccagagctgtgtgtgcgacgaggggagcgttagcgtccagtgcaagcctttgccctgtgacgcacaggggcagccccctccttgcaatcgacctgggttcgttactgtgacccggccacgggcagaaaacccttgttgccccgaaaccgtctgcgtgtgtaacaccactacttgtccccagagcctcccagtgtgtccgcctggccaagagtctatttgcacccaggaggaaggcgattgttgcccaactttccgttgccgcccacaactgtgctcctacaacggcaccttttatggcgtcggagcaaccttccccggagccttgccatgccacatgtgcacgtgcctcagtggagatacacaagacccaacggtgcaatgtcaggaagacgcatgcaacaacaccacctgtcctcaggggttcgagtataagcgcgtggccggacagtgctgtggggagtgcgtgcagacagcctgcctcacacctgacggacagccagttcagctgaacgagacatgggttaattcccatgtcgataactgcacggtttatctctgtgaagcagagggaggagtgcacttgttaaccccgcagcccgcaagctgcccagacgtctctagctgtcgtggctccctgcgcaagactggatgctgctacagctgtgaggaagacagttgccaggtcagaattaataccacaatcctttggcatcaggggtgcgagacagaagttaatatcaccttctgcgaagggagctgtccaggggcttcaaaatatagcgctgaagctcaagctatgcagcaccagtgcacatgttgccaagagcgcagagtgcatgaagagacagttccgcttcactgtcccaatggatccgctatcctccacacatatacccacgtggacgaatgcggttgtaccccattttgcgtacccgctcccatggcaccaccacatacacggggattccccgctcaggaggcaacagctgttta

SEQ ID NO: 128599 - DNA, 16586 bp, Artificial Sequence
  derived and/or modified sequence
gcgccacgtatgggggcacctagtgcctgtaggaccttggtccttgcactcgcagccatgctggtggtaccacaggccggtaaatcacccccattgcgacccctgagtcgcaattccggggctgggctggacgggggtgcgcctaccagctcacctactcgaagggtgtcctttgtcccccctgtcaccgtgttcccatccctgtcaagaaagcagatgctcccgctgccagccggtaaaggagttttcgctagtcctaaagggggaggcccagatttaggcgttcagctgccacctgctctgaatccagctcacaatggcagggtgtgctcgacttggggggacttccactataagacatttgatggagatgtgttcaggtttccaggcctttgcaactatgttttctcggaacactgtagagccgcttatgaggactttaacgtccagctcaggagggggctagtggggtccaggcccgtggtcacacgtgtcgtgattaaggcccagggcttggtgttggaggccagtaatgggtctgtccttatcaacgggcaaagagaggagctaccttattcgcgcacaggcttattggttgaacagtccggagattatatcaaggtgtccattagactcgtgctgactttcttgtggaatggggaggacagcgccctcttagagttggatcctaaatatgcaaatcagacctgcggcctctgtggtgattttaatggcctgcctgcctttaacgagttctatgcccacaacgcgcgtttaacacccctgcagttcggaaatcttcaaaagcttgacgggcctaccgaacagtgtccagaccctcttcctcttcccgcaggaaactgtactgatgaggaaggcatttgccatcgaaccttgctgggccctgcattcgccgagtgccacgccctggttgatagcaccgcatacctcgccgcttgtgcccaggatctttgcagatgtcccacctgtccatgtgcaactttcgtggaatatagccggcaatgcgcccacgctggcggtcagccaaggaattggcgatgtccagaactgtgtcccagaacgtgtcctctgaacatgcagcaccaagagtgtgggagtccttgcactgacacctgctctaacccccaaagagcacagctgtgcgaggaccattgcgttgacggttgtttctgcccgcctgggaggagctgtacagtgctcgatgatattacccattctggttgtctgcccttgggtcagtgcccatgcacgcacggaggtcgaacgtacagtcccggaacgagcttcaacacgacgtgcagtagctgtacgtgctctggaggtttgtggcaatgccaggacctaccctgccctggaacatgttcagtgcaaggcggagcccacatctcaacatatgacgagaaactatatgaccttcacggagactgtagttacgtccttagtaagaagtgcgctgatagttcctttacagtgttggccgaactgcggaaatgcggtctcaccgataacgagaattgcctgaaggcggtgacactatctctggacggcggagatacagccatccgcgtgcaggccgacggcggtgtgtttcttaactcaatttatacccagttgccacttagcgctgcgaacatcaccctgttcacaccttcatcattctttattgtcgtgcagactggtcttggcttgcagttgcttgttcagctcgtgcccctgatgcaggtgttcgttcggttggacccggctcaccagggccagatgtgtggcttgtgcggtaatttcaaccaaaatcaggccgacgattttacggctctgagcggcgttgttgaagccacaggcgcagctttcgctaatacctggaaagcacaggcagcctgcgccaacgcacgtaactccttcgaggacccctgcagcttgtctgtcgagaacgaaaactacgctcggcattggtgcagccggctaaccgaccctaactctgccttttcacgctgtcactctataattaacccaaaaccttttcactccaattgcatgttcgacacatgcaactgtgagcggtctgaggactgcctgtgcgcggcactctcctcatatgtgcacgcttgtgctgctaagggcgtgcagctgagtgattggagagatggcgtgtgcacaaaatacatgcaaaattgccccaaaagccaacgctatgcatatgtagttgacgcgtgtcaacccacttgcaggggcctgagtgaggcggacgtgacatgttcagtgtccttcgtgcccgtggatgggtgcacttgcccagcaggcacattccttaacgacgctggagcatgtgtcccggcacaggagtgcccctgttatgcccacggcactgtgttggcccctggcgaagtggtccatgacgagggagccgtctgtagttgtacaggcggaaaattgtcttgtctgggcgcaagccttcagaaaagcactgggtgtgcagcccctatggtgtacctcgattgctcaaactcatctgccggaacacctggtgcagaatgcctccgctcttgtcacacgcttgatgtgggttgtttttccactcactgtgtgtcagggtgtgtttgccctcccggactggtatcggacgggtccggcggatgtattgccgaggaggactgtccctgcgtccacaatgaggccacctacaagccaggggagaccatcagagttgattgtaacacatgcacttgcaggaacaggagatgggaatgttcccacaggctgtgtttgggtacctgtgtcgcatacggcgacggccacttcatcacttttgacggagatcgttactcgttcgaagggagctgcgagtatattttggctcaggattactgtggagacaacaccacccacggaaccttccgtatcgtgaccgagaatattccctgtggtacaaccggaacaacatgctcgaaagcaatcaaactgtttgtggaagtgcgcacagcccctgcagtctccacacccgatcccgctgcaaacgagcctgccccaagagaagcctcagtgggatttcgccagcgcctaccacccttgcaatcctatgagttaatcctccaagaggggaccttcaaggccgtcgctcgcggacccggtggggatccgccatacaagatacggtacatgggaatctttctggtgatcgagacgcacgggatggctgtgtcctgggacagaaagacaagcgtgttcattcggctgcaccaggattataaaggacgcgtgtgtgggttgtgcggtaatttcgatgataacgcgatcaatgattttgctactcgtagccggagcgtggtcggagatgctctcgagttcggcaactcatggaaactcagcccttcctgccccgacgccctggccccaaaggatccctgcactgccaatcctttccgaaagagctgggctcaaaagcagtgcagtattctgcatgggccaacattcgccgcatgtagatcccaggtcgattcaacaaaatactacgaggcatgtgttaatgatgcgtgtgcctgcgactccggaggagactgtgaatgcttctgtacagctgtagcagcttatgctcaggcttgtcatgatgctggcctttgcgtgagttggaggacccccgacacctgtcccctcttttgcgatttctacaacccgcatggcggatgtgagtggcactatcaaccctgtggtgcgccttgcctcaagacctgccgtaatccgtccggacactgcctggttgatctgcccggtcttgagggatgctatcccaagtgcccaccatcgcagcccttcttcaatgaggatcagatgaaatgtgtcgcccagtgtgggtgttacgataaggatggaaattattacgatgttggcgcacgggtgccaaccgccgaaaattgccagagttgcaactgtacccccagcggcatccagtgcgcccacagcctggaggcttgtacgtgcacctatgaggataggacttactcttatcaagacgtgatttacaacacaacggatggacttggggcatgtctgatagccatttgtggatctaacggtacaattataagaaaggctgttgcctgccccggaacgcctgccacaacaccctttaccttcacgacagcctgggtcccacattccaccacttcgccagctctgcccgtgtcaaccgtgtgcgtgcgggaagtctgccgatggtcttcctggtataacggccaccgcccagaaccagggctgggcggtggtgacttcgaaacttttgaaaatctacggcaaagggggtatcaggtttgccctgtcctggcagacatcgagtgcagagctgcacagcttccggacatgccactggaggagctgggccagcaagtcgattgcgacaggatgcggggactgatgtgtgcgaatagccagcaaagcccacccctgtgccatgactacgaactgagggtgctgtgttgcgagtatgtcccgtgcggaccatcccctgccccagggacgtctcctcagccctccctttccgcctcaaccgagccagccgtacctaccccgactcaaaccaccgcgactgaaaaaaccacgctgtgggtaacgccctctattcggtccaccgctgccctcaccagccagaccggtagctcatcgggccctgtaacagtaaccccatctgctcccggaaccaccacctgtcagcccaggtgccagtggaccgaatggtttgacgaagattatcctaagagcgagcagttaggaggggatgtggaatcttatgacaaaattagggctgccggtggccacctgtgtcagcagcctaaggacattgaatgccaggcagagtctttccccaactggacactggcacaggtgggccaaaaggtccattgcgacgtgcactttgggctggtgtgcaggaactgggaacaggaaggggtgtttaaaatgtgttacaactatagaatacgtgtgctctgttgctctgatgatcattgcaggggacgagcaaccacccctcctccaactactgaactcgaaactgccacgaccaccaccacacaagccctgttcagtaccccacaaccaacaagttcgcctggactcaccagagcgcctcccgcatccactacagccgtccctactctgagtgaaggcctgacctctccccgatatacaagcacactggggaccgccactacgggcggacctactacgccagccggatctacggaaccaactgttccaggcgtggccacttccaccctgcccacaaggtccgccctgcctgggacaaccggctccctgggtacttggcggccaagccagccccctacactggccccaaccacaatggctaccagtcgggcacgccctactggcaccgcatcaactgcgtcaaaagagccactgactacttctctggccccaacgcttacctcagaactttctacgtcccaggccgaaacgtccactccccgtactgaaacaaccatgtctccactgaccaacaccacgacttcacagggaactacgaggtgtcagccgaaatgtgagtggacagagtggttcgacgtagactttcccacctcaggcgtggcaggcggtgacatggaaacttttgaaaatatcagggcagctgggggtaaaatgtgttgggcacccaagagcattgagtgtcgggctgagaactaccccgaagtctctattgaccaagtggggcaggtgttgacctgcagcctggagacagggctaacctgtaaaaacgaggatcagaccggtcggtttaatatgtgtttcaactacaatgtcagggttctgtgctgtgatgattactctcattgtccgagcacacctgcaacttcttcgacagccacacccagctccacgcctggaaccacttggatccttacgaagcctacaacaaccgcaaccactacagcctctaccggatccacagcaacccctacctcaaccctgcggacagcccctccacccaaagtacttaccacaacagccaccacacccaccgtcaccagctctaaagccacgccttcctctagcccaggcacagccacggcgctgcctgcacttcggagcactgccacgacacccaccgctacctctgtgacccccattccttcctccagcctgggcaccacttggactcgtctcagtcagacaaccactccaaccgctacaatgtccacagccaccccaagcagtacacctgagaccgcgcacacaagtaccgtcctaacagctacagcaactaccacaggcgcaaccggctccgttgctacaccctcctccacacctgggaccgctcatacgaccaaggtgccaactacaactaccaccggatttactgccaccccaagtagctccccgggtaccgcattaactccccctgtgtggatctcgacaactactactcctaccacccggggatctactgtgacgccatctagtatccccggtactacacacaccgcgaccgttttgactactactaccactaccgttgccactggcagcatggctacgccctccagcagcacccagacctctggcacgacacacacccctcctgtgcccaatactatggccaccacccacggccgatccctgcccccatcatccccccacacagttaggacagcctggacgagtgcaacaagtggaattctgggtaccactcacattaccgagccaagcacagtgacaagtcacacactggcagcaacaacgggtaccacacagcactctactccagcactctcatcccctcatccatcctccagaactacagagagtcctccaagtcctggtactactacaccaggtcatactacagcgacatctaggaccaccgccacggcaaccccttccaaaacgaggactagcactctgcttcccagttccccgacatcggcacctataactactgtggtgacaatggggtgtgagcctcagtgcgcctggtcggagtggctagactactcctacccaatgccaggtccatctggcggtgattttgacacatattcgaacattagagccgcaggcggagcggtctgcgaacagcctctcggcctggagtgccgcgctcaagctcagcccggtgttcccctcagagaactgggacaggtagtggaatgcagtttggacttcgggctggtgtgtcgtaatcgcgaacaggtgggtaaattcaaaatgtgcttcaactatgagattcgtgtgttctgttgtaattatgggcattgcccatccacccctgcgacctcttccacagccatgccatcctccacacccggaactacctggatactcacagaattaaccacaactgctaccacgaccgagagcaccggctcaacagctacaccatcttcaactccaggaacgacttggattcttaccgagccgtcaaccacagctacagttacagtgccaactggatcaacagctactgccagcagtacgcaggcgaccgccggtaccccccatgtttctactaccgctacaacaccgactgtgacgtcctcaaaggcaactccttttagttcgcccggaaccgcaactgccctgccagccttacgctctaccgccacaactcctacggccacctcctttactgccattccctccagtagtctcggcaccacgtggaccaggctgagtcaaaccaccacgcccaccgccaccatgagcacagctaccccttcctccacacccgagactgttcacactagcaccgtactgactacaactgccacaaccacaggcgctaccggatccgttgctacaccttcaagtacgccagggacagcacacaccactaaagtgttaacaaccacaacaaccggattcaccgccacccctagctcttcgcctggaaccgctagaactttacccgtctggatatccacaactactacaccaactaccaggggatccaccgtcacgccaagctcaatcccgggtaccactcatacccctaccgtactcactactactaccactaccgtggcaacaggcagcatggctaccccgtcatcctcgacccagaccagtgggacgactcacacacctccagtgcctaacacgacagcaacaacacatgggagatctctcagcccctccagcccccacacagtgcgtactgcatggacctctgcgacatccggaactctgggaaccacacacatcactgaaccatccacaggcacaagccacacacctgcagctaccaccgggacgacgcagcattctacgcccgctctctcctctccacacccctcttctaggaccacggaatccccaccgagccctggtaccacaaccccagggcatacccgtgcgacttcgcgcacaaccgccacagccaccccgtcaaagactcggacaagtactctgctcccatcatcccccaccagcgctcctatcacgaccgtcgtcactatggggtgcgaaccacaatgtgcatggtccgagtggctggattactcctaccccatgcctggacccagcgggggtgacttcgacacctattctaacatcagagccgcaggcggtgccgtttgcgaacaacctttggggttggagtgtcgagcacaagcccagcccggtgttcccctgcgcgagctgggccaggtggtcgagtgctccttggacttcgggctggtatgtagaaaccgcgagcaggtgggaaaattcaagatgtgttttaattatgagatccgtgttttctgctgtaactatgggcactgccccagcactccggctaccagcagcaccgccacacctagcagcactccaggcacaacctggatactgaccgagcagactaccgccgctaccactactgcaaccaccggatctaccgctatccctagctctaccccaggtaccgctccgccacccaaggtgcttactagtaccgccaccactccgacagccacatctagcaaggctacaagtagctccagccctagaactgctaccaccttgccagtcttgaccagtactgccaccaagagcacggctaccagcttcaccccgatccccagcttcaccctcgggacgaccggcaccttacctgaacagacaacaaccccaatggcaaccatgtctactattcatccttcaagcacacctgagactacacatacgagtactgtgcttacaacaaaggcaacaacaaccagggcaacatcgtctatgagcactccatcttcaacccccggtactacatggattttaacagaactgactactgctgccactacaaccgcagcaaccggacccaccgctacgcctagtagtactcctgggacgacctggattctgacagagccttcaacaaccgccactgtgacagtacccaccggaagcacagccaccgcatccagcaccagagctactgccggaactctcaaggtcctgacatctaccgcaacaacccccacagtcatctcttcacgggctacgccttccagcagtcctggaaccgcgaccgcactgccagccctgcgtagcaccgcaacaacaccaacagccacctcggtgactgcaattccctccagcagcctggggaccgcatggacccggctcagccagaccactaccccgactgccacgatgtctaccgccacaccctcctctacacctgagacagtccatacatccacagtgctaacgacaactactaccactacccgggcaacagggagcgtcgccacaccctcctctacccccggaacagcacatacaactaaggtccccactaccacaacaacagggtttactgctacgcctagctcatcaccaggaaccgccctgactccaccagtgtggatttcgacaactacaacacccactacacggggatcgaccgttacaccatcatccattcccggtacgactcacaccgcaacagtactcacaaccacaaccacgaccgtggccacaggatctatggctaccccatcatcaagcacacagacctctggaacaactcatacaccccctgtacccaatactacagctacgacccatggccgaagtttacctccttcttccccccacacggttcgaacagcctggacctcggccacatcaggaatcctcggtacaacacacattacagagcccagtacagttaccagtcacacccccgcagcaaccacatccaccacccagcacagcaccccagcattgagctcccctcatcccagttcccgcacaacagaatcgcccccatccccagggaccactacacccggacacaccaggggcacgagtcggactacggcaacagctacacccagtaagactaggacttcgacgctgcttcccagtagcccaacctccgcccctattactaccgtggtgaccaccggctgtgagccccagtgtgcctggtcagaatggcttgattattcctatccaatgcccggtccgtccggaggagattttgatacttattcaaatattagagccgcaggcggagccgtgtgtgagcaaccccttggcttggagtgccgcgcacaagcccagcccggagtgcccctccgcgaattaggccaggtggtagagtgtagcctggatttcggactggtgtgccgaaatagggaacaagtcgggaagtttaagatgtgcttcaactacgaaattagagtcttctgctgtaattatggccactgtccgagcacacccgctaccagctcaaccgctaccccttcttcaaccccaggtacaacctggatcctcactaaactcaccaccaccgcgaccaccacagagagtactgggagtactgccacaccctcctccactccagggacaacctggattctcactgaaccaagtacaacggcgacggtgacagtgcctaccggttctacagccaccgcatcgtcaacacaagccaccgccggtacgccacacgtaagcaccacagccacaactcccactgtgacttccagcaaagctacacctttttctagccccggaacagcgactgctctgcctgccctgcgatcgacagctactacacccacagctacctcatttactgccataccatcctctagcctcggtacgacctggaccaggctatctcagactaccaccccaacagccacaatgtcaactgccacaccctcatccacacctgaaactgcccatacaagtaccgtattgaccactaccgcaaccactacgagagcaaccggctcagtggccactccgtcctctacacctggcaccgcacataccaccaaagtcccaaccactacgacaactgggttcaccgttacgcccagctcctccccagggacagccaggacgcccccagtctggatttcaacgacaaccacccccaccaccagcgggtcgacagtcactcctagctctgttcccggaaccacacacacccccacagtcctgactaccaccaccactacagtggccacgggctccatggccacaccgagttcttccacccagacgagcgggacaacacatactccaccagttccaaataccacggctactactcacggcaggagtctttcaccctccagtccgcacactgtgcgcacagcttggacttccgccacgagcggaacactggggacgacacatattacggagccatccaccggaacttcacacacacccgctgctacgactgggactacccagcactccaccccagccctgtcttctcctcaccctagcagccgcaccaccgagtctccaccctcccccggaaccactactcctggccatacaacagcaactagtcgtacgactgcaaccgccacaccctctaagactcggacttctacactgctcccctcctcaccgacaagcgcgcctattaccaccgtagttactactggatgcgagcctcagtgcgcctggtctgagtggctagactacagctatcccatgcccggaccgagcggcggagattttgatacctatagcaacatccgggcagcaggaggagccgtgtgtgaacagccactgggcctggagtgcagagcgcaggctcagccgggtgtccctctgggagagttaggtcaggtggtggagtgctctctcgactttggactagtatgtcgcaatcgcgagcaggtgggcaagtttaagatgtgctttaactatgagataagagtgttctgctgtaactacggccactgtcccagtacccccgctactagtagcacagccatgccctccagcaccccaggcactacatggattctgactgaactcaccacgaccgcaacaactacggcttcaacaggatctaccgccaccccaagctcaaccccgggaacggccccaccccctaaggtactaacttctccagctactacccccaccgctacatcgagtaaggcgacgtcttcatcaagtcctcgtactgccacaacccttcccgtcctgacatccaccgctacaaagtccaccgctacgtccgtgacacccatacctagttcaacattgggaactacgggcaccttaccggagcagaccactacccctgttgctaccatgagcactatacacccctcgtcaaccccagagaccacgcatactagtactgttctcacaacaaaagctactaccactagggcaacttccagcactagcactccttcctccacacctggcacaacatggatactaaccgagcttactacagccgcaaccactaccgccgcaaccgggccaacggccacaccatctagcacacccggtactacttggatattgacagagctgacgacaaccgccacgactactgccagcacaggttccactgcaacacccagtagcacgcctggaaccacctggatcctaacagaacctagcactacagccacagttactgtgccaacaggctccactgccacggccagttcaacccaggcaacggctggcaccccgcatgtcagtaccacggctaccactccaaccgtaacatcttcaaaagctactccttcaagttcacctgggaccgctacggccctacctgctctgcgctcgaccgctacaacaccgacagccacctcatttactgcaattccgtcttcttcactgggcacgacgtggactcgcttgagtcagacaacaactcctactgccacaatgtctacagcgaccccgtcttcaacacctgaaactgtccacaccagtacagtgctaaccgccactgccacaaccactggagccaccggatcagtggcaacaccgtcctcgactcctgggacagcccatacaaccaaggtgcccacaacaaccactacaggctttactgcgacaccctcaagttcccccggtactgccctgacacctcctacgacaacacccatgtccacaatgtctaccattcatacttcatctaccccagaaacaacacatacttctaccgttctgacaacgaccgcaaccatgactagagctactaattcaacagccactcccagcagcactctcggcacaacccggatcctgactgaactgacaacaaccgctaccaccacagccgctacggggtccactgccacacttagcagcacacccggaaccacttggatcttgactgaaccttccacgatcgcaacagtgatggtgcccactggctcgacagccactgcttcctcaaccctgggaactgcgcacacccccaaagtggtgaccactatggccacaatgcccactgctacagcctcaacagtgccttcttcctcgactgtcggtacaacacggaccccagctgtgctcccatcatccctgccaacgtttagtgtttccacagtcagtagcagtgtactaacgacccttcggcctaccggattccccagctcccacttcagtacgccctgtttctgccgagccttcggccagtttttttctcccggtgaagtcatctacaataagactgacagggccggttgccatttctacgccgtctgtaatcagcattgcgatatcgaccggtttcagggcgcatgtcccacctcaccccctcccgtgtctagcgctcctctgtcttccccttcacccgctccaggctgtgacaacgccatcccattgcgtcaggtaaacgaaacatggaccttggaaaactgcaccgttgcgcgttgtgtgggagataaccgggtcgtcctgctcgatcccaagccagtagcaaacgtcacttgcgttaataaacaccttcccattaaggtatctgatccctcccaaccctgtgatttccactatgagtgcgagtgcgaatgcgtgggtggccgagggataacccctggggctggcatatgcagcatgtggggaggatcccattactccaccttcgatgggacatcctacaccttccgcggtaactgcacttacgtgctgatgagagagattcacgctcgcttcggtaacttgtccctatacctcgacaatcactattgcacagccagcgccaccgctgcggctgcacgctgcccacgagcgctgagcattcattataagagtatggatatcgttctgacagttactatggtccacgggaaagaggaggggctgatcctgttcgaccagataccggtttcctcgggcttcagcaagaacggcgtgctcgtgtccgtcctgggcactacgacaatgcgggtggatatccccgcactgggagtcagcgtgaccttcaatggccaggtgtttcaggcacggctcccatactctctcttccacaacaacaccgaagggcaatgcggaacatgtaccaataaccagagggacgattgtctacagagggatggaacaacagcagccagctgtaaggacatggctaaaacctggcttgtacctgactcacgaaaggacggctgttgggcccctactggcacgccccctacagcgagccctgctgcgcctgtgtcttccacgcctacaccaaccccatgcccgccacagccactgtgcgacttgatgctatcgcaggtctttgcggaatgccacaatctggtcccacctgggcctttttttaacgcctgcattagcgatcactgccggggtcgcttggaagtcccctgtcagtcactcgaggcttatgcagaattatgccgggcacggggtgtttgttcggattggcggggtgccactggtggcctgtgcgacctgacatgccctcctacaaaggtgtataagccctgtggacccatccagcctgccacttgcaacagccgaaaccagtcaccacagctggagggcatggcagaaggatgcttttgtccggaagatcaaatcctcttcaatgctcacatgggcatttgtgtgcaggcttgcccttgtgttggcccagatgggtttcctaagttcccaggagagaggtgggtctccaactgccagagctgcgtgtgcgatgaaggatccgtttcagtgcaatgtaagcccctgccttgcgacgctcagggccaaccgccaccttgtaatcgcccaggcttcgtgacagtcacaagaccacgtgcggaaaacccgtgttgtcctgagacagtatgcgtgtgcaacactaccacttgtcctcaaagcctgcccgtgtgtccccctggtcaggagtcaatatgcacccaggaggaaggggactgctgtccaacctttaggtgcagaccccaactgtgctcgtataatggtaccttctacggtgtgggagcgacatttccaggtgctctcccctgccatatgtgtacatgtctgtcaggtgacacccaggacccgacagtgcaatgtcaggaagatgcttgcaacaacaccacatgcccccaggggttcgagtataagcgtgtggcaggtcaatgctgtggagagtgcgttcagactgcttgccttacaccagacggtcagccagtacaactgaatgagacttgggtgaacagccacgtggacaactgcaccgtgtacctgtgcgaggcagaagggggagttcaccttctgactccacagcccgctagctgcccggatgtgtctagttgccggggtagcctgcggaaaaccggttgctgttattcttgtgaggaagattcatgccaggtgcgtatcaatactaccatactttggcaccagggttgcgagaccgaagttaacataacgttttgcgagggtagctgcccaggagctagtaagtatagtgccgaggcacaagccatgcaacaccaatgcacctgctgtcaggaacggagggtgcacgaggagacagttcccctgcactgtcctaatggctcagcaatactccacacatacacacacgcggtgcaggtgctgtgcggactgctggcgtggggcttgcaggcaggaggacatatcagaggagccgtgcaggaccctcaacaacctctgaaagatcaggaggccagtggaaaggctcgccaaggcggaggatatcggcagacggtggcatggggcgacaagtctaatgcaagggcgtggctacaaaagcccgtcgtatgggtccagagcggagccttccctacacccggaccagccagcgccctctgtccctggta

SEQ ID NO: 128600 - DNA, 17297 bp, Artificial Sequence
  derived and/or modified sequence
atgggagcaccaagtgcctgccggactctcgttctcgccctcgcggcaatgttggtcgtccctcaagctgagactcaggggcctgtggaacccagctgggagaatgccggtcatacgatggacggcggagcgcctacttcaagtcccactcgcagggtgtcctttgtgcccccagtaaccgtcttcccatctctaagcccacttaatcccgctcataacgggagagtgtgtagtacctggggcgatttccattacaaaacctttgacggagatgttttccgctttccaggtctgtgcaattatgttttttctgaacattgtagagccgcatatgaggacttcaatgtgcagctccggagagggctggtgggctctaggcctgtcgttacgcgggtggtgatcaaggcccaggggctcgttctggaagcctccaacgggtctgtgctgatcaatggtcagagagaagaactcccttattcccggaccggactgctggttgaacagtccggtgattacatcaaggtgagcattaggctcgtgttgacctttctctggaacggggaggattcggctcttttggaactagatccaaagtatgccaaccagacatgcggcctgtgcggcgactttaatggcctgcctgccttcaatgaattctacgctcacaatgccaggcttacgcccctgcagttcggcaatctacaaaagttggacggccctacagagcagtgtccagacccactgccgctgccggcaggaaattgcaccgatgaggaaggaatatgtcatagaacgcttctaggacctgcgtttgcggagtgtcatgccctggtggactctacggcttacctcgccgcatgcgcccaagacctatgtcggtgtccaacatgcccatgtgccacatttgttgagtactcccggcagtgtgcccacgccggagggcagccacggaactggaggtgccctgaactgtgcccacgcacatgcccgctgaacatgcagcaccaggagtgcggctccccatgtacagacacctgtagcaatccccagcgggctcaactgtgcgaggaccactgcgtcgacggatgcttttgtccacctgggaggagctgcaccgttctggacgacatcacgcatagcgggtgtcttcccttgggacagtgcccatgcacgcatgggggacgaacctactcgccaggcaccagtttcaacactacatgtagttcttgtacttgctctgggggtctctggcaatgtcaggacttgccttgccctgggacatgctctgtgcaggggggagcccacatttctacctatgacgagaaactgtacgacttacacggcgactgttcttatgttttgtctaagaagtgcgctgatagctcattcacagtcttagcagagttgcgtaagtgcggactgacagataacgagaattgcctgaaagccgttacactaagcctcgatggtggagatactgctatacgtgttcaagctgacggtggagtgttcctgaattcaatttacacacaactgcctttgtcagctgcgaacataaccctatttaccccctcttccttcttcatcgtggtgcagacgggcctgggtctgcagctgctcgtgcagttagtcccgctgatgcaagtatttgtgaggcttgatcctgctcaccagggccagatgtgtggactttgtggaaatttcaaccagaaccaagctgacgatttcaccgctttgagcggcgtagtggaggctactggagctgccttcgccaacacatggaaggcccaggccgcatgcgccaatgcaaggaactccttcgaggatccttgcagcctgtcggtggaaaatgagaactatgcccgacactggtgttccagattgaccgacccaaacagcgccttttctcgatgtcatagcatcattaacccaaaaccttttcatagcaattgcatgttcgacacatgcaactgcgagcgtagcgaggactgtctgtgtgccgcattgtctagttatgtccacgcgtgtgcagcgaagggggtgcaactatccgactggcgggatggtgtttgtaccaagtatatgcagaactgcccaaaaagccagaggtacgcatatgttgttgatgcgtgccagccaacctgcagaggcttatctgaagcagacgtgacctgtagcgtatctttcgtgcccgtggatggctgcacatgtcccgcaggcacctttcttaacgatgctggcgcatgtgttcctgctcaggagtgcccatgttacgcccatggtacggttctggctccgggagaagtagtgcacgatgagggcgcagtgtgtagctgtaccggcggaaagctcagctgcctgggcgcatctctccagaagtcaaccggctgcgcggcaccaatggtctatcttgattgtagcaactccagcgccggaactccaggggctgaatgcctgaggagctgtcacacactggatgttggctgtttttctacacattgcgtctctggctgcgtatgtcccccaggcttggtgagtgatgggagtggcggttgcatcgcagaagaagattgtccttgtgtccacaacgaagcaacttacaaacctggcgagaccatacgagtggattgtaacacttgcacttgtagaaatagacgatgggaatgctcccacagattgtgtctgggtacttgcgtcgcttacggagacggtcattttatcacgttcgatggcgacagatactctttcgaaggctcatgcgagtatatccttgcgcaggactactgcggagacaacactactcatgggacgttcagaattgtgacggagaatattccatgcggaaccactggcaccacttgctcaaaggcaattaagctgttcgtggagagttacgaactgatccttcaagagggaacattcaaggccgttgcacgcggacccggtggcgatccaccctataagattcgctatatggggattttcctggttatagaaacacacgggatggctgtaagctgggaccgcaagaccagcgtttttatacggctccatcaggactataaaggcagagtatgcggactgtgcggcaacttcgacgacaacgccataaatgatttcgcgaccaggtccaggtccgtcgtgggggacgccctagagttcggtaactcatggaagctgtctcctagttgccccgacgcactggccccaaaggacccatgtacggcaaacccatttcgaaagtcctgggcccagaagcagtgtagtatactccacggtcccacctttgccgcatgccgaagtcaggtggattctactaagtattacgaggcgtgcgtgaatgacgcatgcgcctgcgatagtggcggtgactgcgagtgtttctgtactgccgtagctgcgtatgcacaagcctgtcatgatgcaggcctgtgtgtttcttggaggactcccgacacttgccctcttttttgcgacttctacaacccccacgggggatgcgagtggcactaccaaccctgtggggctccatgtctgaagacctgtcgaaatcccagtggtcattgtctagttgacctgccaggccttgagggctgctaccccaaatgtcctccgtctcagccgttcttcaacgaagaccagatgaagtgcgtggctcaatgcgggtgctatgacaaggacggaaactactatgatgtcggggcacgcgtccccacggccgagaattgtcaatcctgtaactgtacaccttctgggatccagtgcgctcactctctcgaggcctgcacttgcacgtatgaagatagaacatactcataccaagatgtcatctataatactacggatgggctgggggcttgtctcatcgccatttgcgggtcgaacgggaccattattcgcaaggcggtcgcatgccccggtactcccgctaccacaccgtttaccttcaccacagcctgggtgccacattccactaccagtcctgccctccccgtgtcaactgtgtgcgtccgtgaggtgtgccgttggtcctcatggtataatgggcatcggcctgaacccggactgggcggtggagactttgagacattcgagaacctgagacagcgagggtatcaagtctgtcccgtgttggctgacatcgaatgccgtgctgctcagctgcctgacatgcctctggaggagcttggccagcaggtggactgtgacagaatgagaggactgatgtgtgcaaattcccaacagtcacccccactctgccacgactacgagttgcgagtcctgtgttgcgaatatgtgccatgtggtccatcgcctgcacctggcaccagcccccagcctagtcttagcgcctcgactgaaccagcagtcccgacacctacccagacgacagccacagagaaaaccaccctctgggttacgccaagcatcaggagtactgccgcactgacttcgcagactggctcctccagtggaccggtgactgtgacgccgagcgcccctggcaccacaacatgtcagcctcgctgccaatggaccgaatggtttgacgaagactaccccaaatcggagcaacttggcggagacgtggagtcttatgacaagataagggccgcaggaggacacctgtgtcaacaaccaaaagacattgagtgtcaggcagaatcttttccaaattggaccctcgcccaggttggtcaaaaggtccactgtgacgtgcacttcggcctggtttgtagaaactgggaacaggagggcgtttttaagatgtgctataactaccgcattagggtgttatgctgcagtgatgatcattgtcgcggtcgggctacgactcctccaccaaccactgagctggaaactgccacaaccacaacgacgcaagccctgttcagtaccccacagcctaccagttccccaggcctgacacgagcacctcccgctagtactacagccgtgcctacactgtctgaggggcttacatcacccagatatactagcacactcgggacagctacgactggcggaccgacgacacctgccggttctacggaacccactgttcctggagtagccaccagtaccttacctacccgaagcgcactgccagggacgacgggcagtctcgggacatggagaccaagccagccccctactttggctcccacgactatggcaacctcccgagcaaggcccactggcaccgccagcaccgcatctaaagaacccctcacaaccagcttggctccaactttaacttccgagcttagcacatcacaggccgagacctccacccctcgcactgagacgacaatgtccccgttgactaataccacaaccagccaggggacaacacgttgtcagcctaaatgtgaatggactgaatggttcgacgtcgattttcccacctcaggagtggcaggtggcgacatggagaccttcgagaatattcgggcagccggaggtaagatgtgttgggctccaaagtctattgagtgtagggccgagaattaccccgaagtgtcaatcgaccaggttgggcaggtcctgacctgttctctggagaccgggcttacctgtaaaaacgaggatcaaacagggagatttaatatgtgctttaactataacgtgcgcgtgttgtgctgcgacgattactcccactgcccctcgacccctgcaacgtcatctacagccactcctagctccacacccggaacaacatggatcctcaccaaacctacaacgacagccaccaccacggccagtaccggatccacagccaccccaaccagtaccctgagaacggcgcctcccccaaaggtgctaacgactaccgccacaacccccaccgtaacatcatccaaggccactcctagttcctcgcccggaaccgcgacggcacttccagcgttgaggtccacggccacaacacccacggcaacgagcgtgacccctatcccttcctcgagcttgggaacaacatggacaagactaagccagacaactacacccacagcgactatgtcaactgctactcccagtagcaccccagagaccgcgcatacgagcaccgttctaactgctacagccactacaactggcgctactggcagcgttgccacaccctcttccacacccggtacagcgcatacgacaaaggtgcccactacaacgaccacaggatttacagcgacaccctctagttccccaggtaccgccctgacccctccagtttggatcagtacaactactacgccaacaacacggggtagtaccgtcactccttccagcataccaggaacaacgcacacagctacagttttgacaactactaccactacagttgctaccgggagcatggccaccccttcttccagtacccagacaagtggcacaccaccctccttaactacgaccgcgacaacaatcacggcgactggcagcacgaccaacccttcttcaacacccggaacaacaccgatccccccagtgctaactaccactgccactacacctgccgctacgtcaaatacagtaaccccctcgagcgcactggggacgacgcataccccacccgtccctaataccatggccaccacacatggaaggtctctacctccgtcttccccccacactgttcggaccgcctggacgtcagctacgtctggcatactgggtaccacccatatcaccgaaccatccaccgtcaccagccacacactggcagcaaccaccggaactacgcagcactccacacccgcattgagcagtccccatccgtcatctaggacgaccgaatccccgccaagccccggaacaaccacccctggacacactacagcaaccagccgcactacagctaccgctactccatccaagacccgcacaagcactctcctgccaagttcccctacgtctgcgccaataacaaccgtcgtgactatgggctgtgagccacagtgcgcttggtccgaatggttggactattcataccctatgcccggacctagcggcggagatttcgatacgtacagcaatatccgggcagctggcggtgccgtgtgcgagcaaccattggggctcgaatgccgggctcaagcccagcctggagtgcctttacgggaactgggtcaggtcgtggagtgtagtctggactttggtctcgtctgccggaaccgagagcaggtgggaaaattcaagatgtgctttaactacgagatcagggtgttttgctgtaactacggacattgtccatccacacccgctacatcttccaccgctatgcctagctctactcctggaactacctggatcttaaccgaactaactacaacagcaacaacaaccgagagtaccggtagcaccgccacgccaagcagtacgcccggaactacttggatactaaccgagcccagtactactgctacagtgaccgtgcctaccggcagtactgcgaccgccagttctacacaagcgactgccggtactccgcacgtatccaccactgccacgactcccacggtgacatcgagcaaagctactcctttttctagccctgggacagccactgccctcccagccctgcgctccactgctactaccccaaccgccacaagtttcaccgcgattccctcttcgagcctcgggacaacgtggacaagactgtcacagacaaccacgcctacagccaccatgtcaactgctaccccgtcgtcgacacccgaaacggtccacacctcgaccgtgctcaccactacggccactacaaccggtgccaccggaagcgtggcgaccccgtcctcgaccccaggtacagcccatacaacaaaggttctaacaacgactacgactgggtttactgctactcctagctctagccctggaacagctagaactctacccgtgtggatcagcacaaccacaacacccactaccagaggctcaaccgtgactccttctagcatccccggtactacccacactcctacagtactgacgacaacaacaacgacagtggccacaggatcaatggccactcctagtagcagcacccagacatctggcactccgccttccctcacgactaccgccaccacaatcacggccaccggctctacgactaacccaagtagtacgcccggaactacccctattcctccagtccttacaaccacggctacgacccctgcggctaccagcagtaccgtcactccatcctccgctcttgggaccacccatacaccacctgtgcccaataccacagctaccactcatgggagatcgctgtcccctagctcaccccacacggtgagaaccgcctggaccagcgcgacaagcgggactcttgggaccactcatatcacagaaccttccaccgggacctcccatacaccagcggctacaacagggacgacccagcacagcaccccagcgctgtccagtcctcatccgtcttcccgtacaactgagagcccaccgagccctgggaccacaacgccgggacatacccgggctacatcaaggaccaccgccacagctactccatcaaagacgcgtacgtcaaccctgctgccatcctcgccgacctctgccccaatcaccactgtggtcaccatgggatgcgagcctcagtgtgcgtggtctgagtggctcgactacagttatcccatgcctggacctagcgggggagatttcgatacctatagcaatatccgtgcagccggtggggcagtttgcgaacagcccctcgggctggaatgccgcgcacaggcacagcccggagttccgcttagggagctgggccaggtggtcgagtgtagtctggacttcggactggtgtgccgtaatcgagagcaggtgggtaagttcaagatgtgctttaactatgaaataagagttttctgctgcaactacggccattgcccgtctacccccgctacctcctcaactgctactcccagcagcacccctggcacgacatggatcctgactgagcagaccaccgccgctactaccacagcaaccaccggaagcacagccataccctcatccacacccggtacggccccacccccaaaagtcctgacgtcgacggcaacaaccccaactgctacgtcttcgaaagccacatcttcatcaagtccaaggactgccacaaccttgcccgtgttaacgtcgaccgccacaaaatctaccgcgacctcttttacaccaattccctcctttactttgggaaccactgggacactccctgagcaaaccactaccccaatggcaacaatgtccactatccaccccagcagtactcctgagaccacacacacctcaactgtgctgacaaccaaggccacaacaacgcgcgcaaccagttctatgagtacccctagttcgacccccggaaccacctggatccttaccgaactcacgaccgcggcaaccaccactgccgcaaccggccctacggccacaccctccagtacacccggtacaacttggatcctgacagagccaagcacaacagcgaccgtgacagtgccaaccgggagtaccgctaccgcgtctagcaccagagccaccgcaggcacactcaaagtcctgactagtacggcaactacgcccaccgtgatcagcagtagagctacaccatcatctagtcccggtaccgccacagcgcttcctgccctgaggtccaccgccactactcccacagccacctcagtgactgccattccatcttcttccctagggacagcctggactagattgtcccagaccacgacacccactgccactatgtcaaccgctactcctagcagcacgcctgagacagtccatacatcaacggtgttgaccactaccacgactacgactagggctacaggctctgtagcgaccccatcaagcacgccaggaaccgcgcacacaaccaaagttcctactacaaccacaactggatttactgcaaccccaagctcttcccctggcaccgccctcaccccaccagtctggataagcacgactactactcccacgacgcggggtagcactgtcacgccatcgtcaattcctggaaccacacacactgcgaccgtactgacaacaaccactacaacagttgcaaccggctccatggcaacccctagcagcagcacccagacaagcgggactccaccttcactgacgacaacagcaaccaccattacagcaactggctccaccacaaaccctagtagcactcccggtacaacgccaattccgccagttctaacaactactgcaacaacccctgccgctactagcagtacagtgacacctagcagcgcactggggaccacacacacaccaccggtccccaatacaacagccactactcacggccgatctctacccccatcaagtccacatacagtgaggacggcctggaccagcgccacctctggtatccttggcaccacacatattacagaaccgagcacagtcactagccacacccctgccgctaccacaagtactactcagcatagcacacccgctctgtcaagtccacacccctcttcccggacaaccgaatctcccccatcacctgggacaaccacaccaggtcacacgagggggacatctcgcacaacggcgacagcaaccccttccaaaacacggacttctactctactcccgagctctccgacctccgctcctatcacaaccgtggttacaacaggatgcgaacctcagtgcgcttggtccgagtggctggattactcttatcctatgccaggaccatccggtggggacttcgacacctatagtaacatccgggctgccggtggtgccgtgtgtgaacagcctctaggcctggagtgtagagcacaggcgcaacccggtgtgccgctgcgcgagctggggcaggtcgtggaatgcagcctagacttcggcctcgtgtgccggaacagagagcaagttggcaaatttaaaatgtgctttaattatgagataagggtgttctgttgcaactatgggcactgcccttctacaccagcaacctcttccacggcaactccaagtagcacccctggaaccacttggattctgacgaagttgactacaacggccacgactacagagtctactgggagtaccgcaacccctagctcaacccccggaactacttggatcttaacggagcctagcacaaccgcaacagtgactgtgcccaccggctctacagctacggcaagttcaacacaagccactgccggtaccccacacgtgtctaccaccgcaactacaccaacagtaactagttctaaggcaacgcctttcagctcaccaggcacagctacagcactccccgctctgaggagtacagccacaacaccaaccgcgacatcatttaccgctatcccaagttcctctcttgggactacctggacgcggctctctcaaaccacaactcccacggcgacaatgtccaccgctactcctagttcaacaccggagaccgcccacacatccacagtgctaaccactaccgccacaacaactcgggctactggttctgtggccactccctccagcacccctgggactgctcatactaccaaagtgcctactaccaccaccacgggatttacagttacaccttcttccagcccagggacagccaggaccccacccgtgtggatttccaccacaacgacccccaccacgtcaggatcaaccgttacacccagttcggtccctggcactacgcacaccccgacagtgcttaccactaccactactacagtggcgaccggatccatggctactcctagttctagcacgcagacatcaggcacaccacctagtttgatcacaactgcgactacgattacagctactggatcgaccactaatccaagctccacacccggtactactccaataccgcctgtgctcaccacaacagccactactcccgctgcgacctcatcaacagttacaccttcgtcagcgctaggaactacacacactcctcctgtgcctaacacgacagctacaacccacgggcgaagcctgtctccttcgagtccacatactgtgcgaacagcatggacatctgcaacctctgggactctggggacaacgcatatcacagagccttctacggggacctcacacactcctgccgctacaaccggcactactcaacactccaccccagcgttgagttcaccccatccgtcgtctcggactactgagagtccgcctagccccggaaccaccactcctggccacaccaccgccacgtccagaactaccgcgacggcaacacccagcaagacacgcacatcgacactgctgccaagctcaccgaccagcgcacccatcaccaccgtggttacaacaggatgcgaaccccaatgcgcctggtctgagtggctggactactcttatcccatgccaggccctagcggcggagattttgacacgtatagcaatatccgagccgctggcggtgccgtctgtgaacagcctctggggctggagtgccgggctcaggcccagccgggagtgccattaggtgaacttggccaggttgtcgaatgttcgctcgatttcggtttagtgtgccggaatagagagcaagttggcaaatttaaaatgtgcttcaattatgagatcagagttttctgttgtaattacggtcactgtcccagcacgccagctactagctctacggccatgccctcgtctacgcctggaacaacctggatcctgaccgagctcaccaccactgcgacaaccaccgcgtctaccggatccactgccacccccagcagcactccaggcacagcccctccacccaaagttctgacttcccccgctacaacaccaaccgcaacttcgagcaaggctacctcctcttcttcccccaggactgcaaccacactccccgtgctgactagcaccgccactaagtcaacggcaacttctgtcactcctataccttcctccacattggggacaactggcacactgcccgagcagaccacaacccccgtcgccaccatgtctacaatacacccatcaagtacccccgaaacaactcacacaagtaccgtactgactacaaaggcaaccactacacgggctacctcttcaactagcacgccttctagtactcctgggaccacatggattttgactgagctcaccactgccgctacaactaccgccgctaccgggcctactgctactccctcaagcacaccaggtacgacctggatcctcacagagctcaccacgactgccacaactacagcctctaccgggtctacagcgacgccctcctccaccccgggtacaacctggatccttacagaaccatcaacaaccgcgacagtcaccgtccccaccggatcgaccgcgaccgccagcagcacccaggctacagccggtacgcctcatgtatcaactaccgctaccactcctacagtgaccagttctaaagccaccccgtccagttctccgggaacagcgacagccctgcccgcacttcgctctacggcaaccactccaacggccacgagctttaccgctattccgtcaagttccctgggcactacatggacacgactgtcccaaaccaccacacccactgccacaatgtctaccgcgacgcctagttccacgcctgaaacagtccacacttcaacagttctcacagctactgcaactaccacgggcgctaccgggtccgtcgcaaccccaagctctacaccaggcaccgcgcatactactaaggtgcccacaaccaccaccactggattcacagccaccccgtcatccagccctggcactgctcttacaccaccggtttggatcagcacaacaaccacacccaccaccaccacacccactactagtgggagcaccgtgaccccaagcagtattccgggtacaacccatactgcacgggtcttaacaaccactacaaccacagtcgctactgggtcgatggccacacctagtagctcgacacagacatctggaactccacccagtctgaccacgaccgcaaccacaattactgccaccggcagtacaaccaacccttcgagcacgccaggaaccacaccgattacacccgtgcttacctccacggccaccaccccggcagctacctcaagtaaagcgacatcatctagcagtccgcgaaccgcaactaccctcccggtattaacctctacagccactaagtcaacagccacaagtttcacgccaatcccttcctccacactttggacaacctggaccgttccggcacagacgaccacaccaatgtccacaatgtctacgatccatacaagttccacacccgagaccactcacacatccaccgtactgaccaccacagccacaatgacacgcgcaacaaattcaaccgctacaccatccagcacactaggaaccacgcgcattctgaccgagctcactacgaccgctactacaaccgcagcaaccggctctacggctacgctaagctctactccaggtacgacgtggatactaaccgagccctctactattgccacagtcatggtgcccactggatctacagcaacagcgtctagtacgcttggaaccgcccacactccaaaagtcgtcaccactatggccaccatgccgactgccactgcctcaactgttccttcaagttccaccgtgggcacaaccagaaccccggctgttttgccctccagtcttcctacgttcagcgtgagcacagtaagttcatctgtactgacaacactgaggcccactggattccctagctcccatttcagcacgccctgcttttgcagggccttcggacagttcttcagtcccggtgaagtaatctataacaaaactgatcgggcaggctgtcatttctacgctgtatgtaaccagcactgcgatattgatcgttttcagggtgcttgcccaacatcacctcctcctgtttcgtcggcgcctctctcctcaccaagtccagcacccggttgcgataatgccatacccctgagacaggtgaacgagacttggacgctcgagaattgcacagtggccaggtgtgtgggggataaccgcgtcgtgctgctcgatcccaagccagtggccaatgttacctgtgtgaacaaacatttgccaatcaaggtgtcagatccatcgcaaccttgtgattttcactacgaatgcgagtgtatctgtagcatgtggggtggctctcattactctacattcgacggtaccagttacacatttagaggaaactgtacatacgtgctcatgcgcgagattcacgcgagatttggcaacctgtccctctaccttgataatcactattgtaccgcctcagccaccgcagctgctgcaaggtgtccaagagccctcagcatacactataaatccatggacatcgttctgacagtgaccatggttcacggcaaagaggagggtcttatcctgttcgaccagatcccagtgtcctctggattcagtaaaaatggtgttcttgtttcggtgttaggaaccacgaccatgcgcgtggacatccccgctctcggcgtgtcagtcacctttaatggccaggtcttccaggccagactgccctactccttatttcacaataatacagaaggccagtgtggcacctgcactaataaccaacgggacgattgtctgcagcgagatggcactacagctgctagctgcaaggatatggctaaaacctggcttgtgccagatagccggaaagacggctgctgggcgcctaccgggactccgcctacagcctctcctgccgctcctgtgagctctactccaaccccaactccctgcccacctcaacctctgtgtgacctcatgctgtcacaagtctttgccgagtgtcacaacctcgttccacccggaccattctttaatgcctgtatctccgatcactgccgaggcaggttagaggtcccatgtcagtctttggaagcctacgccgaactgtgtcgcgctcgtggagtttgctcagattggagaggcgcaacagggggactgtgcgacctcacttgtccaccaaccaaagtctataaaccttgcggcccaatccagcctgccacctgcaattcacggaaccagtcccctcagctcgaagggatggcagaaggctgtttctgccctgaagatcaaatcctttttaacgcacacatggggatctgtgtgcaggcgtgcccttgcgtgggcccagacggatttccaaaatttcctggtgagagatgggtttccaactgccagagttgtgtgtgtgacgaagggagtgtatcagttcagtgcaagccactgccatgtgatgcacagggccaaccacctccatgcaacaggccagggttcgtgaccgtcacccgaccccgtgccgagaatccatgttgtccagaaactgtgtgtgtgtgtaatacaactacctgcccgcagtctctccccgtgtgccctcccggacaggagagtatctgcacacaggaagaaggggactgctgccctactttcaggtgcagacctcaactgtgcagttacaatgggactttctacggggttggggcaacttttcccggtgccctgccatgccatatgtgcacttgcctctcaggcgacacacaagatcccaccgtgcagtgccaggaagacgcttgcaataatactacatgtccacaggggttcgagtacaaacgcgtggcaggtcaatgctgtggcgaatgcgttcagacagcatgtctgacccccgatgggcaacctgtgcagttaaacgagacttgggtgaatagccacgtggacaactgtaccgtgtacctgtgcgaggccgaaggaggagtgcatctcttgaccccacaacctgcaagctgccccgatgtttcgtcctgccgaggatctctcagaaagacagggtgctgctacagctgtgaagaggattcctgtcaggtccgaatcaacacaacaattctatggcatcaaggctgtgagacggaggtcaacatcactttttgcgaagggtcctgtccaggggctagtaaatattcagctgaggcccaggccatgcagcaccagtgtacatgttgtcaagaaagacgggtgcacgaagaaaccgtgcctttgcactgtcccaacggttcagctattttacacacatatactcatgtggatgagtgcggatgcacccccttttgtgtgccagcccctatggcacctccgcatactaggggttttcctgcccaggaggccactgctgtgta

SEQ ID NO: 128601 - DNA, 17289 bp, Artificial Sequence
  derived and/or modified sequence
atgggggcaccctccgcttgtaggaccctggttttggccctggccgcaatgttagtcgtgccccaggccgagacacaaggtcccgtggagccttcttgggagaatgcaggccacactatggacggcggagcccctacctcgtccccaactcgccgagtgagctttgtccccccagtgaccgtgttccctagtctctcacccctcaaccctgcgcacaacggacgggtgtgcagcacctggggagacttccactacaagactttcgacggagatgtgtttcgcttccccggactgtgcaactacgtgtttagtgagcactgccgcgctgcctacgaagatttcaacgtgcagttgcgacgagggctggtggggtcccgtcctgttgttacccgcgttgtgatcaaagcgcagggcttggtcctagaagccagcaatgggagtgttctgatcaatggtcaaagggaggagctgccctacagtcgaactggtctattggtggaacaaagtggagattacatcaaggtgtcaattcggcttgtcctaacctttttgtggaacggtgaggactcagccttgctagagctggaccctaagtacgccaatcagacctgtggcctgtgcggagacttcaatggcctcccagcattcaatgagttctatgcccacaacgctcggctgacaccactccaatttggaaacctccaaaaattggatggcccaaccgaacagtgcccagatccgctccctctaccggctggtaactgcaccgacgaggaaggcatttgccaccgcacacttctggggccagccttcgctgagtgccacgccctggtggattctacggcctatctagcagcttgtgctcaggatctctgccggtgcccaacatgcccgtgcgctactttcgtggagtattctcgtcagtgtgctcacgcagggggacagccccgaaactggcgatgtcctgaactatgtcccagaacatgccccctcaacatgcagcaccaagaatgcgggtccccatgcaccgatacatgctctaacccacagcgggctcagctgtgcgaagatcactgcgtggatggatgcttctgcccgccaggtaccgtgcttgatgatattacacacagcggctgtctgccgctggggcagtgcccatgtacccacggtggacggacttactctcccggtacttcttttaacactacttgttccagctgtacttgtagcggcggactgtggcagtgtcaggatcttccttgtcctggcacttgctcagtccaggggggagcgcacatcagcacctatgacgagaaactgtatgatctgcatggggattgttcatatgtcctctcaaagaagtgtgccgactcatcctttacggtgctggccgagttgcgcaaatgtggtctgactgacaacgaaaattgtctaaaagccgtgaccctctcgctcgatgggggtgacaccgcgatcagggtgcaggcggacgggggagtattcctgaactccatttacacccagctgcctctgtcagcagcaaatatcacattatttactccatcctcattttttattgtggtccagacaggccttgggcttcaactcctggtgcaactggtgcctctgatgcaagtgtttgtacgcctggaccccgctcatcagggccagatgtgcggtctgtgcgggaactttaaccaaaatcaggcggatgattttacagcgttgagcggagtggtcgaggccaccggcgctgcctttgccaacacttggaaagcccaggcagcttgcgccaatgcgagaaacagcttcgaggatccatgttccctgtcagtggaaaacgaaaactacgccaggcactggtgctcccgtctgaccgatccaaatagtgctttcagccgttgtcactccattattaatcccaagccattccactctaactgcatgtttgatacctgcaattgcgaacgaagtgaggattgcttgtgtgctgcccttagctcgtacgtccacgcttgtgcggctaaaggagtccaactttccgactggagagatggcgtgtgtacaaagtacatgcagaactgtcctaagtctcaacgctatgcctatgtggtagatgcgtgccagccgacctgcagaggactctctgaagctgacgttacttgcagcgttagcttcgtgcctgtggacgggtgtacatgtcctgctgggactttcctgaacgatgcaggcgcatgcgtgccagcacaggagtgcccttgctatgctcacggaacagtacttgctcctggcgaggtggtgcatgacgagggcgctgtgtgcagttgcactggagggaaactgtcctgtctgggggcatccctccagaagagtacgggatgcgccgctcctatggtttacttggactgtagcaatagtagtgccggaacacctggggctgagtgcctgcggagctgccatactctcgatgtgggctgcttttcaactcactgtgtttcgggttgcgtctgtcctccaggtctggtatctgacggttccggcggatgtatagctgaggaagattgtccatgtgtgcacaacgaggccacgtacaaaccgggagagaccattcgcgtggattgtaacacctgtacttgtcgaaaccgtcgatgggaatgttcacacaggctatgtttaggtacctgtgtcgcatatggagatggacattttatcacatttgatggggacagatacagctttgaaggctcttgtgagtatattttagcccaggattattgcggcgataacacgacacatggaacatttcggatcgttaccgagaacatcccctgcggaactaccggcactacgtgctccaaagcaatcaaactatttgtcgagtcctatgagctaatcctgcaggagggtaccttcaaggctgtagccaggggtccgggtggtgatcctccgtacaagatccgatatatgggaatctttctggtgattgaaacgcacgggatggcagtgtcctgggataggaagacgtccgtctttatcaggctccaccaagactataaaggtcgggtatgcggcctttgtggcaactttgacgacaatgcgattaacgatttcgccacacgctcaagaagcgtggtaggagacgccctggagtttggaaactcttggaaactcagcccaagctgccccgatgcccttgccccaaaagatccatgcaccgctaatccttttaggaagagctgggcccagaaacagtgttctatcctgcatggccctacctttgcagcctgccgctctcaggtggattcaactaaatattacgaagcatgcgttaacgacgcttgtgcatgtgactctggaggtgactgcgagtgtttttgcactgctgttgcagcctacgctcaagcttgccacgatgccggtctctgcgtgtcgtggcgcacacctgacacctgcccattattctgcgatttctacaacccccacggtgggtgcgaatggcactaccagccatgtggcgcaccctgtctgaagacctgtagaaacccatccgggcattgtctggtggatctgcccggactggaggggtgctaccctaaatgtcctccgagccagcctttttttaatgaagaccagatgaaatgtgtggcacagtgcggatgttatgacaaggatggcaattactacgacgtgggcgctagagtccctaccgccgaaaactgtcaatcgtgtaactgtactccctcaggcatacagtgtgctcattctctggaggcctgcacttgcacttacgaagatcgtacttacagctaccaggacgtaatttataatacaacagacggcctcggcgcttgccttatcgcaatttgcgggagtaatggcactatcataagaaaagcagtggcctgccccggtactcccgctaccaccccatttactttcacaaccgcttgggtcccccactccacaacatcccccgcactgccagtgagcactgtgtgtgtacgtgaagtatgccgatggtcatcctggtacaatggacacaggccagagccgggattgggaggcggagattttgagacattcgaaaatctcagacagcgtgggtatcaggtctgcccagtcctcgcagacatcgagtgccgagccgctcagctccccgatatgccactggaggaactgggtcaacaggttgattgcgatcgaatgagaggactgatgtgtgccaatagccagcagagccctccactctgtcacgactacgagctgagggtcttgtgctgcgagtatgtcccctgtggacccagtccagcacctggcacttccccccagcccagtctgagtgcgagcaccgagccagctgtccccacgcctacccagacgacagccacggaaaagaccacactgtgggtgaccccttccattaggagtactgccgctctgactagtcaaacagggagttctagcggcccagttactgtaactccatccgctcccggtactacaacgtgccagccccgatgccagtggacggaatggttcgatgaggactatccgaagtccgaacaactgggtggagacgtggaatcgtacgataaaataagggcagcaggcggacacctctgtcaacagcccaaggatatagaatgccaggcagaatcatttccaaattggaccctggcgcaggtggggcagaaagtccattgtgacgtgcatttcggtctcgtgtgtcgaaattgggaacaagaaggcgtgtttaaaatgtgctacaactacagaatccgtgtcctctgttgttcggacgaccattgccggggacgtgccactacacctccaccgacgacggaactggaaaccgccaccacaacaactacccaagccctcttttcaacaccccagccgacatctagccccggactgaccagagctcctcctgcctctaccaccgcggttccaacattaagcgaggggctcaccagccccagatataccagtacactggggacagcaactaccgggggacctacaacccccgcaggttcaaccgagccaacagtgccgggagttgctactagtacgctcccaaccagatcggccctacctggaactacgggtagtcttggaacatggaggccatcacagcctccaaccctggcgcctactactatggctacatctcgcgcaaggcccacggggactgcttcaaccgccagtaaggagcccttgaccacttcactggctcctacactgacgtccgaactgagtacttctcaagccgagacatctaccccgagaacagagacaaccatgtcaccactgacaaacaccaccacttcgcagggaactactcgatgtcagccgaagtgcgagtggaccgagtggttcgatgtcgactttccaacttctggagtggcaggaggggatatggagaccttcgagaacatccgcgctgcgggaggaaaaatgtgttgggcgcctaagtctattgagtgccgggctgagaactaccctgaggtgagcattgatcaagtcgggcaggttctgacctgcagtcttgaaacaggactaacatgcaagaacgaggatcagactggaagatttaatatgtgctttaattataacgtcagggtactgtgctgcgacgactattcacactgcccgtcgacacccgcaacaagctcaaccgctacaccaagttccacaccaggcaccacctggattctcaccaagcctaccacaaccgcaaccacaacggcatccaccggatcgacggctacaccaacctctacactccgcaccgccccaccacctaaggtgctgaccacgacagccactacaccaacagttacatcgtctaaagcgaccccctccagtagtcccggtacggcaacggcacttcctgctctgaggagtactgcgactaccccaactgccacatctgtgacccccattccatccagctccctaggcacaacatggacccgcttaagccagacaactactcccactgccaccatgtctactgccaccccaagttctacccctgagaccgcccacacttccactgttctgaccgccacagcgactaccaccggcgctacaggatctgtggcgacgccttcctctactcccggaacggctcataccactaaggttccaacaaccacaaccaccgggttcaccgcaaccccttctagtagtccaggcactgcattgactccacctgtttggatttcaacaaccacaacaccaaccacacggggttcaaccgtgaccccgtccagcattcccggaacgacacacacggcgaccgtgctcaccactaccaccacaacggttgctaccgggagtatggcaactcctagttccagtacccagacatctggcacgcctccctccttaacgactactgccaccactattaccgccacagggtccaccactaacccctctagcacccccggaaccacacctattcccccagtactgactacaaccgcaacaactccagccgcaaccagcaacactgtgacaccgagctcagccctcggtactacgcacactccgccagtgccaaatacgatggccaccacccacgggagatccctgccgccaagttctcctcatactgtaagaacagcctggaccagcgcaacttccggtatcttagggaccacgcatattaccgagcctagtacggtgacctctcacaccctcgccgctaccactggcaccacacaacactccactcctgcactatcaagtcctcaccctagcagtcgcactacagaatcccctcccagcccgggaacgactacccctgggcataccactgctacaagcaggaccaccgccaccgccacgccaagcaagaccagaacatccacgctcctgcccagtagccctacctcagctcctatcacaacggtggtgacaatggggtgcgagccccagtgtgcctggagcgagtggctagattactcctaccctatgcccggtccatctggaggagatttcgacacctattctaacataagagcagcaggaggggctgtgtgtgaacaaccactgggactcgagtgtcgagcacaggcccagccaggcgtgcctctgcgtgaactgggccaggtggtggaatgctccctcgactttggactggtatgccgcaatcgcgaacaagtgggaaagtttaagatgtgctttaactacgagatcagggtattttgttgcaactatggtcactgtccttccacccccgctacttcctcgaccgctatgccgtcttctaccccaggcactacgtggattctcacagaacttactacaactgctacaactacagaaagcacaggctccactgctactccaagcagtactccaggcacgacttggatcttaactgaaccctccacgacagccaccgtcaccgttccaaccggctccacagcgaccgcttcatctacgcaggccaccgcaggaactccacacgttagcacgactgctacaaccccgactgttaccagttccaaggcgactcccttcagctcacccggaacggctacagccctccccgcacttagatcaacagccaccacaccgactgccacatcctttactgccattccctctagctctctggggacgacctggaccagactgagccagaccaccacacctactgctaccatgtctacagccactccttcctcgactcctgagacggtgcacacttctaccgtactgacaactaccgcgaccacaaccggcgcaaccgggtcagtagcaactcccagttccaccccaggcacggcccacaccacaaaagtgctgaccacgaccaccaccggatttacagccacaccatcaagttcccctggcactgccagaacactgccggtgtggatcagtactaccaccacaccaactacgagaggatcgacggtcacgcccagcagtatacctggaactacccacacccccacagtattaaccacaactacaaccaccgtggccaccggctccatggccacccccagtagctctacacagacctccggcacccctccaagcctcaccacaaccgccacaacaattaccgctaccggaagcaccactaatcccagcagtactcccggtaccactcctatccctccggttctcacaaccacagccactacacccgctgccacaagctcaactgtcacccccagctcagcactcggcactacccacaccccgcctgttcccaatacaacagcaacaactcatggaaggagtctgagtcctagtagtcctcacaccgtgcgaacagcttggacatccgccacctctggtacacttggaacgacacacattacagaaccaagcacaggaacatcccacacacctgcagcaacgactggcaccacacagcacagcacacctgctctgagctctcctcacccgtcttctagaaccactgagtcacctccctccccaggaacaaccacaccaggccacactcgggctacatcacgtactacagccacagccactccttcaaaaactcggactagcaccctcctcccgtccagtccaacctcagcacccattacaacagtggttacgatgggctgcgaacctcagtgcgcttggagcgagtggctagactactcataccctatgccaggcccaagcggaggtgattttgatacatactcaaatataagggctgctggtggagctgtgtgcgaacagccactcggcctagagtgcagagctcaggcacagccaggtgtgccactccgcgaactgggccaggtggttgaatgttccctggactttgggctggtctgtcggaaccgggagcaggtcggtaagtttaaaatgtgcttcaactatgaaatccgcgtattttgctgcaattacggtcattgtcctagtactcctgcaaccagctcaacggcaaccccttcttccacgccgggtaccacttggatcctgacagagcaaactacagcagctaccaccacggccacgactggtagtacagcaatcccttcctctacccctggtaccgctcccccacccaaagtcctgacatccacggccacaactccaacggcgaccagttcaaaggcaaccagctctagctccccccgtaccgcaacaacactgccagttctcacctctacggcaacaaaatcaaccgcgaccagctttactcccatcccatctttcacccttggaaccacgggaaccctccccgagcaaaccactacaccaatggccaccatgagtaccattcacccatccagtacacccgaaaccacacacaccagcactgtgctgaccactaaggccaccaccactcgagcaacttcttcgatgtctacaccatcttctactcctgggacaacttggatactcacggaactgacaactgcagccacaaccacggccgcaaccgggccaactgctacacctagttccacgcccggaacgacgtggatcctgacggagccatctaccaccgcaacagtgaccgtacccaccggaagcacggcgacagctagctctacccgggcaactgccggaaccctcaaggttctcacatctaccgccaccactcctacagtgatctctagtcgtgccaccccctccagtagtccaggtacagccactgcactgccagctctgagatctaccgccactacgccgacagccacatctgtgaccgctatcccatctagcagtctcggcacagcctggacacggctgtctcagaccaccactcctacagcaactatgtccactgccactccaagctccactcccgagacagtgcatactagcaccgtgctcactaccactacgaccaccactagagccaccggaagcgtagctactccctcctcgaccccgggtacagcccacacgacaaaggtaccaacaacgaccaccactggttttactgcaaccccaagcagctcacccggaacagcccttacccccccagtgtggattagtacgaccactactccaacgactaggggaagcactgtgacgccaagtagcattcctggcacaacacataccgcgaccgtgttaaccactactaccaccacggtggccaccgggagcatggcaaccccaagcagctccacacagactagcgggacaccgccatctctgacgactaccgccacaactatcactgctaccggttccacaacaaacccctcaagtacaccaggcacaacgcccatcccgccagtgctcacaaccactgccacaactcctgcagcaacctctagcacagtcacacccagtagcgctcttggtacgacacatacgccgcctgttcctaacacaactgctacgacccacggcagaagcctgcccccttcctcgccacataccgtccgcaccgcctggacctctgccacctctgggattctgggcaccacgcacatcaccgagccctcaacagtgacatcacatacccccgcagcaactaccagtactacgcagcattcgacaccagcccttagcagcccacatcccagctcgcggactacagaatctccccctagtcctgggaccacaactccaggtcacacccggggaacatcaaggactaccgctactgccactcccagtaaaacacgaacgtccactctgctgcctagctcccctacgagtgcacctattacaacagttgtcacaaccggctgtgagcctcagtgcgcgtggagtgagtggttagattatagttatccaatgccaggcccatccggtggggatttcgatacttactccaacattcgtgcagccggaggcgcagtttgtgaacagcctctgggccttgaatgccgggcacaggcccagccaggagttcctctgcgggagctcggccaggtggtggaatgttcattagattttggcctggtgtgccgcaatcgggagcaagtcggaaaatttaaaatgtgttttaactacgagatacgcgtgttttgctgtaactacggccactgcccaagtacacctgccacttcttccacggctactccttcaagtacccctgggacgacctggatattgacaaagctgaccaccactgctacaacaacagaatccactgggtcaacagcaacaccctcgtccacgcctggaacaacctggattctgactgaacctagcacaactgccaccgtaacagtaccaaccgggtccaccgccactgcctctagcactcaagctaccgctggtactccacatgtctcaacgacagctaccacgcccaccgtgacatctagcaaggcaacccctttttcttccccaggaactgccaccgccctcccggctctaaggtcaactgccacgacccctaccgcaacatcgttcacggccataccatcttcttctctgggtaccacttggacacgactgagccagactaccaccccaactgctacaatgagcacagcaacaccctcttcaaccccagaaaccgcccacactagcacggtgctcactacaaccgccaccacgacccgcgctacaggttccgttgccacaccttcttcgaccccgggaaccgcacatacaacaaaggttccaacgacaaccaccaccggtttcaccgttacgccatcttccagcccaggaacagccagaacccctcccgtgtggatctccacgactactacccctactaccagcgggtccaccgtgacccccagtagtgtcccaggaactacccatacccctacggttctcaccaccactactactacagtcgctaccggctcaatggcaactccgagctcgagtactcaaaccagtggcactcctccctcactcatcaccacagccaccactatcacagccaccggatccacgaccaatccgtcctctactcccggaacaactccgatccctcctgttttgaccaccaccgctactacacctgctgccacaagcagcacagtgaccccctcttctgcgttgggcaccacgcataccccaccggtgcctaataccaccgcaacgacacacggaaggtccttaagccctagttctccgcatacagtgcgcacagcctggacaagcgcgactagcggaacactcgggacaacgcacattacagagccaagtacaggcacttcccacacccccgctgcgacaaccggcacgacgcagcacagcacccctgctctttcgagtccgcacccgtcaagccgaactacagagtcaccaccttcacccggtacaaccactcctggtcacacaactgctacttcacggaccacagccaccgcaacaccttcaaagacccgtacgtctaccctgctgcccagctcccctacctctgcccctattactacggttgtcactacggggtgtgagccccagtgcgcatggtctgagtggcttgactatagttaccccatgcccggaccatccggtggagactttgacacttacagcaacattcgagcggctgggggtgctgtttgcgagcaacctttggggctggaatgccgtgcacaagcccagccgggagtgccactcggagagctggggcaggtcgtcgaatgttccctggattttggcctggtgtgtcggaacagggaacaggttggtaagtttaagatgtgcttcaattatgaaatcagggtgttttgctgcaactatgggcactgcccttccaccccagccacgtcctcaactgccatgccgtccagcacacccggtacaacatggattctgaccgagctaacgaccaccgcgaccacaaccgcatcaacagggtctacagctaccccctcttctactcccggtacagccccacctccaaaggtgttaacaagccctgcgaccactcctacggcgactagtagtaaggccacctcttcctctagccctcggaccgctaccacccttcccgttctaacgagcacagcaaccaagagcacagcaacatcggttacacccatcccttcttctaccctggggactactggcacattgcccgagcaaacaaccacacccgttgccaccatgagtacaatacacccctcttcaactcccgagaccactcacacctctacagtgctcactacaaaggcaaccacaactagagcaactagttccacatctaccccatcgtcgactcctggtaccacctggatcctgaccgaactgactactgcggcaaccaccactgcagccactggaccaacggcgacgccttcttcaactcccggaaccacctggatattaaccgaactgactactactgctaccactacagcctccacaggctctacggctactccaagttctacgcctggcaccacatggatcttgacagagccatctactacagctacggtgacggtacccactggctctaccgccaccgccagttctactcaagcaacggcgggaacacctcacgtctctaccactgcaacaacccctacagtcacgtcttctaaggccaccccctcgagctctcccggaaccgccactgcattaccggctttgagaagtaccgcaactactccaactgcaacaagctttaccgcaatacccagttcttctcttgggaccacttggactcgactgtcccaaactacaaccccaactgctaccatgtcgaccgcaactcctagcagcacgccagagactgtgcataccagcacagttctaacggccacagccactaccaccggcgcaacagggtccgttgccacccccagtagcacacctgggactgcacatactaccaaggtgccgaccacaactaccacaggatttaccgccacaccatcctcctcacccggaacggcactaacaccccctgtttggatttccacaactacgactcctacgactacaacacccacaactagcggcagcacagttaccccttccagcatcccgggtacaacacataccgctcgggtgttgacgacaacaaccaccacggtggctacagggtctatggctacaccgtctagctcaactcagactagcggtactccaccgtctcttaccactactgcaacaacaattaccgcaactggcagcactactaacccgagtagcactcccggtacaactcctatcactcctgtcctgacaagtaccgccactactccagcagctaccagctccaaagccacttcatcgagcagtccacggacagctacaactttgccagtgctgacatctactgctactaagagtacagcgacctcctttacacccatcccaagcagcacactgtggactacatggaccgtacccgctcagaccacgacccccatgagcaccatgtctaccatccacacatcatccacaccagagactacacacacttcgacagtactgactaccaccgctaccatgacccgcgctaccaactctacggcaaccccatcttctacgttgggcacgactcggatccttacagaactcacaactactgctacaactaccgccgcaaccggtagtacagcaacactgtcatccactccaggcacgacctggattctaactgaacccagtactatcgcaacagtcatggtccccacaggatcaacagctacagcttccagcacgctgggaacagcacacactccaaaggttgtgacaaccatggcgaccatgcccaccgccacagcttccactgtgccaagttcctcgacagttggaactacgagaaccccagcagtccttccgtcatctctccctacgtttagcgtctcgaccgtctcgagttctgtccttaccactctacggcctacaggctttccttcctcccattttagcacaccctgcttctgtagagccttcggacaattttttagccccggtgaggtgatatacaataagacggatcgggctggctgccatttttacgccgtgtgcaaccagcactgtgacattgatcgatttcagggcgcttgtccaacgtccccaccccctgtttcttcagcgccattgagctcaccgagccccgcacccggatgcgataatgccatcccactcagacaggtaaacgagacatggacactggaaaactgcacggtggctcgttgcgtgggcgacaatcgtgttgtgcttctcgacccaaaaccagtggcaaatgttacctgtgtcaacaagcacttacccataaaagttagtgaccccagccaaccatgtgatttccactacgaatgcgagtgcatctgctctatgtggggcggaagccactactctacatttgacggcactagctacactttcagagggaattgcacttatgtgctcatgagggagatccacgcacggtttggtaacctatcactctacctcgacaatcactattgtactgcatccgccactgctgccgctgctcgctgccctcgtgctttgtccatacactataagtccatggacatcgtattaaccgtaacaatggtccacgggaaggaggagggcctgatcttatttgatcaaatacccgtctccagtggcttcagtaaaaacggtgtattagtgtcagtgctcggcacaaccacaatgcgcgtggacattcctgccctcggcgtatctgtgaccttcaacggacaggtgttccaagcccgattgccgtattctctgtttcacaacaacacagaaggacagtgcgggacctgcactaacaatcaaagagacgattgcctccagcgcgacggaacaactgctgcctcttgcaaagatatggctaaaacgtggcttgtgcctgacagcagaaaggacggctgttgggcacctaccggaactcctcctaccgctagcccagcagctcctgtttcttcaacacctacaccgaccccttgtcctcctcaacccctctgcgacctgatgttgtcccaggtgtttgctgagtgtcacaatctggtccccccaggacccttcttcaacgcttgcatttccgaccactgtcggggtagactggaagtgccgtgtcaaagtctggaggcctacgctgagctttgccgtgccagaggggtgtgtagcgattggaggggggcaactggtgggctctgtgacctgacgtgccctccaaccaaagtctacaagccctgtggccctatacagcccgcaacctgtaacagccgcaaccagtcccctcaactggagggcatggccgaaggctgtttttgccccgaggaccaaatcctcttcaatgcccacatgggaatatgcgtgcaggcgtgcccttgcgtcggccctgatgggtttccaaaattcccaggtgaacgctgggtcagcaattgccaatcctgtgtgtgcgatgaggggtcagtgtcagtacaatgtaagccactgccatgcgacgcccaggggcagccccctccatgcaataggccaggctttgttacagtgacaaggcctagggcagagaatccttgttgtcctgagacggtttgcgtctgcaacaccaccacatgccctcagtccttgccagtgtgccctccaggccaggagagcatctgtacacaagaagagggtgactgttgcccgacctttaggtgtcgtccacaactgtgcagctacaacggaacattttacggcgttggggctaccttcccaggtgccctgccctgccatatgtgcacatgtctgtctggagacactcaggatccaacagtgcagtgccaggaggacgcctgcaacaacaccacatgcccacaaggctttgaatacaagcgcgtcgcaggacagtgctgcggtgaatgtgttcagacagcatgtcttactcctgatggccagccagtacagttaaacgagacctgggtgaactcacacgtggacaactgtaccgtctacttgtgcgaggccgagggaggggtgcacctcctgactccccagccagcctcatgtcccgacgtgtcttcatgtcgtggatcactccggaaaactgggtgttgctacagctgtgaggaagactcatgccaagtgaggattaacacgacaatcctgtggcatcaggggtgcgagaccgaggtaaatattacattttgcgaaggctcatgccccggagcctctaagtactccgccgaggctcaggctatgcagcatcaatgcacgtgctgccaggaacgccgagttcacgaggagacagtacccctgcactgccccaatgggtccgccatccttcacacgtatacgcatgtggatgagtgcggatgcacacccttttgcgtccctgcccctatggctccaccacatactcgcggttttccagctcaagaagctactgctgtatac

SEQ ID NO: 128602 - DNA, 561 bp, Artificial Sequence
  derived and/or modified sequence
tccagtacccctggaacgacctggattctgacggagccttccacaacagccaccgtgaccgtgccaaccggcagtacagccacggcttctagcacacaggccactgctggtacgcctcatgtttccactacagccactacccctaccgtgacctcaagcaaggccacccccttttccagccccggtacggctaccgccttgcccgctctgagatccacggcaactacacccactgccacatctttcacggctatcccgtctagctgggcccctcccggtcccgcttaccatcggcctccacatcccagacccccatgccctcaaccacacccacccccactccagagactatctactccaccacagtgcctacctcccagaccccctagagggcaccgactgtgcgggcaccccctgctacatcccaggaatagttcccattatcagagcgcggactatcacaatcacttcaccgccacccccagttcctctccagggaccgcccgtacacttcctgtatggatcagcactactactacaccaacaaccaggggcagttag

SEQ ID NO: 128603 - DNA, 2007 bp, Artificial Sequence
  derived and/or modified sequence
atgagagagatccacgccagattcgggaatttgagcctttatctcgacaaccactactgtaccgccagcgctaccgccgcagcggctcgctgccctcgtgctctgagcattcattataagtcaatggacattgtccttacagtgacaatggtccatgggaaggaggaggggctgatcctgttcgatcagattccagttagtagtggcttttctaagaacggcgtgctcgtctccgtcctcggaaccactactatgagagtggacatccccgctctcggggtgtccgtgactttcaacggtcaagtgtttcaagccagactcccgtactcactgtttcataataacaccgagggccagtgcgggacctgtactaataaccagcgagacgattgtttgcagcgggacggtacaaccgcagctagttgcaaggatatggccaagacatggctcgtcccagactcccgaaaggacggctgctgggctcctaccggcactccccctacagctagccctgccgctcctgtgagcagcacccctactccgaccccttgcccaccacagccactatgtgatttgatgctcagtcaggtgtttgctgaatgccataacctggttccaccagggccattttttaacgcatgtatcagtgatcactgtagaggcagactagaggtgccatgccagagcctggaggcttatgccgaattatgccgggctagaggagtgtgcagcgattggcgcggtgctaccggaggtctgtgtgacctgacctgcccccctaccaaggtatacaagccgtgtggccctatacagcctgcaacctgcaactctaggaatcagagcccacagcttgaggggatggcagaaggctgtttttgccctgaggaccagatcttgtttaatgcccacatggggatatgtgttcaggcttgtccttgcgttgggccagatgggtttccaaagttcccaggcgaacgctgggtcagcaactgtcagtcatgcgtgtgcgacgagggaagtgtgtcggtgcagtgcaagcccctaccttgcgatgcccagggacagcctcccccatgtaaccgtcctggatttgtcacggtaacccgccctcgggcagaaaacccttgctgccctgagacagtgtgtgtttgcaatactaccacctgcccgcagtctctacccgtgtgcccccctggccaggagtcaatttgcacacaggaggagggcgactgctgcccaacttttcgatgcaggccacaactatgttcatacaacgggacgttctacggagtcggggcaacctttcctggcgctctcccctgtcacatgtgcacgtgtctgtcgggcgatacccaggaccccactgttcaatgccaggaggatgcatgcaataatactacttgcccacaggggtttgaatacaaacgagttgccggacagtgctgtggcgagtgtgttcagacagcctgtctgacgccagatggccaacctgtacagctgaatgaaacatgggtgaactcccacgtcgataattgtactgtgtatctctgtgaagcagaaggcggagtccacctcctaacacctcagcctgcgtcctgtccagatgttagtagctgtcggggttctctcagaaaaacggggtgttgttactcttgcgaggaagactcctgccaggtccgtataaacacaacaatcctgtggcaccaaggatgcgaaacagaggtgaatataacattctgcgaaggaagctgccctggcgctagcaaatactccgctgaagctcaggcaatgcagcatcagtgcacttgctgtcaggagagacgggtgcacgaggagacggttccactacattgtcctaacggttctgcaatcctgcacacatatacgcacgtagacgaatgtggctgtaccccattttgtgtgcccgctcccatgagcccaccagcctgcgtttggcacccagccctgcgcgcaccggcagctcatctcgggctcgcccctccctag

SEQ ID NO: 128604 - DNA, 87 bp, Artificial Sequence
  derived and/or modified sequence
atgacccccaactcaatgaccgagatggcacttcagccagggaccaaccgctccacagtccagactgagaatactacgggaagctag

SEQ ID NO: 128605 - DNA, 17121 bp, Artificial Sequence
  derived and/or modified sequence
atgggagccccaagcgcatgcagaacgttggtattagccctggctgccatgctggtggtgccccaggcagagacacagggtccagtggagccttcctgggaaaacgcaggccataccatggacggcggggcacctacatcaagcccaactcgccgcgttagtttcgtgccacctgtgacagttttcccctccctctctccccttaatccggctcataacggcagagtctgtagtacctggggggactttcattacaaaaccttcgacggggatgtttttcgctttcccggcctgtgcaattatgtcttttccgagcactgccgtgcggcgtacgaggatttcaacgttcagttgaggcggggactcgttggctctaggccagtggtgacccgggtggtcattaaagctcaagggctggttttagaagctagcaatgggtcagtgcttatcaatgggcagagggaagaattgccttattcaagaaccgggttactggtggagcaatccggcgattatattaaggtcagtattaggctcgtgctgactttcctatggaacggagaggactctgctctcttagagctggatccaaagtacgcaaaccaaacttgcggcttgtgcggcgattttaacggactccccgcatttaatgagttctatgcccataatgccagactgacgccccttcaatttggaaatctgcagaagctggacggccctaccgagcagtgcccagatcctctgcctctgccagctggaaattgtactgatgaggagggtatctgtcaccgaactttgctgggacccgcttttgccgagtgtcacgccctggttgatagcacagcctacctggctgcttgcgcccaggatctatgccggtgtcctacatgtccctgtgcgactttcgtcgagtacagccgccagtgtgctcacgctgggggccagcccagaaactggcgatgtcccgaactttgtccgaggacatgtcccctcaatatgcagcatcaggaatgtgggagcccttgcacagatacgtgctctaacccgcagagagcacagctttgtgaggatcactgcgttgacggatgcttctgcccacctgggtcgaccgtccttgatgatatcacacacagtggatgtctgcccttgggacagtgcccctgcacccacgggggacggacctactctcctggcacaagctttaatactacatgcagcagctgcacgtgcagcggtggattgtggcagtgtcaagatctgccttgccccggcacctgctctgtccaaggcggagcccacatttcaacctatgatgaaaagctttacgacctgcatggagattgttcatacgtcctctcaaagaagtgcgccgacagctcattcaccgtcctcgcagagctgagaaagtgcggcttgacggataacgagaactgtctgaaagccgtaacgcttagcctcgacggcggggacaccgctattcgggtccaggcagacggcggggtgttcctgaactccatctatacccagctgccactttcagctgctaatataactctgtttacccctagtagtttcttcattgtggtgcagacaggattagggctgcagctgctagtgcagcttgttcccctcatgcaagtcttcgtgaggctggatcctgctcaccaggggcaaatgtgtggcctgtgtgggaatttcaaccagaatcaggccgatgactttactgcattgtcaggagttgtcgaggccaccggcgctgcgttcgctaacacctggaaagctcaggcagcttgtgcgaatgcacggaactcctttgaggatccatgttcgttatctgtggagaatgagaactacgctcggcattggtgttcccgactgacagaccctaactccgcgtttagcagatgtcattccatcatcaatcccaagccctttcactccaattgcatgtttgacacctgtaattgtgagagatccgaggattgtttgtgtgcggcattgtcctcatacgtgcatgcatgtgctgcaaagggcgtccagctttcggattggagagatggcgtttgcacgaagtatatgcagaattgcccaaaatcccagcggtatgcatatgtggtggacgcatgtcagccaacatgtagaggactcagtgaagcggacgtgacttgttcagtgtccttcgtgccagtggatggctgtacctgcccggccggcacattccttaatgacgcgggggcatgtgtgcctgcccaggagtgcccctgttatgctcacggaacagtactggcccccggagaagtggtgcatgacgagggagcagtgtgcagctgcacaggcggcaagcttagctgtttaggagcaagtcttcagaagtccactggatgcgccgctccaatggtgtacctagattgctccaattcctcagcaggcacccctggtgctgaatgccttcgctcttgtcacactttagatgttggctgcttttcgacacactgcgtttcaggctgcgtgtgccctcctgggctggtgtcagacggatccgggggttgtatagcggaggaggactgcccctgtgtgcacaatgaggccacatacaagccaggtgaaacgatccgagtagactgtaatacatgtacctgtcggaataggaggtgggagtgtagccacagactctgcctcggcacatgtgtcgcatacggtgatggccatttcatcacatttgatggcgaccgatacagctttgaaggatcctgtgaatatatcctcgcacaggattactgtggcgacaatacgacccacggaacctttcgcatagtgacagagaacatcccttgcgggactaccgggacgacctgttccaaggccatcaaactctttgttgagtcttatgaactgattttacaggaaggcactttcaaggcagtcgctagaggacccggcggagaccctccgtacaaaatcagatacatgggcatctttctcgtgatcgaaactcatggaatggcagtttcatgggatcgcaaaacatctgtgttcattagactgcaccaggattataaagggcgcgtttgcggactgtgcggcaatttcgacgataacgcaatcaatgatttcgccacccggagtcgctccgttgtcggggacgcattggaattcggcaactcatggaagcttagcccgtcttgtcccgacgctctggcgcctaaagacccttgtaccgctaaccccttccggaaatcctgggcccagaaacagtgcagcatactgcatggaccaacgttcgcggcctgtagatcgcaggtggactccacaaaatattacgaggcgtgtgtgaacgatgcttgcgcctgcgactccggtggagattgcgagtgcttctgtacagccgttgcagcatacgcccaggcctgccatgatgcagggctctgcgtgtcctggaggacgcctgatacgtgccctctgttctgcgacttctacaatccccatggggggtgtgaatggcactaccagccatgcggagctccctgtttgaagacgtgcagaaatccatccggtcactgtttggtcgatttgccggggctggaggggtgttacccgaaatgtcctccgagccagccattctttaacgaggatcagatgaagtgtgtcgcccaatgtgggtgctacgacaaggatggaaactattacgacgtgggggcccgggtaccaacagccgaaaattgccagtcctgcaattgtactccttctgggattcagtgtgcgcactccttggaagcttgcacctgtacctacgaagatagaacatactcatatcaggatgtcatctacaatacaacagatggtttgggggcctgcctgatcgcgatttgcggcagcaatggaactatcattcggaaggctgtcgcttgtcccggtacgcctgctactacccccttcacgttcacgactgcctgggtaccgcactcaacaacgtcgccagctctgcccgtgagcacagtgtgcgtcagggaagtgtgtcgctggtcatcctggtataacggacataggccagagcctggactcgggggtggagattttgaaacatttgaaaatctgcggcagcgcgggtaccaggtgtgcccggtccttgccgacatcgagtgtcgcgcagcccaactgcccgatatgcctcttgaggagctcgggcaacaagtggactgcgataggatgcgcggactgatgtgtgctaatagccaacaatcacccccactatgccatgactacgagttgcgggtgctgtgctgcgagtacgttccctgcggcccttcccctgctcccggtacgagtcctcagccatcgctcagtgcgtccacagagccagccgtacccactccaactcaaactacagccacagaaaagactaccctctgggtgaccccttcaatccgatcaaccgctgctttaacaagccagacaggatccagtagcgggcctgttacggtaacaccttccgcccctggaacaacaacttgccagcccagatgccagtggactgagtggttcgacgaagattacccaaaatccgaacaattgggcggggacgtggaatcctatgacaagatcagggccgcaggggggcatctctgccagcaaccgaaagacatagaatgccaggctgaatccttccccaattggaccttagctcaggtcggacagaaagttcattgcgacgtccattttggcctagtgtgccggaactgggagcaggaaggagtctttaaaatgtgctataattaccgcatccgggttctgtgctgcagcgacgatcactgcagggggagggccaccactccaccccctacaacagagttggagactgccaccaccacaaccactcaggcactgttcagtacacctcaaccaacctcttcacctggcctgaccagggcccctcctgcgagtaccactgctgtgccgactttgtccgaggggttaacatcaccacggtatacgagcaccctcgggaccgccaccactggcggtcctacaacacccgctggaagcacagagcctaccgttccaggcgtcgcgacatctacgctgccaaccagatccgctctgccaggaaccaccggatctctggggacctggagaccttcacaaccccccaccctcgcccccacaactatggccacttcccgcgcacgccccaccggcacggccagcaccgcctctaaagagcccctgactacatccctcgcgcccactttgacctcagaactgtctaccagtcaagctgaaaccagcactcccagaaccgaaacgaccatgagccctctgactaacaccacaaccagccagggaaccacacgatgccaacccaaatgtgaatggactgagtggttcgacgtggacttccccacttccggcgtggctggaggcgatatggagaccttcgaaaacatcagagcagcaggaggaaagatgtgttgggctccgaagtctattgagtgccgcgcagaaaattatcccgaggtgtcgatcgaccaagtaggacaggtccttacttgttccctagagactggcctgacctgcaaaaatgaagaccagacggggaggttcaacatgtgttttaattataatgtaagagtcctgtgctgtgatgactattcacattgcccatctacacctgccactagcagtaccgccacacccagttcaacaccgggaactacttggatcctcactaaacccactacaaccgctacaaccacggccagtactggatcaacagcgactccgacatctactcttcgtacagcccctccgcccaaagtgctcactactaccgctaccacacccacggtgacttcctctaaggctactccatcgtctagtcccggcaccgccaccgccctgcccgccctccggtccaccgccaccacacccacggccaccagcgttaccccaattccatctagttcgttaggtactacgtggacaagactcagtcaaacaacaacccctacagccaccatgagtaccgccaccccttcatccacacccgagaccgcccatacttccaccgttctcactgcgacagcgaccacgaccggggcaacgggtagcgtagccaccccaagttccacccccggcaccgcgcataccactaaggtgccaacgaccaccactactgggttcacagccacgccctcatcaagccccggtacagccctgactccacccgtgtggatcagcaccacaaccacacccactaccaggggcagcaccgtcaccccctcctccattcccgggacgacccataccgctacggtgctcactaccactaccacaacagttgcaaccgggagtatggcaaccccaagctcatctactcaaacttctggaactccaccctctctgaccactacggctacaactattactgcaaccggatccaccacaaatccttcctcaacacccggaactacgcccatcccgcctgtgctgaccaccacagcgactacccctgccgcaacttctaatacggtgactcctagcagtgctttaggcactacacacacaccccctgtcccaaacacaatggctaccactcacggtagaagcctgcctccgagttcaccccacacagttcgaacagcttggacgtctgcaacttctggtattttgggaacaacacacattacagaaccgagtaccgtgacatcccatacacttgccgcgactacaggcaccacacaacattcaacccccgcactgtcttctccgcaccccagctctagaaccaccgaaagccccccatcaccagggacaaccactcccggccatacaactgctactagcagaacaactgccaccgctacaccaagtaagacccggacgtcaactctgctcccgtcaagcccaacaagtgcacctatcacaactgtggtaactatgggctgtgaacctcaatgcgcatggagtgaatggctcgactactcctatccgatgccgggtcccagtgggggggatttcgacacgtattccaatattcgagctgccggtggcgccgtgtgcgagcagcccctaggcctggagtgccgcgctcaggctcaacctggagttcccctgcgggaactgggacaggttgtcgagtgttcactggacttcgggctggtgtgccgaaatcgcgagcaagtcggcaaattcaaaatgtgtttcaattatgagatacgcgtgttctgttgtaactatggccactgtccatcaaccccggccacgagcagcacagccatgcctagcagtactcctggcactacctggattctgaccgagctcacgacaactgctaccaccaccgaatccactggatccacagctacgccaagcagtacccctgctactgcgggaacccctcacgtctccacgaccgccacaacacccactgtaactagctcaaaggctacacccttctcaagcccaggcacagctactgcacttccggccctacgctccacggcaaccacccccacagctacctccttcacagccattcctagtagctcactgggcaccacatggactcggcttagccagaccactactccaacagctactatgagcacggctaccccatcctccactcctgagactgtacacacttcaaccgtgctcacaacaaccgcaacaacaactggcgcaacaggttcagtggctactccatcatccaccccaggtacagcgcacacaaccaaagtacttaccaccactaccacgggctttaccgctacgccctccagctcgcccggtacagctcgtaccttgcccgtgtggatttccaccaccactacccccacaacgcgtggttccaccgtgacgccatctagtattccgggaacaacccatactcctactgttctgacgacaaccacaaccacagtcgcaactggtagcatggccacaccaagtagctctacacagacttccggtaccccaccgtctctgacgacgacagctactactatcactgcaacaggcagcactaccaaccctagttccacccccggcaccactcccattccccctgttcttactacgaccgctaccaccccagctgccacctctagcactgtcactccaagttccgccctgggcactactcacacgcctccagttcctaacaccactgcaacaactcacggccgtagcctcagccctagcagtcctcacacagtaaggaccgcttggacatcggcaacttcaggcacattgggtaccacccatatcacagagccctcgaccgggacatctcatacacctgctgccaccactgggactacacagcattccactccagccctatcttctcctcatccatcctcccgcacaactgagtctcctccaagcccagggaccacaaccccgggccacacccgagccaccagcaggaccaccgcaactgccacaccctctaaaacgcggacctccacactgcttccctctagccccacaagcgcccctataactactgtggtcaccatgggatgtgaaccccagtgtgcatggtcagagtggctcgattattcttaccctatgcccggacctagcggcggcgactttgatacatactctaacatcagggctgccgggggtgccgtctgtgagcaacccctgggactcgaatgtcgtgcacaggcacagcctggcgtacccctgcgggagctcgggcaggtggtggaatgcagcctggacttcggacttgtgtgcagaaatcgagagcaggtagggaagtttaagatgtgctttaactatgaaatcagggtgttctgttgcaattatgggcactgcccaagcacccctgccacctctagcactgccaccccttcatcaacccctggaactacctggatcttgactgagcagaccaccgcggcgaccacaaccgccaccaccggctccaccgccattccatcctctactcccggcacagcaccgcctcccaaagtgctaacaagtactgcgaccactcccaccgccacgtcaagcaaggctaccagttcctcatccccaaggactgcaacgacactcccggttctgacctcaaccgcgacgaaatccactgcaacgtcattcacccccatcccttcctttacactcggtacgacagggaccctgcctgagcagaccaccacccctatggcaaccatgagtacaatccatccttcctctacccctgaaactacacacacttctaccgtcctgacaacaaaagccaccaccactagagcaacctcatcgatgagtactcctagctccacaccaggcaccacctggatcctgacagaattaacgacagctgcaaccacgacagcagcaaccgggcccaccgcgactcccagcagcacccccggcactacctggatcctgacggaaccgtccacgactgctaccgtgactgtacccactggtagcactgctacagcgagttcaacacgcgccactgccggcactttgaaggtgctcacctctactgcgactacaccaacagttatctcttccagggccacaccttccagcagtcccggaacagcgacagcgctgcctgcccttcggtctacagcgaccaccccgacagccacctctgttaccgccatccccagtagttcactcggcaccgcctggacccgcctcagtcagacaacaactccaaccgccaccatgagtaccgctactccatccagtacacccgagacagtgcatacgagtactgtcctaaccaccacaacaaccactacgagagctactgggagcgtggcaaccccctcttcaacccccgggactgcacacaccacgaaggtgcccacgacaactaccacaggattcacagccaccccgtcttcttcccctggcacagccctcacaccacctgtctggatcagcacaacgacgacacccaccactaggggtagcacagtaacaccttcctctatcccaggtaccacccatactgcgaccgttctgaccactaccactactacagtggcgaccggatctatggccacaccgtcaagtagcactcagacttcaggaacccctccgagcctcaccacaacagcaaccaccatcactgccactggatccactactaatccgtccagcacccctgggacgacgcccatcccccccgtcttgactaccaccgccactacgcccgcagccaccagctctactgtgactccctcttcagccctgggaaccacccatacgcctcccgtcccaaacaccaccgccaccacacatgggaggagcttgccaccttcttcacctcacacagtgcgcaccgcttggacatcggctacgagcggaatcctaggcacaactcatatcacagagccctctacagtaacctctcacacccccgcagcaacaacgtcaacgactcagcatagcactcccgccctctccagcccgcacccgagtagccgcactactgaaagccccccatctcctggaacgacaaccccgggccacacacgtggtaccagcagaactactgccacagcaaccccatctaagacgaggacgtccaccctgctacctagctctcccacaagcgctccgatcaccaccgtcgtgacgaccggctgtgaacctcagtgcgcctggtccgaatggctggactacagctatcctatgccaggacctagtggcggggacttcgacacgtactcaaacataagggccgcaggtggtgccgtctgcgagcagccactcggcctggagtgccgagcacaggcacagccaggcgtacctctgcgcgagctgggacaagtggttgagtgcagcctagattttggcctggtttgtaggaatagggagcaagtaggcaagtttaagatgtgttttaattatgaaattcgggtcttttgctgtaattatggccactgtcctagtacccctgcaaccagcagtaccgccactccgtcctccacaccagggacgacttggattctgaccaaattaacgactactgccactactactgagagtacagggagcacggccacgccttcctctacccctggcgctacagccggaactccacatgtcagcacgaccgccactacacctactgtgacctcctcgaaagctacccctttctcatcacctggcactgccacagccctcccagctctgcgtagcactgctacaacgcccactgcaacatccttcaccgctatccctagttcaagcctggggacaacctggactcgcctgtcccagactaccacgcccaccgctaccatgtcaacagccacaccatcgagcacaccggaaacggcccataccagtactgtgctcactacgacagcaactactactagagctaccggctccgttgccactccttcctcaacaccgggtaccgcgcatactacaaaggtgcccaccacgacaactactggcttcacagtgactccgtctagctcaccaggtaccgctcggactccccccgtctggatctctactactactactcccaccacctctggctccaccgtaaccccttcctccgtgccgggcactactcacacccccaccgtcttgaccacaacaaccaccaccgttgcaactggctcgatggcaaccccttcaagctccacacagacttctgggacaccccccagcctgatcacaactgccaccacaatcactgcgactgggtcaacaactaatccatcctcaacgcctgggaccaccccaattccaccagtgctcaccaccaccgccactacgcccgccgctacttctagcactgtgacaccctcgtctgcgctcgggacgacacacacgcctcccgtgccgaatactacagctactactcacggccgcagcctctcaccaagttctcctcacacagtcagaacagcgtggactagcgccacatccggaacattgggcacgacccatatcactgaacctagtaccggcacatcccatactcccgcagcaacaacagggacgacgcaacattctactccagccctgtccagcccacacccctcaagcaggaccactgaatcgcccccctcccctggaaccactacccctggacacactactgccacctctcggacaactgcaacagccaccccttccaaaactcgcacatcaacgctgttgccctcatctccaacatcggcccctattactactgtcgtcacaacgggctgtgagccccagtgcgcttggagcgagtggctggactactcttatccaatgccaggaccgtcaggtggagacttcgacacctactccaatatccgagccgcgggcggcgccgtgtgcgaacagcctttaggactagagtgcagggctcaggcccagcctggcgtgcccttgggagaactcggtcaggtcgtggagtgttcactggacttcggtctggtttgccgtaaccgtgagcaggtaggcaagttcaaaatgtgttttaattacgagatccgggtgttttgttgtaactacggccactgtccttccacaccagccaccagttcaaccgcaatgccaagttctacacccggcacaacatggatcttgaccgagctgactactacagctactaccaccgccagcacaggctccaccgctacgccttctagtacacctggcacagcgcccccacccaaggtgctgactagtccggctactacccctacagcgacatcaagcaaagcgacaagcagttcatctcctagaaccgccactacgctacctgtgctgacctccacggcaactaaatccaccgccacttccgtgacacccattccctcatcaactttaggaaccactgggactcttccggagcagaccacaacgccagtagccaccatgagcaccatacacccctcttctactcctgaaaccacacatacttctactgtactgactacaaaggccaccacaactagggctacttccagtacatcaactccatcctctacgcctgggaccacatggatccttactgaacttacgacagccgctacaacaactgcagcaacaggacccactgccacccctagttctaccccgggtacaacgtggattctcaccgagttaacaaccaccgccacaaccactgcaagtactggttcaacggccaccccgtcatctacaccaggcacaacctggattcttacagaaccatctactaccgccaccgtcacagtgcccactggctctactgccacagcttcttctacacaagctacagctggtacccctcatgtgtctaccaccgcaacgaccccgaccgtcacctcatctaaggcaaccccctccagcagccccggtacagcgacagctttgcccgccctaaggtccacggccactactccaacagcaaccagctttactgccattccttccagttccctgggtactacctggacgcgcttatcacagactactacccctacggctaccatgtccaccgcgacccctagttcaactcccgaaaccgtgcacaccagtacagtgttgaccgcgaccgccacaactacaggtgcaaccggaagcgtggctacaccatcttcaacccccggcaccgcacataccactaaagtgcctaccactaccacaacaggctttacagcaacgccttccagtagccccgggacggcacttacaccgcctgtttggatctcaaccactacaactcctacaaccaccacacctaccacatccgggtcgaccgtgacaccatcatctattcctggaactacccacaccgctcgagttttgactacaacaactacaactgtcgctactggcagcatggctaccccaagcagctccacacagacctcaggaactccaccttccctcactaccacagcaaccaccataacagcgaccggttctacaaccaacccaagttcgacccccggtactacaccaattacacccgtcctgacctcgactgccaccacacccgccgctacttcctcaaaggctacatccagctcctctccaagaacagctaccacactccccgtcctgacctccaccgcaacgaaatcaaccgccacaagcttcactcctattccgtcttcaacactctggactacgtggactgtcccggcgcaaactacaacccctatgtcaactatgtctacaattcatacctcttcaactcctgaaaccacacacacctccactgtgcttacaaccaccgccacgatgactcgggccaccaattcaactgccacaccctcatccaccctggggacaactaggattctaactgagctcactaccacagccacaacaaccgccgccaccggctcaacagcaaccttgagctccactcccggtacaacctggattctcacagagccttccaccattgcaaccgttatggtgccaacaggtagcactgcaactgcaagttccaccctcggcaccgctcacactcctaaagtggtaacaacaatggctacaatgcccactgctactgctagcacagtcccatcctctagcactgttggcactacaagaaccccggctgtactcccatcctccttgcctacatttagcgtgtccaccgtgtcctcttctgttctcacaaccctgagacctactgggtttccttcaagtcatttttcaaccccgtgtttttgtagagccttcggacagtttttcagcccgggtgaggtaatctacaacaaaaccgatcgcgccgggtgtcatttttacgcagtctgtaaccagcattgcgatatcgacaggttccagggcgcatgcccgactagccctcctcccgtgagttctgctcctctgtcctcaccaagtccagcacctgggtgtgataatgccatccccttgcggcaggtgaacgaaacatggacactcgagaactgtacagtcgctcggtgtgttggcgacaaccgcgtggtgttactcgatccaaaacccgttgccaatgtgacttgtgtgaacaagcatctgccaatcaaggtttccgacccatcacagccttgtgacttccactatgaatgcgaatgtatctgtagtatgtgggggggatcgcactactctacgtttgacgggacctcttatacattccggggcaattgcacttacgttttaatgagagagatccacgcccggtttggcaacctgtccctgtacctggacaatcactattgcaccgcttctgcaacagccgctgccgcccggtgtcctagggccctgtctattcactacaaatccatggacatagtgcttacagtcactatggtgcacggaaaggaggagggacttattttatttgaccaaatcccagtgtcttcagggttttcaaagaacggtgtgcttgtgtcagtgctggggacgaccaccatgagggtggatatacctgcactgggagtttctgtgacattcaatgggcaagtgttccaagccagactgccttacagcctgttccacaataacacggagggacagtgtggtacttgtaccaacaatcagcgggacgactgcctccaaagggacgggaccacggccgcctcttgtaaggatatggccaagacctggcttgtacctgattctaggaaagacggctgctgggcaccaaccgggaccccccctacagcttcacctgcagccccggtttcctctacacccaccccaacaccttgtccacctcagcccctgtgcgatttaatgctgtctcaggtcttcgccgagtgtcacaatctggtcccacctgggccgttcttcaacgcttgtatctccgatcactgtcgcggtagacttgaggtaccttgccagtctctggaggcttatgctgagctttgtcgggccagaggcgtgtgctcagattggcgcggagccaccgggggattgtgtgacctaacctgtcctcctacgaaggtttacaaaccgtgcggcccaatccagcccgctacctgtaatagccgcaatcaatccccacagctggagggcatggccgagggatgcttctgcccagaggatcagatcctctttaacgcgcacatgggaatatgcgttcaggcctgtccatgcgttgggcctgacggttttcctaagttccccggcgagcggtgggtgagtaattgccagtcatgtgtgtgcgatgaaggaagtgtcagcgttcagtgtaagcccctgccttgcgacgcccaagggcagccaccaccatgcaaccgtcctggatttgtcaccgtgacgagaccccgcgccgagaatccctgctgtcccgagactgtctgcgtatgtaacaccacgacttgtccgcaatccttgcccgtctgtccccccggtcaggagtctatctgtacacaggaggaaggtgactgctgtcccacattccggtgccgacctcagctgtgttcatataatgggaccttttacggggtgggggcaacatttcctggtgcattaccgtgtcatatgtgcacttgtctgagcggtgatacccaggatccaaccgtccagtgccaagaggatgcttgtaataacaccacttgtccccaaggattcgagtacaagcgggttgcgggccagtgctgcggggaatgcgtgcagaccgcatgtctcacacctgacgggcagccagtccagttgaatgagacctgggtgaattctcatgtggacaattgcactgtttacctgtgcgaggccgagggaggcgtccaccttctcactcctcaaccagcttcttgtccggacgtgtcttcatgcagaggatcattacggaagacaggatgctgctactcctgtgaggaggattcatgccaggttcggattaataccaccatattgtggcaccagggttgtgagacggaggtaaatattactttctgcgaggggagctgccctggcgcctctaagtatagtgccgaagcccaagccatgcaacatcagtgcacctgctgtcaggagcggagagtgcacgaggaaactgttcctttgcactgccccaatggatcagcgatcctacacacctatacacatgtcgatgagtgcggctgtactcccttctgcgtaccagctcccatggccccccctcacacaaggggtttcccggcccaagaagccaccgcagtttag

SEQ ID NO: 128606 - DNA, 16587 bp, Artificial Sequence
  derived and/or modified sequence
gccccaaggatgggcgccccatctgcctgcaggacactggttctggctctcgctgcaatgttagtcgtgccgcaggcaggcaaaagcccccctttgagacccttgtcacgtaatagcggggcaggcctggatggtggagcgccaacttcttctcctacccggcgggtgtcgttcgtcccaccagtcaccgtgttcccttcactttcacgaaagcaaatgctgcccttgcctgctggtaagggggttttcgcaagccctaagggggggggtcccgacctgggcgtgcagctgccaccggcactcaatcctgctcacaatggccgcgtctgcagcacctggggagatttccattataagacgtttgacggggacgtgttcagatttcccggactgtgtaactatgtcttctccgaacactgtagggcagcatatgaggatttcaacgtgcagctccggagggggctcgtcgggtcacgacccgtggtgactagggttgtcatcaaggctcaaggtctcgttctcgaggcaagcaacggtagtgtactgatcaacggtcaaagagaagaattaccttactcccgcaccggtctcctggtcgagcagagcggggactacataaaggtgtcaattagactggttttgacatttctgtggaatggggaggatagtgcgctcctcgaactcgatcccaaatatgctaaccaaacctgcggcctgtgcggtgatttcaacgggctgcctgcctttaatgaattctacgcccataacgcgagactcacaccccttcagttcgggaatcttcagaaactcgacggccctaccgaacaatgtccagacccattacctcttcccgccggcaactgtacggatgaggaggggatctgtcacagaactcttctcggccccgccttcgccgagtgccatgctctggtggactccaccgcatacctggccgcttgcgcacaggatctatgcaggtgcccaacctgtccgtgtgccacctttgtagagtattctcggcagtgcgcccacgctggcggccagcccagaaactggcgttgtcccgagctgtgcccaagaacatgtcctctcaatatgcagcatcaggagtgtgggtcaccatgtaccgacacctgttccaacccacagcgcgctcaattatgcgaagaccattgcgtggatggttgtttttgccctcctggacggagttgtactgtcctcgacgacatcactcattctggctgcctccctctcgggcagtgcccgtgtacccacggcggaagaacctattcacccggtaccagctttaacaccacctgttcctcttgcacctgtagcgggggactatggcaatgtcaggaccttccctgtccgggaacttgtagcgttcagggaggcgctcatatttccacgtacgacgaaaaactttatgatttacatggcgattgttcctacgtgctgtccaagaaatgtgccgactcctcctttaccgtcctggctgaacttaggaagtgtgggctcactgacaacgaaaactgcctaaaggctgtgacactgagtctggatggaggagatacggccattcgggttcaggctgatggaggggtgttcctgaactccatttatacacaactgcccctgtcagccgctaatatcacgttatttaccccctcaagcttctttatcgtggttcagactggactggggctgcagctgcttgttcagctagtcccattaatgcaagtctttgtgaggctggacccagcacaccaggggcaaatgtgtgggttgtgtggtaactttaaccagaatcaggccgacgacttcactgcactgtctggtgtggttgaagcaaccggggcagccttcgccaacacctggaaggcacaggccgcctgcgcaaacgccaggaattcttttgaagacccatgcagtctgtcagtggagaatgaaaactatgctaggcattggtgttcgaggttgaccgacccaaactccgcgttctcacgatgccatagcattatcaatccaaagccctttcattcgaactgcatgttcgacacatgcaattgtgagcggtctgaggactgtctctgcgccgccttgagctcttatgttcatgcatgtgcggccaagggggttcagctatctgattggagggacggtgtgtgtacaaagtatatgcagaattgccctaaatcccagaggtatgcttacgtcgtggacgcctgccaacctacatgccgcggacttagcgaggccgacgtgacatgttcggtgtcctttgttcctgtcgacggttgtacctgcccggcgggcacctttttgaacgacgctggtgcatgcgtgcctgcccaagagtgcccctgttatgcccacggaaccgtgctcgctccgggggaggtggtgcacgatgagggtgccgtctgctcctgtacaggagggaagctgtcgtgcctcggagcttcactgcagaagtcaaccggctgtgcagcgcccatggtgtatctagattgctctaattcctcggccggtacacctggagctgaatgtctgcggtcttgtcacactctggatgtgggatgtttttccacacactgtgtgtctggctgcgtttgtccacctgggttggttagcgatggcagcggaggatgcattgccgaggaagattgcccttgcgtccacaatgaggccacttataaacccggggaaaccattcgggtggattgtaacacatgcacgtgccgcaatcggcgttgggaatgcagccaccggctctgtttagggacttgcgttgcctatggagacggtcatttcattacttttgacggcgacagatactctttcgaagggtcatgcgagtacatactggctcaggactactgcggcgataacactacacatgggaccttccggatcgtgactgagaacataccatgtggaacaaccggaaccacttgcagcaaggccataaaacttttcgtcgaggttaggaccgcgcccgcagtaagtactccagaccccgctgcaaatgaacctgcgccgagggaagcttcagtcggattcagacagcgccttccccccctccaaagttatgaattgattctgcaggagggtacctttaaggccgtggctcgaggccccggcggcgacccaccttacaagatcagatacatgggcatctttctcgtcatcgagacccacggcatggccgtttcctgggatcgcaagaccagcgtgtttatccgcctgcatcaggattataaaggccgggtgtgtggactatgtggaaattttgatgataacgccataaacgattttgcaacccgaagccggtccgtcgtaggcgacgcactggagtttgggaactcttggaaactcagtccatcttgtcccgacgccctagccccaaaggatccttgcacagcaaatccctttaggaaaagctgggctcaaaagcagtgttctatacttcatggccccacctttgccgcctgccggtctcaggttgacagcactaagtattatgaggcatgtgtcaatgatgcctgtgcctgtgactccggaggtgactgtgaatgcttctgcacggccgtggccgcctatgctcaggcttgccatgatgccggcttgtgcgtgagctggagaactccagacacttgcccactgttctgcgatttctataacccccacggtgggtgtgaatggcactaccaaccctgcggagcaccatgcctaaaaacttgcagaaatccgagcggccattgcttggtggatcttccgggcctggagggttgttacccaaaatgcccaccctcccagccattctttaacgaggatcagatgaagtgtgtggctcagtgcgggtgttatgataaagatggtaactattacgatgtgggagccagggttcccactgccgaaaactgccagtcgtgtaactgcacgccctccggcatccaatgcgcccatagtttggaggcctgcacttgcacctatgaagatcgaacctatagctatcaggatgtcatttataatacaacggatgggctgggggcatgcctcattgcaatttgcggctcaaatggaaccattatccgtaaagctgtagcttgtcctggtaccccggccactaccccttttaccttcacaaccgcgtgggtacctcactccacaacctctcctgctttgcccgtcagcacggtatgcgttcgggaggtgtgccgctggagctcctggtacaacgggcataggccagaacctggtctcggcggtggtgactttgaaacattcgagaacctcagacaacgtggatatcaggtctgcccagtactggccgatatcgaatgtcgggccgcccagctgccagacatgccactggaagaactgggacagcaggtcgactgcgaccgcatgagaggccttatgtgcgccaactcccagcagtcccctccactgtgccacgattacgaactccgcgtcttgtgctgtgagtatgtgccctgcgggcctagtcctgcccccggaacatctccccagcccagcctgtctgcaagcaccgagcccgctgtgcccaccccaacacagacaactgcaactgagaagactactctgtgggtgacccctagcattcgctcgactgctgctttaacgtcacagaccggctcatcctcaggcccagtgaccgtgacaccaagcgcacctggaactaccacctgccagcctcgctgccaatggaccgaatggttcgacgaggactacccaaaatcagagcaactcgggggggacgtggaatcatacgacaaaattcgcgcggcggggggacacttgtgccagcaacctaaagacatcgagtgtcaggccgagagtttcccaaactggactcttgcccaggtgggccagaaagttcattgtgatgtccacttcggactcgtttgtcggaattgggagcaggagggagtgttcaagatgtgctacaattatcgtattagagttttgtgctgctccgatgaccattgccgaggcagggcaaccacaccaccaccaacgaccgaactcgagaccgctactactaccaccacccaggcactgttttccacccctcaacccacctcctcacccggtttaactcgggccccacctgcatccacaaccgccgttcctaccctgtccgagggactcacctctcctcgctatacctctactcttggtacggccacaacgggaggtccaaccactccagccgggtcaacagagcctaccgtgcccggagtcgccacatcaaccctgcctactcgttctgccctgcccggaaccactgggtctctgggcacttggaggccttcccagccaccaacactggccccaactaccatggcaactagcagggcacggccaacgggcaccgcctcaaccgcctctaaggagcctctgaccacgagcttggcacccacactgacatcggagctgagtacatcacaggctgagacctccactccaaggactgaaacgacaatgagcccactgaccaataccacgacctctcagggcaccactagatgtcagcctaaatgtgaatggactgaatggtttgacgtggacttccccacatcgggcgtggccggcggtgacatggagacatttgaaaacattagagcagctggtggcaagatgtgctgggccccaaagtcaatcgagtgccgcgctgagaattaccctgaagtatcaatcgatcaggtcggtcaggtgctaacctgctccctagagactgggctgacctgtaagaatgaggatcagaccgggcgctttaatatgtgtttcaattataacgttagagttctgtgctgtgacgattatagtcactgtccctctacacctgcgacctcgagtaccgctaccccatcatccactccaggcacaacctggatccttacaaaaccaaccacaactgctacgaccacagccagcaccggatcaacggcgaccccaacgagtacacttcgcaccgccccgccccccaaggtgctgactaccaccgctaccacacccactgtgacgagttccaaagccacccctagcagttccccgggaacggccacagcactgcctgcgttgagaagcacagccactacccctaccgccacatctgtgacccctattccctctagctccttgggcaccacatggacaaggctctcacagactactactccaactgccaccatgtcaaccgcaactcctagcagtaccccagagactgcacacacgtcaaccgtcttgaccgcaaccgctactacaacaggcgctacaggctctgtggccaccccttcatccacccccggcaccgctcacaccactaaagtgcctacaaccactaccaccggtttcactgcaacccccagctcctcaccagggaccgccttgacaccccctgtgtggatttctacaacaaccacccccaccacccgcggcagcacagtaactccttcatccatacccgggacaacgcacactgcaaccgtgttaactactaccactaccaccgtcgcaacaggaagtatggctactccttccagcagcacacagacttccggaacaacccatacccctccagtgccaaatacaatggccactactcatggccgctcactgccaccttcctctcctcacaccgttaggacagcgtggacctcagcaacaagcgggattttggggaccacccatattaccgaaccttctaccgttacctctcacacccttgccgctaccaccggcacgacacagcactccacccccgctctgtctagtccacacccctcttcacggaccacggagagccccccatctccgggtactaccacgcctggtcatacaactgctacctccagaacaaccgctaccgctaccccaagcaaaacccgaacaagtactcttcttccgagctcaccaacctctgccccaattacaactgtggttacgatgggctgtgagccccagtgcgcttggagcgagtggcttgactactcctaccccatgccaggccccagcgggggcgattttgatacatattcaaacatccgcgctgcaggcggcgccgtgtgtgagcagcctttaggcttggagtgccgagcgcaggcccaacctggcgtacccctgagggagcttggccaggtggtggaatgctcactagacttcggactcgtgtgccgaaatagagaacaggttggcaaatttaagatgtgttttaactacgaaatcagggtgttctgctgtaactatggtcactgtccttcaaccccagcaacctcctctaccgccatgcccagctcaacgcccgggaccacatggattctgacagaactcactactacagccaccactacagaatctaccggatcaaccgctacaccctcatcgacccccggcacaacttggattcttactgagccatcaactacagctacagtcaccgtgccaaccggatctacagccacagcctcttctactcaggcgaccgcgggtacccctcatgtttccacaactgccacaaccccaaccgttacatcctccaaggctacacccttctcaagccccggaaccgcaactgcactgcctgctttgcgatctactgcaacaacccctacagcaaccagctttaccgccatcccctcttccagcctgggcactacttggacccggctctcacagacgactacaccgactgcaactatgtccaccgctactccttcttctactcccgagactgtccacaccagtaccgtgttaacaacaacagcgactacaacgggagccacgggatctgtggcaacacctagcagcacccccggtacggctcacaccactaaagtcttgacaaccacaacaactggatttacggcaaccccctcatccagccccggcacggccagaaccttgccagtttggatctcgacgacaacaacacctacgacgcggggctctacagtcactcctagctcgatacccggcactactcacacacccacagtccttactaccacgactaccacagtcgcgactggatcgatggcgaccccatcttcttcaacccaaacatctggtacaactcacaccccgcccgttccgaatacaacggccaccacgcatgggaggtcactatctccttctagccctcacacagtgagaacggcttggacgtcggcaacctcaggtaccttgggaacgacccacataaccgagccatctaccgggactagccacactccggccgctacgacaggaacaacgcagcactcgacaccagctctgagttcgccacatccttcctcgcggacaacagagagcccgccttcgcccggtactacaacccccggtcacactcgtgccacaagtcggactacagccacggccactccgtctaagaccagaacctcgactctgctcccttcatcccctacaagcgcccctataaccaccgttgtaactatgggttgtgagccccagtgcgcatggagcgagtggttggactattcataccctatgccgggtccaagcggcggagatttcgatacttactctaacatccgtgccgctgggggtgctgtctgtgagcaaccactgggcctggagtgtcgggcacaggcgcagccaggcgtcccccttcgcgagctggggcaagtggtggaatgttccctcgactttggcctagtctgtcggaaccgcgaacaggtgggcaaattcaaaatgtgttttaactacgaaattagggtcttctgttgtaattacgggcactgcccatcaaccccagcaacatcttcaactgctaccccttcatctacccctggcaccacgtggatcttaacagagcaaaccaccgcagctaccacaactgctactacagggtctaccgccataccctcatccacacctggaactgcccccccgccaaaggtactcacctctactgccactaccccaacggctacctctagcaaggccacctcctcaagcagcccaaggactgccacaaccctgccagtccttacttccacagccaccaaaagcacggccaccagcttcacgccgatcccatcattcacacttggtacaaccggcaccttgcccgaacagaccaccactccaatggccaccatgagcacgattcacccctcatccacccctgaaacaactcatacttcaacagtgttgactactaaagcaactacaacccgggcaacaagctcaatgagtaccccctcatctactcccggtacaacatggatactaacagaactgacgactgccgcaactaccactgccgccaccgggcccacagcgacccctagctccacccctggcaccacctggattcttaccgagcctagcacaacagccacagtgactgtgcccaccggctccaccgcaacagcgtcaagtacaagggcaacagctggtaccctcaaggttctgacgtctaccgccacaacccctacagtcatttcctcccgggctacaccaagcagctcacctggcactgctacagccctgcctgctctgaggtctacagcaacaacccccaccgctacttccgttactgcaattcccagcagctcattgggtactgcctggactcgtttgagccagactaccactcctacagctacaatgagtacggccactccatcgtccacaccagagaccgtgcatactagcactgtgctgaccactaccaccaccacaacaagggcgaccggctctgttgctacgccaagctccaccccgggaaccgcccacactaccaaagtcccaaccactactaccaccggcttcactgcaactccatctagcagccctggtactgccctgactcctcccgtgtggatatctacaacaacaacaccaaccacccggggctcaactgtaacacctagctctattcctggaacaactcatacagcgactgtgctaactactactaccactacagtggccacagggtcaatggccactcctagctccagcacacaaacctcaggaactacacataccccccccgtgccaaacacaacagctacaacccacggacgatcactgccgccatcctctcctcacacagtgcgcacggcctggactagtgctacctccggcattctcggcaccacacacatcaccgaacccagtactgtaacctcccatacacccgctgcaacgaccagcaccactcaacactccacccctgctctgagcagtccccatccaagctcgagaacaactgagtccccaccttcaccgggcaccactacccccggccatacacgaggcacctcacgtaccaccgcaactgccaccccttccaagacaagaacctccactctattgccttcatccccaactagtgcccctattacgactgtggtgaccacggggtgcgagccacagtgtgcgtggagcgagtggctagactactcttatcctatgcctgggccatcgggcggcgactttgacacctattcgaatatccgagctgccggtggggccgtctgtgaacagcctcttggcctggagtgcagggcgcaagcacagcctggggtccccttgcgcgagctgggccaggtggtcgagtgtagcctggacttcggccttgtgtgccgcaacagggagcaggttgggaaattcaagatgtgtttcaactacgaaattcgggtgttttgctgcaattatggtcattgtccttccaccccagctactagtagcaccgctacgccctcgtcgacaccaggaaccacctggatcctgaccaaacttaccactactgctacaaccacagaatctacagggtctactgccacacctagttctacaccaggtacaacctggatcctgacagagccttcgacaactgcaaccgtgacagtgcctaccggatctacagccaccgcttcctccactcaagccaccgcaggcacaccccacgtgtcgacaactgcaaccacccccacagtcacatcatcaaaggctactccattctctagtcccggcacagcaaccgctctccccgcgttacgatccacagcaaccacgcccactgccaccagttttactgccataccttcgagctctcttggcactacctggacccgcttgtctcaaactaccactccgacggcgactatgtccactgccaccccttccagtacaccggaaactgcccacacgtccacagtcctcaccacaacggctaccaccacgagggccaccgggtctgtcgcgaccccatctagtaccccaggcacagcccacacaacaaaggtacctaccaccacaaccaccggctttaccgttaccccaagcagttcccctggcaccgccaggacaccacctgtgtggatcagcactactacaacacctacaacaagcggttcaaccgtgacgcccagcagcgtgcccgggaccacccatacccctacagtcctcacaacaacaactaccacagtcgcgaccggatccatggccactccgagcagttctactcaaacgtccggaactactcacacgcctcctgtgccaaacacgacggccacaacccacggcaggtcattgtcccccagtagtcctcacaccgtaaggactgcctggacctcagccacgagtggtacactgggcaccacccatatcactgagccttctacaggaacttctcataccccggcagctactactgggacgacccagcactcaacccccgcgctatcatcccctcatccttcaagcagaacaacagagtcacctccctcgcctggaactaccaccccggggcatacaacagctacttctagaactacagcaacagccacgccctccaaaacccggacgtcaacactgttgccctcgtctccaacatctgctccaataacgacagtggtgactaccggttgcgaaccccagtgtgcgtggtccgaatggctggattattcttacccgatgccaggacctagcgggggcgactttgatacttactctaatatcagagcagctggcggagctgtgtgtgaacagcctctgggcttagagtgtagagctcaggcccaaccaggagtcccgctgggggagctgggacaagtggtagagtgtagcctcgacttcggtctagtttgtaggaaccgggagcaggtgggaaagttcaagatgtgttttaattacgagatcagagtcttctgctgtaattatggccattgtccttccaccccagccacaagttctacagccatgcctagctcaacgcctggcaccacctggatcttgaccgagctaacaacaactgctaccactaccgcctcaactggaagtacagctaccccgagttcgacccctggcaccgcgccaccccccaaggtcttgactagccccgccacgactcctacggcaacttctagcaaagctacctcaagtagcagccctcggacagccacaaccttgccagtactgacaagtaccgccaccaagtccactgccactagcgtaaccccaatcccttcatccaccctcggtaccaccggcaccctgcccgaacagacaaccaccccagtggccactatgtccacaatccatccgagctccactcctgaaactactcatacgagtacggtgctaacaactaaggccacaacaacgcgggcaacatccagcacaagtaccccaagttcaactcctggaaccacctggattctaaccgagctgacaaccgctgctactaccaccgccgcgacggggcccactgcaacaccaagtagcaccccgggcactacttggattctgacagaactcactactacagccaccacgactgcatcaacagggagcacagccactccctccagtaccccaggcactacctggatcctcacagaaccttcaacaacagctacagtgacggtgcctacaggatcaactgccaccgcttcttccacacaggccacggcgggtacaccccatgtgtccactacggctacgactcctaccgtcacatcatctaaggccaccccctcgtcctcaccaggaacagccacagccctgccagctctcaggtctacagctaccacaccaactgctacctcgttcactgcgatccctagctcatcattaggcaccacatggacccgactgagccagacaacaacgcctacagccacgatgtctaccgccaccccaagtagtaccccagagacagtccatactagcacagtcttgaccgccacggctaccactactggagcaaccggctcagtggccactcctagctctacgcccggcacggcccatactacgaaagtcccaacaaccacaactaccgggttcactgctactccaagctcgagtcctgggaccgccctgacacctcccaccactacgcccatgtcgactatgtctacaatccacacgtcaagtacgcccgaaaccacccacacgtccacagtcctaactaccactgctaccatgacccgcgccacaaactccactgccaccccttcatcaactcttggcaccacaaggatcctgaccgaactaactaccacagcgaccactacagccgcaactggatccaccgcaacactgtcctcaacccctgggacaacctggatcctaactgagccatccacgattgctaccgtgatggtgccaacaggatccactgccacagctagctctacgctgggtaccgcccatacacctaaggttgtcaccactatggctacaatgcctaccgccactgcgtcaacagtgcccagttcaagtaccgtgggtaccactcgcaccccagccgttctgccatccagcctgcctacatttagcgtaagtactgtgagctctagtgttctcaccactcttcgcccgaccgggtttccgtcatcacacttttccacaccatgtttctgtcgcgcttttggtcagttcttttccccaggtgaagtgatttataataaaacagatagggcaggctgccacttctacgccgtctgcaatcagcactgcgacatagacagatttcagggagcatgcccaacgtctcccccccccgtgagttcagcacccctgtcaagtccttctcctgccccaggttgcgataacgccatcccattacgacaggtaaacgaaacgtggactttggagaactgcaccgttgctaggtgtgtgggcgacaatcgcgtcgtgcttctggaccccaagcccgtggccaacgtgacctgtgtcaacaagcatctccctatcaaggtgagtgacccttcgcagccctgcgatttccactacgagtgcgagtgtgaatgtgtgggaggccggggcatcacaccaggagctggcatttgcagcatgtgggggggatctcattacagcactttcgacggcacatcctacacttttagaggcaattgtacctatgtgctcatgcgcgagattcacgcccgcttcgggaatctgtcactctacctcgataaccactattgcacagcctccgctactgctgctgctgctcgctgtccgagggccctgagtatccactataagagcatggacatcgttctcactgtcaccatggtacacggaaaagaggaaggtctgatccttttcgaccagatccccgtgagtagcggcttcagtaagaatggagtgctcgtgtcggtgctggggactaccacaatgcgggtagacatccctgccttaggcgtgagcgtgaccttcaacggccaggtgtttcaagctcgactgccttacagcttgtttcacaataataccgagggacagtgtggcacctgtacaaataaccagagggacgattgccttcagagggacggcacaaccgccgccagttgcaaagacatggcaaagacttggctcgttcctgacagcaggaaggacggctgttgggcacccaccggaaccccgccaaccgcttcgcctgcagcaccggtgtcatcaacccccactcctaccccctgcccaccgcagccgctgtgtgatttgatgttgtcgcaagtcttcgcagagtgtcacaatcttgttccacctggtcctttttttaacgcgtgcatctccgatcactgtcgcggcaggctcgaagttccatgccagagcctcgaagcctacgcggagctctgcagggccaggggggtgtgttcagattggcgcggagcaaccgggggactgtgtgatctaacttgtccgcctacgaaagtatataagccatgtgggccgatccaacctgccacctgtaattcacgaaatcagtcaccccagcttgaaggcatggccgaaggttgtttctgtcctgaggaccagattctgtttaacgctcacatgggtatctgtgttcaagcatgcccctgcgtggggcccgacgggtttccaaaattccctggcgaacgatgggtaagtaactgccaaagctgcgtctgcgatgaaggttccgtctcggtccaatgcaagccactgccctgtgatgcccagggacagccccccccttgtaaccgacctgggttcgttacggtcactagaccaagagctgaaaatccctgttgccccgagaccgtttgcgtgtgtaatactactacctgccctcagtctctgcctgtctgtccccctgggcaagaatctatttgtacccaagaggaaggggattgctgtcctacattcagatgccgccctcagctctgttcatataacggaacattctatggggtgggcgcgacattccctggagccctgccatgtcacatgtgcacctgcctctccggcgacactcaagatccaacagtccagtgccaggaagatgcttgcaataatacaacttgtccacagggctttgaatataaaagagtagccgggcagtgttgcggggagtgcgttcagactgcatgcctgacacctgacgggcaaccagtccagttgaatgagacctgggttaactcccacgtggacaattgtaccgtgtacctttgcgaagccgagggcggggtacatctactcacaccacagcctgcctcttgtccagacgtctctagttgtcgtggatccttgcggaaaaccgggtgttgctatagctgcgaagaagattcatgccaggtccgtatcaacacaacaatactgtggcaccagggttgtgagactgaggtgaacattacattctgcgaagggtcctgtcctggggcatcaaaatattctgctgaagcccaagctatgcagcaccaatgcacctgttgccaggaaaggcgggtgcacgaggaaacggtgccgctccactgccctaacggatccgcaatcctgcatacctatacccatgctgtacaagtgctgtgcggcctgctcgcgtggggactccaagcaggcggacacatccgaggcgcagtgcaggatccacagcagcctctgaaagatcaagaggccagcggtaaagccaggcagggaggtggatatcggcaaacagtcgcgtggggcgacaagtcaaatgctcgtgcatggctgcaaaaaccagtagtctgggtccagagcggagcgttcccgacgcccggacccgcatccgccctgtgtccttggtag

SEQ ID NO: 128607 - DNA, 17298 bp, Artificial Sequence
  derived and/or modified sequence
atgggagctccgtccgcctgtcggaccctggtgttggccctcgccgcgatgctggttgtgcctcaggctgagactcagggccctgttgaaccatcatgggagaatgccggacatactatggacgggggggctcccacaagtagtcccacaagaagagtttcctttgtgcctcctgttacagtttttccctcactgtcacctttgaatcctgcccacaacggtagggtctgcagtacctggggcgactttcactacaaaacttttgacggagacgtgttccgcttcccaggactatgtaactacgttttctctgagcactgtagggccgcatacgaagactttaacgttcagctaagaagagggctggttggctcccggccagtcgtaactagggtggttattaaagctcagggcctagtgcttgaagcgtctaatggctctgtgcttatcaacggacagagggaggaacttccttatagccgtactggtctccttgtcgaacaatccggcgattatatcaaggtcagcatcaggctggttctgacttttctgtggaatggggaggattccgcccttctcgaacttgaccccaaatacgccaatcagacctgcggactgtgtggggatttcaacggactgccagctttcaacgagttctacgcacataacgcacgccttacacccctgcagttcggcaatctccagaaacttgacggtcccactgaacaatgtccggatccgcttcctttgccagctggaaactgtactgatgaggagggcatttgtcaccgcacactcctaggccccgccttcgcggagtgccacgccttagtcgatagcacagcatacttggcggcttgcgctcaggacctttgtcggtgtccaacatgtccctgtgcaacgtttgttgagtacagtcgacagtgtgcacacgcagggggtcaaccgaggaactggcgttgccccgagctatgtcccaggacatgtcccctaaatatgcagcaccaggagtgtggttccccatgtacagacacatgttctaatccccagagggcgcagctttgcgaggaccactgcgtagatggctgtttctgccctcccggaaggtcttgcacagtcttagatgacattacccactctggctgcctgcctttggggcagtgcccttgtactcacggaggaagaacgtacagcccggggacctctttcaacaccacatgtagttcctgcacctgttcgggcgggctttggcagtgtcaggatctgccttgcccagggacatgctcagtgcagggcggagctcacatcagcacatatgacgaaaagttgtacgacctgcacggagattgctcatatgtgttatccaaaaagtgtgccgattcatccttcactgttctggctgaattacgtaaatgtggcctgacggataatgaaaactgcttgaaggctgtaaccttgtccctcgatggcggtgacacggcaatacgtgttcaggccgatggcggtgtgttcttgaactctatttacacccagttgcccctgtccgccgctaatatcactctttttaccccttcttctttctttattgttgttcagactggcttgggtctacaactcttggttcagctggtgcccctaatgcaggtgttcgtgcggctggatcccgctcaccaaggacagatgtgcgggctgtgcggcaattttaaccaaaatcaggctgatgatttcactgctctctctggagtggtagaagccaccggagcagcttttgctaacacatggaaagcgcaggcagcctgcgccaatgcccgcaactcgtttgaagacccttgtagtctaagtgttgaaaacgaaaattacgcacgccactggtgctctagactcacagaccccaactcagccttctctaggtgccacagtattattaacccgaaaccatttcacagtaattgcatgtttgatacctgcaactgcgaaagatctgaggactgtttgtgcgccgccctgtctagctacgtgcatgcttgcgccgccaagggcgtccagttgagtgactggagagacggcgtatgtacgaagtacatgcagaactgtccgaaatctcaacgctatgcgtacgtggtggacgcctgtcagccaacgtgtagagggctgtccgaagccgacgtcacctgttccgtctcatttgtgccagtcgacggttgcacctgtcccgccggcaccttcctcaatgatgccggtgcttgcgtcccagcgcaggagtgtccctgctacgcccatggaactgtgcttgccccaggtgaggtagttcacgatgagggcgccgtttgtagttgtacgggtggcaaactgagttgtttgggtgccagcctgcagaaatcaactggttgcgcagcccccatggtctatctggattgttccaattcctcagccggcactccaggcgcggaatgtttgcgatcttgtcacacactggacgtcgggtgtttcagtacccactgtgtctctggatgtgtctgtccacccggcctcgttagtgacggaagcgggggctgcattgctgaagaagattgtccatgcgtccataatgaggctacatataagcccggagaaacaattagggtggattgtaacacatgcacctgtcgaaataggaggtgggagtgttcgcatcgactttgcctcggcacatgtgttgcgtatggcgacggacacttcattacatttgacggcgaccgctattctttcgaaggaagctgtgagtatatcctggcgcaagattattgtggggataatacaacccacggaactttcagaattgtgaccgaaaacataccatgtggcaccactgggacaacatgttcaaaagctatcaaattatttgtggagagttatgagttaattttacaagagggtactttcaaggcggtggccaggggcccgggcggggatcctccatataagatacgctacatgggcatcttcctagttatcgagacacatgggatggctgtgtcctgggaccggaagaccagcgtgttcatccggctgcaccaagactacaaggggcgtgtgtgtggactgtgcggaaactttgacgacaacgccattaatgacttcgccacccggagccggtctgtagtgggagacgcgctcgagtttggaaactcatggaaattgtcaccgtcatgccctgacgcactagcacctaaggatccctgcacggccaaccccttcaggaagtcctgggcccagaagcagtgttcaatcttacacggacccacattcgccgcttgcagatcacaagtggattccacaaaatactacgaagcctgtgtcaacgacgcctgcgcatgcgattctggtggcgactgcgaatgcttctgtactgcggttgcagcatatgcccaagcttgtcacgacgccgggttgtgtgtgagctggcgtactcccgatacatgccccttgttctgtgacttctacaatccccacggaggatgcgaatggcattatcagccatgtggtgcaccatgtcttaaaacatgtcgaaaccccagtggccattgcctggtggatttgcctggattggagggatgttaccccaagtgcccacccagtcagcccttctttaatgaggaccagatgaagtgcgtagcgcagtgtggctgttacgacaaagacggaaactattatgacgttggagcaagggtaccaaccgcagaaaactgtcagagttgcaattgtaccccaagcggcatacagtgtgcccacagcttggaagcctgtacctgtacctacgaagatcggacgtacagctaccaggacgtgatctataacacgacagacggcctgggtgcttgcctgatcgctatttgtggctccaatggtaccatcattagaaaggccgtagcatgtcccgggactcctgctactacaccttttacgtttaccacggcttgggtccctcatagcacaacttcccccgccctccctgtgagcaccgtctgtgtgcgcgaagtatgccgatggagctcttggtacaacggtcaccgaccggagccaggactcgggggcggggacttcgaaacttttgagaaccttaggcagcgcggataccaggtgtgtcccgttctggcagacattgagtgtagggccgcccagctgcctgatatgcctcttgaggagctcggccagcaagtcgactgcgatagaatgcgcgggctgatgtgtgccaactcacaacagagcccacctctgtgccacgactacgaactgcgagtgctctgctgtgaatatgtaccctgtgggcctagcccagcaccaggaacaagcccgcaacctagcctctctgcatccacagaacccgccgtgcccacaccaacacaaacaaccgcgactgaaaaaaccactttgtgggtgactccctctattcgttccaccgcagctctgacctcccagaccgggtcttccagtggacctgtgacggtaactcctagcgcacccggcacaacaacttgtcagcctcggtgtcaatggaccgaatggtttgatgaagattatcctaaatcagaacagcttggaggcgacgttgagtcttatgataagatcagagctgctggcggtcacttgtgccagcagcctaaagacatcgagtgccaggcagaatcctttccaaactggacgctcgcccaggtggggcaaaaagtgcattgtgacgtgcattttggactggtttgccgcaattgggagcaggagggggtattcaagatgtgctataactatcgaatcagggtgctgtgttgtagtgacgaccactgtcgcgggagggcaaccaccccacctcccactaccgaattagaaaccgccacaacaaccactacccaggcactgtttagtacaccgcaacctacctcaagtccaggcttgacaagggctccgcccgctagtacaactgcagtgcccactctttccgagggattaacatctccacggtacactagcacccttggcacagcgaccacagggggtccaaccacaccagcagggtcaaccgaaccgactgtacccggagtggccacatccaccctgcctacacgttctgcccttccgggcacaaccggatctctgggtacctggcgtccatcgcagccaccaaccttagcgcccacaactatggccacttccagggccagacctaccggtacagcgtcaacggcctccaaggagcccctgaccacaagcctcgcccctactttaaccagcgaactatccacctcccaggctgagacctcaactcctcgcacagagacaactatgagtcctctgacgaataccacaaccagccagggaacaactcgctgtcaaccgaaatgcgaatggacggagtggttcgacgtagatttcccaaccagtggtgtagccggaggtgacatggagaccttcgaaaatattcgggctgcaggcggcaagatgtgctgggcacctaaaagtatcgagtgccgagctgagaactatcctgaagtgtccattgatcaggtgggtcaggtgctgacctgtagcctcgaaacaggcttaacctgcaaaaatgaggatcagaccggtagatttaatatgtgttttaattacaatgttcgcgtcctttgctgcgacgactactctcactgtccctcaactccagccactagtagcaccgctactccaagctcaacgccaggcaccacctggatcttaacaaaacctactaccactgccacgaccacggcatccaccgggtccaccgctacaccaacttccactctcagaactgcccctccgccgaaagtgttgaccacaactgcaacaacaccgactgtgacaagttcgaaggctaccccttccagttcacccggcacggctaccgctttacccgcccttcgcagcacagcaaccactcccactgccacttctgtcacaccaatccctagcagttctctggggactacctggactaggcttagccagaccaccaccccgaccgcaaccatgagtacagcaacaccaagttccacacccgaaacggctcatacttccactgtcctgaccgcaacagcgaccactacaggagccacagggtccgtggcaactccatcctccactccaggcacggcccatactactaaagtcccaacaaccactacaaccggcttcacagccacccccagttccagccccgggaccgccctgacccctccggtgtggatctctaccacgaccacccccacaacacggggaagcacagtgacaccttctagtatccccggcactacacataccgctacggtgctcaccaccaccaccaccactgtggccacaggctctatggccaccccgtctagcagtacacagactagtggaacgccccccagtctgaccacaaccgcgaccactatcaccgccacaggatcaaccacgaatcctagcagcactcccggcactactccgattccacctgtgctgacaactaccgctacaactcccgctgcaacaagtaacacggtgaccccatccagcgctctcggcactacccataccccacccgtacccaataccatggccactactcatggtcgctctctgcccccaagttcccctcacacagtaagaaccgcctggacgtcagcaacctcaggtattctgggtaccactcacataactgagccaagtacggtgacctcacacaccttggccgcgacaacgggtaccacccagcactcgacacctgcactgtctagcccccatccaagttcccgtacaaccgagtcgcctccaagccctggcaccacaacccctggccacaccacagccacctccagaaccactgctacggcaaccccaagcaaaacccgtacaagtaccctgctaccttccagccctactagtgctccaatcaccactgtcgtgacaatgggctgtgagccccagtgcgcttggtccgaatggttagactattcctatcctatgccaggaccaagcggaggagacttcgacacctactcaaatatcagggctgccggcggggccgtttgtgaacagcccctcggtcttgaatgtagggcgcaggcccagcccggagtgcccctacgtgagctggggcaagtggttgagtgcagcttagacttcggcctggtttgccgcaatagggagcaagtgggcaaattcaagatgtgctttaattatgagattagagtattttgctgcaattacggccactgtcccagcacacccgcaacatcatctacagctatgccatcctctacccccggtacaacatggattctaacagaactgacaactacggcaaccacaaccgaatccactggatctactgctactccaagcagcacacccgggacgacctggatcctgactgagccatctacaacagccaccgtgactgtacctaccgggagtaccgcgaccgcgtctagcactcaagccacagccggcacaccccatgtctcgacgacagccactactccaaccgtcacatccagcaaagccacacccttcagctctcccggcaccgctacagcattgcccgcattgcgaagcacggctactacccccactgcgactagcttcactgccattccttcaagcagcttgggtaccacatggacccgcctcagccagaccacaaccccaactgctactatgagtaccgccacgccatcttcaactcctgaaacggttcatacatcaaccgttttaacaacgactgccacgacaacaggagcgactggcagtgtggctacgccatcctctactccaggaacagctcatactacaaaagtcttgaccaccaccacgactggattcaccgcgacccccagtagctctcctggcactgcgcgcacgctgcctgtgtggatctcaaccacaacaacccctaccacacggggatccaccgtgaccccttcaagcattcccgggacaacacatacccccacagtgctcactacgaccacaacgaccgtggccaccggtagcatggccactcctagctcctctacccagacctccggtactcccccttccctcaccaccacagcgacgacaattacagccactggctccaccactaatccttccagtacaccaggaactactcctatcccacctgtactgacaacaaccgccactacgccggccgctaccagttccaccgttaccccgtcatccgccctcggcaccactcataccccccccgtgccaaacacaactgccaccacccatgggagatctctctccccatccagccctcacaccgttagaactgcctggacttctgctacatcaggcaccttagggaccacacatatcacagaacctagtacgggcacgtcacatacacccgcggctacgactggtactacccagcactcgaccccagctctgagcagtccccatccgtcttctagaaccactgagtcacctccatcaccgggcaccacgacgccaggtcacacaagagctacttcacgcacaaccgccacagccaccccctctaagactagaacttcaactctgctgcccagtagcccgacatcggcccccattaccacagttgtcaccatgggatgtgagcctcaatgtgcctggtctgaatggctggattacagctatcctatgccaggcccctctggaggtgactttgatacctactccaatatccgtgctgcaggcggggccgtgtgcgagcagcctctgggtctggagtgcagggcccaggcgcagcctggcgtgccactccgagagctgggacaggtcgtggagtgctctctggacttcggccttgtatgtcgcaacagagagcaggtgggaaaatttaaaatgtgcttcaactacgaaatcagggtgttctgctgcaactatggccactgccctagtaccccagctaccagtagcaccgcaactcccagctcaacgcctggcaccacctggatcctgaccgagcagacgacagcggctaccactacagccacgactgggtctacggcgattcccagctcaactcctggcacagctccaccacctaaagtccttacatccactgctacaacgcccacagcgacaagcagcaaagccaccagctcctcgtcccctcgaacagccactaccttgccggtactaacctcaacggccacaaagtcgaccgcaacatctttcacgcctattccaagcttcactctgggaacaactggaactctacctgagcagaccacaacacctatggctaccatgtctaccattcatccatcttccactccggaaaccacacatacgtcaaccgtgctgacgacaaaggcaacaacgacaagagcaacatcctctatgagtacaccttcttcaactccaggtactacttggattttgaccgaactgacgacagccgcaaccaccacggctgctacaggacccaccgcaacaccaagctccaccccaggcaccacatggatacttactgagccatccacaacagcaaccgttaccgttcccactgggtctaccgccaccgcttcttctacacgtgccaccgccggcacattaaaggtgctcacatctacagccacaacgcccacagtgattagctcccgagctacaccctcttccagcccaggtacagccaccgccctaccagcccttcggtcaaccgcaacaactcctactgccacttccgttacagcaattccatccagcagcctgggtactgcctggacacgactgagccagactaccacaccaacggccaccatgtctacagccactcctagtagcactccagaaaccgtgcatacctctacagtcctgaccacaacaactacgacaacaagggccactggctctgtcgcaactccatcaagtaccccaggcaccgcccacacaacaaaagtcccaaccaccactactactggattcactgcgaccccttccagtagccccgggacagcgctgacaccgccagtttggattagtaccacaactactcctaccactcggggcagcaccgtgaccccatctagcatccctggtaccacacacacggccactgtgttgacaactacaaccaccactgtggcaacaggatccatggctactccttcgtccagcacacagacttcagggaccccaccctccctgaccacaaccgcgacaactatcactgctaccggaagcactaccaatccgtcctcaacgcctggaacaactccgatcccacccgtgttgacaacaaccgccacaactcctgccgctacttccagcaccgtgaccccctctagtgctctgggcacaacccatacaccaccagtacccaatacgaccgccacaacgcatggcagatcgcttccacccagctcgccacacaccgtgcgaaccgcgtggacctccgccacctccggcattctaggcaccactcacatcacagaacccagcacagtgacttcacatacacccgccgccaccacatcgacgacccagcattcaacacccgccctgtctagcccgcatccctcgagccgtactaccgagtcgcccccttcacctggtacaactactccgggtcacactcggggaacaagcagaactacagccaccgcgacgccaagtaagactcggacatcgactctgctgccaagtagccccaccagcgccccaattacgaccgtggtgaccaccggttgcgaacctcaatgtgcttggagcgagtggcttgactatagttacccgatgcctggcccctcggggggggattttgatacatacagcaatataagggcagctggaggagcagtgtgcgaacaaccgctggggctggaatgccgtgctcaggcacagcccggcgttcctttacgggagctgggacaggttgtggagtgcagtctggattttggcctcgtgtgtcgaaatcgcgaacaggttggaaaattcaagatgtgttttaattatgaaatcagagtgttctgctgcaactatggacactgtccctccacgcctgcaacatcttcaacagcaacaccttcctccactccaggcaccacttggatattaacaaaactgaccactaccgctaccacgacagagtcgacaggtagcaccgcaactccatcatctacccctggaacaacctggattctcaccgagccttccacgactgcaacagtcaccgttccaactggctccacagccacggccagcagtacgcaggctaccgccggaaccccacacgtgtcaaccaccgccactacgcctaccgtcacctcctcaaaagcaactcctttttcatcacctggtaccgcgactgctcttccagcgctgcgtagtactgctactacgccgactgctacttccttcacagctatcccgtcctcaagtctggggacaacctggacacgcctgtctcagacaactactccaaccgcaacaatgtccacagcaactcctagctcaacgcccgagacagcacatacatccaccgtccttacgacgacagccacaactactcgtgccacagggtccgttgcgacacccagctctactcccggaacggcccacacaacaaaggtccccaccacaacaaccacaggattcaccgtgacgccatccagttctcccggtaccgcccggactccaccagtttggataagcaccaccaccacacccaccactagcggctcaacagtaactccttcatcagtccctggcaccacgcacacccccaccgtactcacaaccaccaccacaaccgtggccactggaagtatggcaacaccaagtagctccacacaaacaagcggaactccgccctcactgattacaacggccaccaccattacggctaccgggtcaacaacaaaccccagctcaactcctggaaccacccctattccgcccgtgctcaccacgacggctaccacgcccgccgctacctctagtacagtaaccccttcatctgctctgggcacgacacacactcctcccgtccccaataccacggccacaactcacggacgttctctgtccccatcatcacctcacacagtgcgaacagcttggacaagtgccacttccggcacactgggaaccacacacatcaccgaaccttctaccggtacctcacacacaccagctgcaactactggtacgacacagcatagtacaccagcactgagtagccctcacccctctagcaggaccacagaaagcccgccaagcccaggaaccaccacacccgggcacacaacagcaacctccagaacaaccgcaaccgctaccccgtccaagacaagaaccagcactctgcttccaagcagcccaactagtgcccccataactacagtggtgaccacaggctgcgaaccccagtgtgcctggagcgagtggctggactacagctatcccatgccagggcctagcggcggcgattttgatacctacagcaatataagagctgctgggggagcagtttgcgagcaacccctgggattagaatgccgggctcaggcccagcctggggtcccactgggcgaactgggccaggtcgtagagtgctctctagacttcggcctagtctgtaggaatagagaacaggttgggaaatttaagatgtgctttaactacgagatccgggtcttctgttgcaactatggacactgtccctctactcccgccacatccagcaccgctatgcccagctcaacaccgggaacaacctggatcctcactgaactgaccaccaccgctactaccacagcttcgacgggatccacagcaaccccaagtagcacccccggaaccgctccgcctcctaaggttttgacaagtcctgcgacgacgcctactgcaacttcctcgaaagctacctcttcctcatcccctagaaccgccaccaccctccctgtactcacgtcgacggcaactaagtctaccgctaccagcgtgacgcctatacccagttccactctagggactaccggaacactgcctgaacagacaactaccccggtcgccacaatgtctacaatacacccttcgtccacccccgagaccacccacacatcaacggtgctgactacgaaggcaacgacaacacgcgccacatccagcaccagcaccccatcctcaactcccggcacaacctggatcctgaccgagctgaccaccgccgctaccactacagcggccacaggacccactgcgacaccctcttctactccaggaaccacttggatccttaccgagctgaccacaaccgcgaccacaacagcttctacaggcagtaccgcaacgccctcatccactcccggcaccacgtggattctgactgagccgtctactacagccacagtcaccgtgcccaccgggtccaccgcaactgctagttctacacaggctactgcggggaccccacatgtttccaccacggccaccacacccacagtaacttcgagcaaagctaccccttcctcatcaccagggactgccaccgcccttccagccttacggtctaccgccactacccccactgccacatccttcactgcaataccttcgtcaagtcttggcactacgtggacccgcctcagccagaccacaacacctacagccacgatgtccactgcaaccccaagctcaactccagagacagtgcacactagcaccgtgctgacagcaaccgccaccacgacaggtgcgaccggcagcgtggcgacaccctcatctacaccaggtaccgcccacaccactaaggtgccaaccaccactaccacagggttcaccgctaccccatcttccagcccaggtactgccctgactcctcccgtctggatatctaccaccactacacccactacaaccactcctacaacttctggtagcactgttaccccctccagtataccaggcactacacatactgctagagtgctgactaccacaaccacgaccgtagccactggctccatggccactcccagctcaagtacccagacgtcgggcactcctccaagcttaacaaccacggcaaccacaattaccgccacaggcagcactactaatccgtcatctacacccggaacaaccccaattactcccgtcctgacatccaccgctactacgcctgccgcaactagctccaaagctacctcatcttcatctccccggacagcgaccaccctacctgtgttgacctcaacagcgacaaagagtacagccacgtcttttacgccgatcccaagttccactctatggaccacttggactgtccctgcccagactaccacccctatgtcaaccatgtccactatccacacatcaagcacccccgagactactcacacaagcacagttctgactacaaccgctacaatgaccagggcaaccaactctaccgccactccctcctctaccctcgggacaacccggattctgacagagcttaccactacagccacaactacagccgcaaccggctcaaccgctaccctgtctagtactccaggaacaacgtggattcttactgagcctagcaccattgccactgtcatggttcctacaggcagcacagcaaccgccagctcaactctgggtacggcccatacccccaaggttgtgaccacgatggctaccatgccaacggccacggcttccacagtgccaagttccagcactgtaggaacaactcggaccccggccgtgctcccttcatccctgcccaccttttcggtgagcacagtttcttcatcggttctgacaacactgcgaccaacaggctttccatcctcccactttagtacaccatgcttttgccgagcctttggacaatttttctcacctggcgaggtgatctataataaaaccgatcgcgccggctgccacttttacgctgtctgtaatcagcactgcgatatcgaccgctttcaaggggcatgcccaacatctcccccaccagttagttctgctccattgagtagtcccagcccagctcccggatgcgataacgccattccacttcgtcaggtcaatgaaacatggacccttgaaaattgtaccgtggcaagatgcgtgggtgacaatagagtagtgctccttgacccgaaaccagtcgccaacgtaacatgcgtgaacaaacacctccccatcaaagtgagtgacccctcccagccgtgcgattttcattacgagtgcgaatgcatttgctctatgtggggaggcagtcactactcaacctttgacgggacctcctatacttttcgaggcaactgtacttacgtcctcatgagagaaatccacgcacgctttgggaatctatccctgtacctggacaaccactattgcaccgcctccgctacagcggcggcagcaagatgtccgagagcacttagtattcactacaagagtatggatatcgttctaactgtaactatggtacatgggaaggaagagggcctgatactcttcgaccaaatcccggtttcctccgggttctctaaaaatggtgtattagtgagcgtgctgggtaccacaaccatgcgcgtggatatccctgcattgggagtatctgtaacttttaacggccaggtgttccaggccagactaccttactctcttttccacaataataccgagggacaatgtggaacctgcacgaacaatcagcgtgatgattgcctgcagagagacggaaccacagcagcttcatgcaaggacatggccaagacatggctcgttccagactctagaaaagatgggtgctgggcccccactggcaccccacctactgcctccccggctgcccctgttagctcgactcccacacccacaccatgccccccacaacccctttgtgacctgatgctctctcaagtgttcgctgaatgtcacaaccttgtgcccccagggccattcttcaatgcttgtattagtgaccactgccgcgggcgtctggaagttccgtgtcaatcactggaggcatatgcagagctgtgccgagcgcgaggagtttgctcagactggcgcggcgctacaggaggactgtgtgatctgacatgcccccctacgaaggtctacaaaccctgcggcccaattcaacccgctacttgtaatagccgaaatcaatctccgcagcttgaggggatggcagagggttgcttctgcccagaggaccagatcctgttcaatgcccatatgggcatttgcgtacaggcttgcccctgcgtaggaccagacggcttcccaaagtttccaggcgaaaggtgggtaagcaactgccagtcctgcgtatgcgatgagggctccgtgagtgtccagtgcaaacctctgccttgcgatgctcagggccaaccgcccccttgcaaccggcccggatttgtgactgtgactcgtccccgggccgaaaacccatgctgcccagaaactgtctgcgtttgcaatacgaccacctgtccccagtctctcccagtttgtccacccggccaggagtccatctgcactcaagaggagggagactgttgcccaacattcaggtgccggcctcagctttgcagctataatgggaccttttacggggtgggagcgacatttccgggcgcattgccttgtcacatgtgtacatgtctgtccggtgatactcaagatcctacagttcagtgccaggaggatgcgtgcaacaacaccacctgtcctcaagggttcgagtataagcgggtcgctggccaatgctgtggcgagtgcgtgcaaacggcctgcctgacccccgatggacagcctgttcaacttaacgaaacctgggtgaattctcacgtcgataattgcacggtctatctgtgtgaggccgaaggtggcgtgcatctgctgactccccaacccgcctcttgccctgacgtgtcctcgtgcagagggagtctccgcaagactgggtgctgctactcttgcgaggaggacagctgccaagtgcgcataaacacgaccattctctggcaccaagggtgcgagacagaggtaaacattactttctgcgaaggaagttgcccaggagcctccaaatactctgcggaagcccaggccatgcagcaccagtgtacatgttgtcaggagagacgcgtacatgaggagaccgtgcccctgcactgtcctaacgggtctgccattttgcacacgtacacacatgttgatgagtgtgggtgtacgcccttctgcgtccccgcgccgatggccccgcctcatactcgggggtttcctgctcaagaggcaaccgcggtctag

SEQ ID NO: 128608 - DNA, 17289 bp, Artificial Sequence
  derived and/or modified sequence
atgggagctccctccgcctgcagaacccttgtgctggccttggctgcaatgttggtggttccccaggccgagactcagggccccgttgagccaagttgggagaatgccggccatacaatggatggtggcgctccaactagttcacccacacgacgagtttcttttgtccctcctgttacggtatttccttccctgagccctctcaatccagctcataacgggcgggtctgtagtacctggggagacttccactataaaacctttgacggcgacgtctttcgatttccagggctttgtaattacgtcttcagcgagcattgtagagccgcctacgaagactttaacgttcagctgcgccgaggtctcgtgggatcgaggcctgttgtgacacgcgtcgtaatcaaggcccaaggactagtgcttgaggccagtaatggaagtgttcttatcaacggacagcgcgaggagctgccgtacagtagaactgggctgctcgtcgagcagtcaggagattacatcaaagtctccattagactggtcttgaccttcctgtggaacggagaagactccgcgctcctggagctggatcccaaatacgctaaccaaacgtgcgggttgtgcggcgacttcaacgggcttcctgctttcaacgagttctacgcccacaacgcccggctgacgccactacaatttggcaatcttcagaaattggatggacccacggagcagtgccctgatcccctccctttaccagccggcaattgcaccgatgaggaaggcatttgtcaccgcactctgctgggacccgcctttgccgaatgccacgccctggttgactcgaccgcttatctggctgcctgcgcccaagacttgtgcagatgcccaacatgtccctgcgctaccttcgttgagtacagccgccagtgtgcacacgccggaggacagcctcgtaactggcggtgcccggagctttgcccaaggacgtgccctctgaacatgcagcatcaggagtgcgggagtccttgcactgacacttgttctaaccctcagcgggcccaactgtgcgaagatcactgtgtcgacggatgcttttgccctccaggaacagtcctggatgacatcactcatagtgggtgcttaccactgggccaatgcccatgcacccatgggggacgtacctattcgcctggaacgagctttaataccacctgcagcagttgcacttgttcgggaggactctggcaatgtcaggaccttccatgtccagggacttgttccgttcaaggaggagcacatatctcaacatatgacgaaaagctgtatgacctgcacggcgactgttcgtacgtgctgagtaagaagtgcgccgactctagcttcaccgtgttggccgaacttcggaagtgtggattgactgataacgagaactgtcttaaggcggttacactgtccctcgacggcggagacacggctatcagagtacaggcagatgggggcgtgtttttaaattccatctatacccagctccccttgtctgcggcaaacattacattgttcaccccatcgtccttttttatcgttgtacaaacaggactcggacttcaactattagtgcagctggtcccactcatgcaagttttcgttagactggacccagctcaccaaggccaaatgtgcgggctctgtggcaatttcaatcagaatcaggccgatgattttactgccctatcaggcgtcgtggaggccaccggagcagccttcgcaaacacatggaaagcccaggccgcatgtgccaatgcgcgcaattccttcgaagacccatgctcactgagcgtggaaaacgagaactatgcccggcattggtgctcgcgactgactgatcctaattctgcctttagtagatgccactcgataattaaccccaagccttttcactctaattgtatgtttgacacatgtaattgtgagcgtagcgaggattgcttgtgtgccgccttgagctcatacgtacatgcatgcgccgcaaagggagtgcagctgtccgactggcgagatggggtctgcacgaagtacatgcagaactgcccaaaaagccaaagatatgcttacgtggtggacgcttgccagccaacctgtcggggtttatctgaggccgacgtcacttgctcagtatccttcgtccccgtggatggctgcacctgtcctgccggtaccttcctgaatgacgctggcgcctgtgtgcctgctcaggaatgtccatgctatgcccacggaacggtgctggctcccggagaggttgtgcacgacgaaggagcggtttgctcatgtacgggtggaaagttaagttgcttgggcgccagtttgcaaaaaagcacaggctgcgctgcccccatggtctatttggattgctcaaatagctccgctggtacacccggagctgaatgccttaggtcatgtcacacccttgatgtgggatgtttttctactcactgcgtcagtggctgcgtgtgtcctcccggactggtcagtgatggtagtggtggatgtatcgccgaggaggactgtccatgcgtccacaacgaagctacatataaacccggggaaacgataagggtcgactgcaacacttgtacctgccggaatcgcaggtgggaatgttcacataggttgtgcctgggcacctgcgtagcgtacggtgatggccacttcatcacctttgacggcgaccgctacagcttcgagggatcctgtgagtatattctggcgcaggattattgtggggacaacaccacccatggaactttcagaatcgtcaccgaaaacatcccatgtgggacaaccggaactacttgtagtaaggctataaagctcttcgtcgaatcctacgaactgatcctgcaggaggggacgttcaaggcagtcgcacgagggcccggaggcgaccctccctataagattcggtacatgggcattttcctggttatcgaaacacatggtatggcggtctcgtgggaccgtaaaacaagcgtgtttattagactacaccaggattacaaaggccgtgtctgcgggctctgtggcaacttcgacgacaacgctatcaacgacttcgctacaaggagccggagcgttgtgggggacgcgttagaatttggaaattcctggaagctctccccatcctgtccagacgccctggctccaaaggatccttgcactgcaaacccttttcgaaagagttgggcccaaaaacagtgttctatacttcacgggcctaccttcgccgcctgcagaagccaagtcgactcaacgaagtattatgaggcatgtgtcaacgacgcatgtgcgtgcgatagcggaggcgactgcgagtgtttttgtaccgccgttgcagcctacgcccaagcatgccacgacgccggtctctgcgtgtcttggagaacccctgatacgtgcccactcttctgtgacttctacaaccctcatggcgggtgtgaatggcattatcagccatgcggggcaccgtgtcttaagacttgcagaaacccttccggacattgcctggtggacctgcccggcctggagggatgctacccaaaatgcccaccctctcagccgttcttcaatgaagaccagatgaagtgcgtggcccaatgcggatgctatgacaaagatggtaattactatgacgtgggggctagagttcccaccgccgaaaattgccagtcatgtaactgcacccccagtgggatccagtgtgcgcacagccttgaggcttgcacatgcacttatgaggataggacatactcctaccaggatgtcatctacaataccactgatggtctgggcgcctgtctaatcgctatatgtggtagcaatggcactatcatccgaaaggccgtcgcctgtcccggcacccctgccacgaccccttttaccttcacaactgcttgggtcccacattctaccacttctcccgcactccctgtgtccactgtatgcgtccgggaagtctgtcgttggagttcgtggtataacggtcaccggcccgagcctgggcttggtgggggggatttcgaaacgtttgagaacttgagacagcgggggtaccaggtatgcccagttctggcggacattgagtgcagggctgcccagctcccagacatgcccttagaagaactgggtcagcaggtagattgtgatcggatgagaggactcatgtgcgcgaacagtcaacagtcaccacctctctgtcacgattatgagcttcgggtcctctgttgcgaatatgtgccctgcggccccagtccagctcccggcacctctccgcagccttcactatcagctagcacggaacctgccgtccccactcctacccagacgaccgccacggaaaaaacaacactatgggtcacaccctctatacgatcaacagcggcccttactagccagacaggtagtagctccggtccggtcaccgtaaccccctccgccccaggaaccaccacttgccaacctcgatgtcagtggactgagtggttcgacgaagactaccctaagtccgagcagctgggaggtgatgtagagtcctatgataagatccgcgctgcggggggccatctctgtcagcaacccaaggatatcgagtgtcaggccgaatcgttcccaaattggaccctggcacaggtgggccagaaggtgcactgcgacgtacatttcggcctggtttgccgcaactgggagcaggagggagtgttcaaaatgtgctacaattaccggattcgagtcttatgttgcagtgacgaccattgtagaggaagagccaccacgccacctccaaccaccgagctggagaccgccaccactacgaccacccaggcactgttcagcacaccacagcctacatccagtcctggactgacccgagctcctccagccagtacaacagccgtgccaacactaagtgaaggactgacgtccccccgctacacctctacactgggcactgccaccaccgggggaccaacgacgcctgctgggtctaccgaacctactgtcccaggagttgcaacaagtacactgcccacaaggtccgcactacctggtactacaggctcgcttggcacgtggaggccaagccaacctccaactttggcccccaccactatggctacttctagagcacgccctaccggtaccgcttcaactgcatcaaaagaaccgctcacaacctctttggcgcctaccctgaccagcgagctcagcacgtcccaggctgaaacttccacaccccgcacagaaaccactatgagcccgctgacaaacacaactacaagtcaggggacaacacgctgtcagcccaagtgcgagtggactgaatggttcgatgtggacttccccacctcaggcgtggccggaggcgatatggagacttttgaaaacattcgggccgcaggtggcaagatgtgttgggcacccaagagcatcgagtgcagggccgagaactacccggaggtaagcatagatcaggtgggacaggtgctgacatgctcactggagaccggtctcacatgcaaaaatgaagaccagacaggacgcttcaatatgtgcttcaattataacgtcagagttctctgctgtgatgattattcacactgtccttcaacaccagcaacctcctccaccgcaaccccatctagtacgccgggaacaacttggattttgacgaagccgaccacgaccgccactaccactgcctccactggatcaaccgccaccccaacgagcacgttgcggaccgcccctccccccaaggtcctaacaacaaccgccacaacaccaaccgtaaccagcagcaaagctacgcccagctcctcccctggtacagcaacggccctacccgctcttcgctccaccgccacaaccccaaccgcaacctctgtgacacctattccgtcatcgagtttgggcactacctggacacgcttaagccaaaccacgacccctacggccactatgtccaccgccaccccctcatcaactccagagaccgcccacacatccaccgtgctaactgcgaccgccacaaccaccggcgccacaggatcagtggcgactccttccagcacaccaggaacggctcacacaaccaaagttcccaccacaaccacgaccggattcacagcaacccctagctcatcccccggaaccgcactaacacctcctgtttggatcagcacaactacaaccccaacaaccagaggatcaacagtcacccccagctctattccgggaactacccacactgcaacagtgctgactaccactacgacaacagtcgccactggttcgatggctactccttccagctcaacacagacatccggcactccaccatccctgactaccactgccaccactatcacagcgaccggctcaactacgaacccgtctagcacgccaggcacgacacccattcctcccgtgctgactacgacagctacaactccagcagcgacgtctaacaccgtgactccctcctctgcactggggactactcacaccccacccgtgcctaacaccatggcaaccactcacggcagaagcctgcctccctccagccctcacaccgttagaaccgcatggacaagcgcaacatccggcatccttggcacgacacacattactgagccatccaccgtgacgtcccataccctcgccgctactacaggaactacacagcattccacgccagcccttagcagcccacacccatcatcaagaacaacagagtcacctcccagtcctgggaccacaacaccaggccatacaacagccacctcaaggactacagctaccgccactccgtccaaaacccgaactagtaccttgcttccgagcagtcccacctctgccccaatcacaactgttgtgacaatggggtgtgaaccacagtgcgcatggtctgaatggctcgattattcttaccccatgcctggaccatcggggggcgactttgacacctactccaatatcagggctgctggtggggcggtttgcgagcaacctttggggttggaatgtagggcccaggctcagccgggcgttccacttcgcgagctcggccaggtcgtcgaatgcagcctggattttggattagtgtgtagaaaccgggaacaagtcggcaagttcaaaatgtgctttaactatgaaattagagtattttgctgtaattatgggcactgtccctctactcctgctacctcgtccaccgcaatgccatcctctacgcctgggacaacctggatcctgactgagctgaccactacagccactactacagaatcaactggttctaccgctacccccagcagtacaccaggtaccacctggatcctgactgaaccctccaccactgctacggtgacggtacccactgggtcgacggctaccgcatcttccactcaagctactgcaggcactcctcacgttagcacgacagctaccacaccaaccgttacttcaagcaaggctactcctttctcttctccaggcactgccacagccttacctgccttgcggtcgaccgccacaacacccaccgcaacttcattcaccgcaattccgtcatcttctctgggcacgacttggactagactgagccagaccaccacccccactgccaccatgagcacagccaccccatcatccacccccgagaccgttcacacatcaaccgtgctcaccactacagccactaccacaggagccacaggttccgtcgccacaccgagttcgacgccgggtaccgctcacactactaaagtcctcacaaccaccaccacagggttcactgccactcctagcagtagtcctggaactgcccgaactctgcctgtgtggattagcactacgacaactcctaccactagaggaagcactgtcaccccttctagcattcccggcactacgcacaccccgacggttttaacaaccaccaccactactgtggcaactggaagtatggcaacccccagctcttcaacgcagactagcggaactcccccatctctaaccacaacagcaactacaatcacggcgacaggatcgacaacaaatcctagctctaccccagggaccaccccgatccctccagtgttaacaacaactgccaccacccctgctgctacctcatccacggtcaccccttcctcagcccttggcaccactcatacacctcctgtcccgaatacaacagcaacaacgcacggacgcagcctgagcccgagcagcccgcataccgtccgtactgcttggacatccgcaacttctggcacgttaggcactactcacataactgaaccatcaacaggcaccagccatacccccgcggctaccacagggactacccagcattctacacccgcgctttcttcccctcacccttccagcaggaccaccgagtcacccccctcccctgggaccacaacacccggccatacccgcgcaacctcacgcacaaccgccacggctacaccttccaagacacgtacatcaaccttgttgccatcttcacctacttctgcacccatcacaaccgtcgtgaccatgggatgcgaacctcagtgtgcatggtctgagtggttagactatagttatcccatgcctggacccagcggcggagactttgacacttacagcaacataagagcagccggcggagccgtgtgcgagcaacctctgggcctcgaatgtagggcccaagcccaaccaggcgtcccgcttcgtgagcttggtcaggtggtggagtgctctctggacttcggcttggtgtgtcgtaaccgcgagcaggtaggaaagtttaagatgtgctttaactacgagattcgcgtcttttgctgcaactacggacactgcccttctactcctgccacgtcctctacagccacaccctctagtacaccaggcaccacttggattctgacggaacaaacaaccgccgctactacaaccgccactactgggtcgactgcaatcccttcgagcaccccaggcaccgcacctccccctaaagttctgaccagcactgccaccacccccaccgccacaagctctaaggccacaagctcatcttctcctcggactgcaacaacgctacctgtgttaacatctacggccacaaagagtacggcaacttctttcacgcctatcccatccttcaccctcggaactactggcaccctgcccgaacagacaacgaccccaatggccaccatgagcacaatacatccgtcttctactccggagactacacacacgtccactgtgctgacaaccaaagccactaccacccgcgctacctcaagtatgtcaactccatccagcactcctgggaccacttggattcttaccgaactgaccactgccgccaccacgacagccgccaccggacctaccgcaactccatcgagcactccaggaaccacttggatactgaccgaaccctcaacaactgccactgtgaccgtcccgacaggcagcacagccaccgcaagcagcacacgggccacagccgggacgctaaaagttttgacctccaccgccactacaccgaccgtgatcagcagtcgcgctaccccgtccagctcgccgggtactgccaccgccctcccagctttaagatcaaccgctacaacaccgacagcaaccagcgttacagccattccatcatccagtcttggcactgcctggacccgactgtcccaaacaaccacacccaccgccaccatgagtaccgccacacccagctcaaccccggagacagtccacaccagcaccgtattaaccaccacaacaacaacaacccgggcgacaggctccgttgctactccttctagtacacctggaacagcacatactaccaaggtgcctacgaccaccaccactggttttaccgcaaccccaagctcctcccccggcactgcgcttacaccccccgtttggatatctacaactacaacccctaccacgagagggagtactgttactccatcatcaatccccgggacaacgcacacggcgacagtgctaactactacaactactaccgtggccaccgggtcaatggccacaccctcatcctccacacagacaagcggcacgcccccgtccctgacgaccaccgctacgactatcacagcaacagggtctacaactaatccgagctcaacccccgggaccactcctattccacctgtactgacaacaaccgctaccacaccagctgcgaccagcagcaccgtcactccttccagcgctttgggcaccacgcacacccctccagtgcccaacactacagccacaacacatgggcggtcactgccacccagctcaccccataccgtgaggaccgcatggacatccgctacgagtggaattctggggaccacacacataacagagcctagcaccgttacctcccacacgcccgccgccacaacaagtacgacccaacacagcacccccgctctgagttcccctcatccgagctcaagaacaaccgagtcaccaccatccccaggtaccacaacccccggtcacaccagaggtacatcgcgaactacagcaacagccacaccatccaagacccgcacttccaccctgctaccatcctcaccgacgtcggctcccattacgaccgtagttaccacaggctgtgaaccacagtgcgcatggtcagaatggttggattattcttatccaatgcccggcccatcgggcggagactttgacacctattctaacatccgggcggctggtggagctgtgtgtgagcaacccttgggactggaatgtcgggcacaggcacagcccggtgtgcccttgcgcgaactgggccaagtggtcgagtgctccctggacttcggattagtgtgccgtaaccgcgaacaggtgggaaagtttaagatgtgttttaactacgagatcagagtcttctgttgcaattacggacattgcccgtctacccctgctacttcttcaaccgccaccccctcctctacacctggcacaacctggatcttgaccaagttaaccactaccgctacgacaaccgaatccaccggatcaacagcgacaccttcctctaccccgggcaccacatggatactgaccgaacctagcaccacagccacagtgactgtgccaacggggagcaccgctacagccagcagtacccaagcaactgctgggacccctcatgtgtctacaaccgcaactactccaacagtgacttctagcaaggccacacccttcagcagtccaggcacagcaaccgcactgcctgcactgcgttccaccgccacaaccccaacagccaccagcttcacagcaattccttcgagtagcttggggacaacatggacccgcctgtcccagaccactacaccgacggccaccatgtccaccgccactccttctagcactcctgagacggcacacacgagcacagtgcttacaaccacagctacaactaccagggctaccggcagtgtggcaactccctcttctacccctggtaccgcacacacaacgaaagtacctaccacaaccactacaggcttcaccgtaacgccatcctcatcaccaggcaccgctagaacgcctcctgtctggatctccaccaccactacacccacaaccagcgggagcactgtcacacccagctcagtccctggaactacccacacccctaccgtattgacaaccaccacaactacggtcgcaacaggttctatggcaactccatccagcagcactcagacaagtggaactccaccgtcattgattacgaccgccacgacaatcaccgcaactgggtccacaaccaatcccagctcaaccccaggtaccacaccaatccccccggtgcttacaaccaccgcaaccactccagccgccacctccagcactgtgacaccatcttctgcgcttggaacaacacacacacccccagtgccaaataccactgccacaacccatggtcgatccctgtcccctagctcccctcacactgttaggacagcatggaccagcgccactagtgggaccctgggtacaactcacatcacggaacccagcacaggcacatcgcacacacccgctgccaccacagggaccacccaacattctacacctgccctctccagtcctcatccctcctctcgcaccaccgagtcccctccatcaccagggaccacgacacccgggcatactaccgccaccagtaggacaaccgctacagcaacacctagtaagactagaacatcgaccctgctgccaagttccccaactagcgcacctataacaaccgtggtgaccacagggtgcgagccccaatgtgcctggagcgagtggctggactactcgtacccgatgccaggcccttctggcggagatttcgacacatattccaatataagggccgccggaggcgccgtctgcgaacagcccctggggctggagtgccgagcccaggcccagccgggcgtcccactcggtgagctgggtcaggttgtcgaatgcagtctggatttcggtctggtgtgtcgaaaccgcgaacaggtgggaaaatttaaaatgtgtttcaactacgaaattcgggttttctgctgtaattacggacactgtcctagcactcctgccacttccagcaccgctatgccctctagcactcctggtaccacctggattctgaccgagttaacaactacagccaccaccacagccagtaccggatcaaccgccactcccagcagcaccccgggaaccgccccgcctccaaaagtgttaaccagtcccgccaccactccaaccgctacctctagcaaagccaccagcagttcctctcctaggaccgccaccacattaccggtgcttactagcaccgctaccaaatccacggccaccagtgtgacccccattccatcatcaaccctcggaactaccggcaccctgcccgaacaaaccacgactcccgtagcaacaatgtctacgatccatccctcctcaacaccggagaccacacatacgtctacagtgctaactactaaggcaacaaccactcgcgctacatcttccacatccacccctagttcaacaccaggaaccacctggattttgacagaattgacaacagccgccacaacaaccgcggcaaccggccctaccgctactccatcaagtacccccgggacaacttggatacttacagagctgactaccactgccacgactaccgctagcacaggctctaccgccactccgtcaagcacgccaggcacaacttggattctgactgagccctcgaccacagccaccgtgactgtcccaacaggatccactgcaaccgcctcatccacacaggccactgccggcacaccccatgtctctactactgccactactcctaccgtgacatcaagcaaagccaccccatcaagctcaccgggtactgcaaccgcactgcccgctctccgatctaccgccaccacccccactgcaacctccttcactgcaatcccttcctcttcccttggaactacctggaccaggctgagtcagactaccacaccaaccgccaccatgagcacggcaacacccagctcgacccccgaaactgtccatacaagcacagttcttacggccacagctactacaacaggtgcgactggctctgtggcaactccctcgtctacaccagggactgcccacactactaaggtgcctaccactacaacgactggttttactgcaacgccttccagttcaccgggtaccgccctcaccccaccggtatggatttcaaccacaacaacaccgacaaccacgacacccaccacatctggcagcaccgtaacaccatccagcatcccaggaactacccataccgcaagggtactgaccaccaccaccacaaccgtcgcgacaggcagcatggcaacccctagctcctccacacagacttcaggaacgccaccgtcactgaccactaccgcaacgaccatcactgccactggcagcaccacaaacccatcttctacccccggaaccacaccgattacccctgtgttaacaagtactgcaactacaccagctgcaacgtcctctaaagcaacttcatcttcctctcctagaactgccaccacactgcccgtgctgacctctacagcaaccaagtctacagctacctccttcacccctatcccctcctctaccctgtggacgacttggacagtccctgctcagactaccaccccaatgtctactatgtctactatccacacttcttccaccccagaaaccacacacacaagtactgttctgacaaccactgctacaatgacccgggcaactaactcaactgcaactccaagtagcaccctgggcaccacacggattctcaccgagttgacaacgacagccactactacagcagcaaccggatctacagccacactctctagtacgcccgggaccacctggattctgaccgaaccgagtacaatcgcgaccgtgatggtgccgaccggatctactgctacagccagttctacactcggaacagcacacacccctaaagtggttaccactatggccacgatgcccaccgctacggcatcgaccgtaccctcctccagcacggttgggaccacccgcacgcctgccgttctgccttcaagcctccccaccttctctgtcagcacagtgagttcaagcgtgctgacaacactgagacctactgggtttccctcatcacacttttccacaccctgtttttgccgggcattcggacaatttttttctcccggggaggtgatctacaataagacggatagagctggctgtcatttctacgcagtttgcaaccagcattgcgacatcgaccggtttcagggcgcctgcccaactagcccaccgcctgtgagctcagctccccttagcagtcctagcccggcccctggatgcgataacgccattcccctgcgccaggtcaatgagacatggactttagagaattgcacagtggccaggtgcgtaggagataatagagtggtgcttttggacccaaagcctgtcgcaaacgttacgtgtgtgaataaacacctcccaatcaaagtctcagatccatcccagccttgtgactttcattatgagtgcgaatgcatttgtagcatgtggggtgggagccattattcaacctttgatgggacttcttacacctttcgcggaaactgcacatacgtattgatgagagagatacacgcacgttttggcaacctgtccttgtatttagataaccattactgcacagcctccgcaaccgcagctgccgcccgatgcccgagagcactgtccattcattacaagtctatggacatcgtacttaccgttaccatggtgcatggcaaggaggaggggctaatcttgttcgatcaaatcccagtgtcctcaggattttccaagaacggcgtcctggtgtcagtgttgggcactactacaatgagagtcgatatccctgcactcggcgtttcggtgacctttaatggccaggtgtttcaggctagactgccctatagtctgttccataacaacaccgaagggcagtgcggtacctgcaccaacaatcagagagatgattgtctccagcgggacggaaccacggctgcttcctgcaaggacatggctaagacctggctggtgcctgacagccggaaagacggatgctgggctcctaccggtacacctcctacggcctcaccagccgccccggttagctcaaccccaacccccacaccctgtcctcctcaacctctttgcgacctgatgctgtctcaggtatttgccgagtgccacaatctagtgcctccgggtccttttttcaacgcctgcatatcggaccactgtcgtgggcgtcttgaggttccctgtcagtcactcgaagcctatgccgagctgtgtcgggccaggggcgtctgcagcgactggcggggggctactggcggcctttgtgacctgacttgcccacccacaaaagtgtacaaaccatgtggccccatacagcctgcaacgtgcaacagtaggaatcagagcccacaactggagggaatggccgaaggttgcttctgccctgaggatcagattctcttcaatgcgcacatgggcatttgtgtgcaagcttgtccctgcgtcgggcctgatgggtttcccaaatttcctggagagaggtgggtctccaattgtcagtcatgtgtttgtgacgaggggagcgtctcagtacagtgcaagccccttccatgcgatgcccaagggcagcccccaccctgcaaccgcccaggcttcgttacggtcactagaccaagagccgagaacccttgttgccctgaaacagtatgtgtgtgtaacaccaccacgtgccctcagtcgctgccggtttgccccccggggcaagagtccatttgcacccaggaagaaggcgactgttgtcccacattccgctgcaggcctcaactctgtagctacaacggcaccttctacggggtgggagccacgtttccaggagctcttccctgccatatgtgcacctgtctgagcggggatacacaggatcccactgtacagtgtcaagaagatgcctgcaataataccacttgtccccagggattcgaatacaaaagggttgctggacagtgctgcggcgaatgcgtacaaaccgcgtgtctcactcctgacggccagccagtgcaattaaacgaaacttgggtaaacagccacgttgataactgcacggtttacctgtgcgaggcagagggaggcgtacacctcctgacaccccagccagctagctgcccagacgttagctcatgccgtggttctttgcgcaagacaggctgttgttatagctgtgaagaggattcctgtcaggtgcgcatcaatacaacaatcctgtggcaccaaggctgtgaaaccgaggtgaacattactttttgcgagggcagttgccctggagcttctaagtactctgctgaagcccaggccatgcagcaccaatgcacctgttgtcaagagcgacgggtgcacgaggaaactgtacccctgcattgccccaatggctcggccatactccatacatacacccacgttgatgagtgtggttgtacccccttttgtgtgccagcgcccatggcacctccacacacacgcggcttccccgcccaggaggctacagcggtctag

SEQ ID NO: 128609 - DNA, 561 bp, Artificial Sequence
  derived and/or modified sequence
tcctccactccgggcaccacttggatacttactgaaccctctacaacagccacagtaacagtacctactggatcgaccgctaccgcatcttctacccaagccaccgcaggaacgccacatgtatcaacgacagcaacaacccccactgttacttctagtaaggccacacctttcagctcacctggaacggccacagccctgccagcacttcggtcgactgcgaccacacctactgctaccagtttcactgcaatcccaagttcatgggcacctccaggccccgcataccaccgtcccccccatcccaggccaccttgtcctcagccccacccccctccactgcagcgcctaagtacaccaccccaatgtctgcccccaagacctccacggggccaccgcctgtgcggacatccactgttgcatcctcggaactcatcccactaccagtcagcagactaccataatcacttcacagcgaccccatcttccagtcctggcacagcacgtaccctccctgtctggatcagcaccaccacaacccccacaacccgcggttcctag

SEQ ID NO: 128610 - DNA, 960 bp, Artificial Sequence
  derived and/or modified sequence
acaaaagcgacaacaactcgggccacctcaagcatgtctacacctagcagcactcctgggaccacctggattctgactgaactcactaccgccgctacaacaaccgctgctactccacacggccatccagtactccatccacgggatcacctcgacccgcacagagcccagcattacacagtgaccgttcctacaggatctacagccactgcttctagcacacgtgcaaccgcgggtacactgaaagttctcacctcacaccatacacattcacatcagctgcagagccactccctcttgcaatccagggactgtaaccgacccagctccaccgagaagcactcccaccacacccatagctaccagcgatactctcaccccctgttcctccctaccgcatggacccgtctgagccaaaccaccaccccgacagctactatgtctacagccacacccagttccacaccagaaaccgtgcatacctccactgtgcttactacgaccaccactactactcgtgctacactgtggccccctccaccgcccccgcaagaacagctcaccctcccgaagtgtagacttccccagccgcgccacagccaccccctgctgcaaccaagggacggcacccatgcatcatccgtggaccaacataaccatcatactcacaaccaaagattacacggagaccccctgctacatccgactacacacactgccacagtcctcacgacaaccaccacaacacctctagttctgtggcaacaccccccacttgctcacagaccagttgttccccccagcctcaccaccaccgccacaaccattacagctaccggcagcactaccaacccttcttccacacctgggacaacccctattcccccggtcctaacaaccaccgctcatacgtgcagtcaccaacagcacagcgattccctgctttgtcctcgggattag

SEQ ID NO: 128611 - DNA, 2007 bp, Artificial Sequence
  derived and/or modified sequence
atgcgtgaaattcacgcgcgtttcggaaatctctccctgtaccttgataaccactactgcactgcgtccgcaacagccgctgctgcacgatgtcccagggctctgtcaatacattacaagtccatggatatcgtcctgaccgttaccatggttcatggcaaggaggaggggctgatcttatttgaccagatccctgtctcaagtggcttttccaagaacggggtgctagtgagtgtgctcggcacgactactatgagagtcgacatccccgctcttggcgtgtccgtaaccttcaatggccaggtgttccaagcccggttgccttattctttgttccacaataacacagagggtcagtgcggcacatgcactaataatcagcgtgacgattgcctccaacgcgacggtactactgcagcctcctgtaaagacatggctaagacgtggctggttccggattcccgaaaggacggttgctgggcccctactggaactccacctactgcatccccggccgcacccgtgtcatccacacccacacctaccccttgccctccacagccgctgtgcgacctgatgttgagccaggtcttcgctgaatgccacaatctcgttccccctggcccattcttcaacgcatgtatctccgaccattgtcggggcagattagaagtgccatgtcagagcctcgaggcctacgccgaactctgtagggcaagaggggtttgcagtgactggaggggcgcaaccggcgggctgtgtgatctgacctgtccccccaccaaagtctacaaaccatgtgggccgatccagccagcaacttgcaactcaaggaaccagagtcctcagctggaaggcatggccgaggggtgcttctgccccgaagatcagatcctgttcaacgcccatatggggatatgcgttcaagcatgcccgtgcgtcggacccgacggcttccccaagtttcccggggagcggtgggtatccaactgtcagtcctgcgtttgcgacgagggctcagtatccgttcagtgcaaacctctcccatgtgacgcacagggccaaccaccaccctgcaaccgacctgggttcgttaccgtgactagaccaagagccgagaatccttgttgccccgagaccgtgtgtgtgtgtaatacaacaacttgtcctcaatccttgccagtttgtccccccggccaagaaagcatttgcacacaggaagaaggtgactgctgccctaccttccgttgccgccctcagttatgttcctataatgggaccttttacggggtgggcgctaccttccctggcgcgctgccctgccatatgtgtacttgtctgagcggagacacacaagatccaactgtgcagtgtcaagaggacgcatgtaataacactacgtgtccacagggctttgaatataagcgggtggcaggacagtgttgcggcgaatgcgttcaaactgcttgcttaacaccagacggccagccagtccagcttaacgaaacatgggtgaactctcacgttgacaactgcaccgtgtacctctgtgaggcagagggcggcgtccatctgctgacccctcaaccagcatcatgtcctgacgttagctcctgccggggttcattacggaaaacgggttgctgttattcctgcgaggaggattcctgtcaagttcgaatcaacactacaatcctttggcaccagggctgtgagactgaggtgaatatcacgttctgtgagggctcctgtccaggcgcctcaaagtatagcgcggaggcacaagctatgcaacaccagtgcacatgttgtcaagagaggcgcgtacatgaagagaccgtacccctgcactgccccaatgggtcggcaattcttcatacttatactcatgttgacgaatgcggatgtaccccattctgcgtaccagcgccgatgagtccccccgcttgcgtctggcatcccgccctgagagcacccgccgcccacctcgggttagccccgccctag

SEQ ID NO: 128612 - DNA, 17121 bp, Artificial Sequence
  derived and/or modified sequence
atgggggccccatcagcctgccgcacactcgtacttgcattagcagccatgctcgtagtccctcaagccgagactcagggccccgtggaacccagctgggaaaacgcaggtcacacaatggacgggggcgcccccaccagctcacctactaggcgggtttcatttgttcccccagtcaccgtgttccccagcctgtccccactgaaccctgctcataacggccgggtttgctctacttggggcgatttccattacaagacatttgatggcgatgtgttcagattccccgggctgtgtaattatgtgttttcagagcattgccgcgccgcgtatgaagatttcaatgtccagctgagaagaggattagtgggaagtcgccccgtagtaactagggtagtcattaaggcccagggtctggtgctcgaagcaagcaatggatcagttcttatcaatggccagcgcgaagagctgccatatagtcgcacgggcttactcgttgaacagagcggagactacatcaaagtttcaatacgacttgtgctaaccttcctgtggaatggtgaggacagtgcactgttggagctggaccctaaatatgcaaaccaaacctgcggcctctgtggcgactttaacggccttcctgcgttcaacgaattttatgcccataacgcccgactgacccccctgcagttcggcaacctgcagaaactcgacggtcctactgagcaatgccctgacccgctgccgctacctgccggtaactgtacagacgaagagggaatctgtcaccgcacactgttaggacccgccttcgcagagtgtcacgcactggtcgactctacagcttacctagctgcgtgcgcccaggacctctgtcggtgccccacttgtccatgcgccacttttgttgaatactcaaggcaatgcgcacatgcaggcggccagcccaggaactggagatgccctgaactgtgcccgcgaacatgtcccctgaatatgcaacaccaagagtgtggttcgccatgtactgatacctgttccaaccctcaacgtgcccaactgtgcgaagatcactgtgtcgatggatgcttttgcccccccggctcaaccgtgctggacgacatcacccacagcggctgcctgcccctgggccagtgcccatgcactcacggagggagaacctatagtcccggaacatcatttaacactacgtgcagtagctgtacatgtagcggtggactgtggcagtgccaggaccttccttgcccaggaacctgctccgtgcagggtggagcgcacatcagcacctacgacgaaaaactgtatgatctgcatggcgattgttcctatgttctttctaaaaaatgcgctgactcttcctttacggtgctcgccgagcttcgcaaatgtggtctcactgacaacgaaaattgtttgaaagctgtcactctatccctcgacggaggcgacaccgcaattcgcgtccaggctgacggtggcgtttttctgaattcaatttacacccaactgccgttgtctgccgcgaacatcactctctttacaccctctagtttcttcattgtggtgcagacaggcctcggattacagctgctggttcagctagtgccactcatgcaagtttttgtgagactggaccctgcccatcagggacaaatgtgcgggttatgcggaaatttcaatcagaatcaggccgatgactttacagcactgtccggggttgtcgaggccaccggagctgctttcgccaacacctggaaggcccaggccgcatgcgcaaatgccagaaacagcttcgaggatccctgcagtttgtctgtcgaaaacgaaaactacgctaggcattggtgcagtcgtctgacagatccaaattcagcattctctcggtgccacagtattataaacccaaaaccttttcattccaactgcatgttcgatacttgtaattgcgaaaggtccgaagattgtctctgtgcggccctgagctcttatgtccacgcttgcgcagcaaaaggcgtacagctatctgattggcgcgatggtgtttgcacaaagtatatgcagaactgccccaagtcccagcgttatgcgtatgttgtggacgcatgccagcccacatgtagaggactctccgaagccgacgtgacttgttctgtgtctttcgttcccgtcgacggctgtacctgtccggccggaacatttctcaatgatgccggggcctgcgttcctgcacaagagtgcccgtgctatgctcatgggacagtgctcgctccaggcgaggttgtacatgatgaaggggcggtgtgttcatgcaccggaggcaagctttcttgtctgggagcgtccctacaaaaatctactggctgtgctgctcctatggtctacctagattgctccaattcctcagcaggcacccctggtgctgaatgccttcgctcttgtcacactttagatgttggctgcttttcgacacactgcgtttcaggctgcgtgtgccctcctgggctggtgtcagacggatccgggggttgtatagcggaggaggactgcccctgtgtgcacaatgaggccacatacaagccaggtgaaacgatccgagtagactgtaatacatgtacctgtcggaataggaggtgggagtgtagccacagactctgcctcggcacatgtgtcgcatacggtgacggtcatttcataacctttgacggagatcggtatagtttcgagggttcttgtgaatacatattagctcaggactactgcggagacaacaccactcacgggactttccggattgtgacggagaatatcccatgcggtactacaggtacaacttgctctaaggctatcaaactcttcgttgaaagctatgaactcatcctccaagaaggtacatttaaagccgtagcccgaggacctggcggcgatcctccctacaagattagatacatgggcatctttcttgtgattgagacccacggaatggcagtgtcctgggatagaaagacttccgtttttattagactgcaccaagattacaagggcagagtctgtggactgtgcggcaacttcgatgacaatgcaattaatgacttcgccactcggtctaggtctgtcgtgggcgacgcactcgagttcggaaactcctggaaactcagtccgagttgccccgatgcactagctcccaaagacccctgtaccgccaaccctttcagaaagtcttgggcccaaaaacagtgttctatcctgcacggccccacatttgctgcctgccgctcacaggtggacagtaccaaatactacgaagcttgtgtgaatgatgcctgcgcctgcgattcaggcggagactgcgaatgtttttgcactgccgtggctgcctatgcccaggcatgtcacgatgccggactctgtgtgagttggagaacccctgacacatgccctctgttctgtgacttctacaatcctcacggtggctgcgaatggcactaccaaccctgcggagcaccctgtctcaagacatgcagaaacccctcaggtcactgcctcgtggacctgccgggcctggaaggttgttatcctaaatgcccacctagccagccctttttcaacgaggatcaaatgaagtgtgtggcgcagtgtggctgttacgacaaagacgggaattattatgatgtgggagctagggtcccaacagctgaaaattgtcagagctgcaactgcaccccctccggcatccagtgtgcacattccctcgaggcctgcacatgtacctacgaagacagaacatactcataccaagatgtgatatataatacaacagatgggctcggagcgtgcctgattgcgatatgcggctcaaatggaactattattcgcaaagccgtcgcctgccccggtacgcctgccacaacccctttcacctttaccacagcttgggtgccgcactccactacctcgccagcccttcctgtatccactgtttgcgtgcgcgaggtttgccgatggtcttcttggtataatggacaccgaccagagcctggacttggagggggcgactttgagacttttgaaaatctgagacagcggggctatcaggtgtgccccgtactagccgatatagaatgccgggctgcccagttgccggatatgccgctggaagaactaggccagcaagtagactgtgaccgaatgagaggcctgatgtgcgccaattcccaacagtccccacctctgtgtcacgattacgaactccgtgtgctgtgttgtgaatatgtgccttgcggcccgagcccggcgcctggcaccagtccgcagccttctctctccgcgtctaccgaacccgccgttcctaccccgacccagactaccgccacagaaaaaacaacactatgggttacaccatcgattcgttccacagccgcccttacatctcagaccggcagtagctccggcccagttaccgtcacaccttctgccccggggaccaccacatgtcaacctcggtgtcagtggactgaatggtttgacgaggattaccccaagagtgaacagctgggcggagatgttgaatcatatgataaaataagagctgcaggcggccatctgtgtcagcaacctaaggacattgagtgccaagcagaatcattccccaattggacccttgcccaggtcggacagaaagttcattgcgatgttcatttcggactagtttgcagaaactgggagcaggagggggtgttcaaaatgtgttataactaccggatccgggtgctgtgctgttctgacgaccattgcaggggacgggcaactactccgcctccaactaccgaattagaaaccgccactaccacgaccacccaggcattattctccaccccccaacctacctcctctccgggtctgacacgagcgccccccgcttcaactaccgccgttcctaccctgtcggaagggctgaccagccctcgctacacctctacacttggtacggctaccaccggaggccctacaactccagccggctctactgagcccaccgtacctggcgttgcaacttcaactcttcccactcgatcagcacttcccggcaccacgggctctctaggaacatggcgcccttcacaacctccaacactagccccgactacgatggccacaagccgcgcccgccccacaggcaccgcctctaccgcatcaaaggaacctttgacgactagcctggctcctactctgacatctgaactttctacctctcaagcagaaacaagcactccgcgcaccgagactacaatgagccccctcactaataccacaacctctcagggtactacgagatgtcaaccaaaatgtgaatggactgagtggttcgatgtggactttcctacaagcggcgtagctggaggcgacatggagacttttgagaacatcagagctgcgggaggcaaaatgtgctgggcccctaagtcgatcgaatgccgcgcagagaattaccccgaagtctcaatcgatcaggtgggtcaagttctgacctgttcactggaaaccggcctgacctgcaaaaatgaagaccagaccggacgtttcaatatgtgttttaactataacgtcagagttctgtgttgcgatgattactctcactgtccaagcacccctgccacttcaagcacagcaacaccttcctccacaccaggcaccacttggattctcactaagccaacaaccacggcgaccaccacagcatccaccgggagtacagccacccccacatcaactctccgcactgctccaccaccgaaagtgttgactactacagccaccactcctacagttacatcttcgaaggccaccccctcttcaagcccaggaacagcaactgccctaccagcccttaggtcaactgctacaacccctaccgcaacatccgtcacccccatcccatcctctagtttaggaacgacctggacgagactatctcaaactaccacgccaaccgccactatgtcaaccgctacaccaagctcaacccctgaaacggctcatacaagcactgttctgaccgccacagctaccaccactggggccaccggatctgtcgcaacgccaagtagtaccccaggaacagcccatactaccaaagttccaacaacgacaaccacaggttttacagcaacccctagttcttcccctgggaccgcactcacaccccccgtatggatttcaaccaccaccacacctaccacacgaggaagcacagtcactccttcatctatccccggcacaactcacacggccacagtgctgacaacaacaacaacaaccgtggccaccggtagcatggcaactccttccagttctacacagacgtcaggcacgcccccttcacttacaaccaccgccaccaccatcactgccacaggttctacaaccaatccctcttctacccccggaaccaccccaattcccccagtattaacaacaactgcaacgactcccgccgcgactagtaatactgtgacacctagctccgctcttggaaccacacacactccccccgtcccaaatactatggccaccacccacggacgctccctgccccccagctcacctcatacagttcgcacagcatggacctctgctacatctggcattctgggaactacccacatcaccgagccgtctactgttacttcccacacattagcagccacaaccgggaccacccagcatagcacccccgcattgagcagcccacatccatcgtcacgaacaactgaatccccaccatcacccggtacaaccacccctggccataccactgccaccagccgaacgaccgccactgccacgccttccaagacccgaactagtaccttgctgcctagctcccccacatccgcccccattactacagtcgtcactatggggtgtgaaccacagtgtgcatggtctgaatggcttgattactcatacccaatgcctggaccatcaggcggcgattttgatacatactctaatataagagctgccggcggcgccgtgtgcgagcaaccactaggcctggaatgtagagctcaagctcagcccggcgtgcccctccgggagctagggcaagtggtggaatgctccctagatttcgggctggtctgtaggaatagagaacaggttggtaaatttaaaatgtgctttaactacgaaataagagtcttttgctgcaattacggccattgcccaagtacccccgccaccagcagcactgccatgccttcctcgacacctgggaccacctggatcttgaccgaactgactactaccgcaaccactaccgagtcaaccggttcaacagccaccccatcctctacacctgccaccgccgggactcctcacgtttccacaaccgccacgacgcccacggtaacctctagcaaagccacaccattttcctctccgggcacagcaactgcactcccagctctccgatcaactgccaccacaccaaccgccaccagttttacagcaatccccagttcctccctcggcactacctggacccgccttagtcaaactaccactcctaccgccaccatgtcaaccgccactcctagttcaacccccgaaaccgtgcacacttctaccgttcttacaacaactgcaactactaccggtgccacgggctcagtagcgactccttccagtaccccaggcaccgcccacaccaccaaggtccttactacaacaacaacagggtttaccgccacaccctccagtagtccgggaacagcacggacacttcctgtgtggatttcaacaaccaccactcctacaacacgaggttcaaccgtgacaccctcatcaattccaggaaccacccatactcctacagtactaacgaccactaccaccactgttgctaccgggagcatggcgactccttcttcctcaacccagacatctggtacccccccatctctgaccactaccgccacaacaattacagccacaggatcaactacaaacccgtcctccactcctgggaccacaccaatcccccctgtcctaactaccacagccacaactccggcagctactagctcgactgtgaccccctcctcagccctgggcacaactcacacaccaccagtccccaatactactgctacaacccacggtcgctccttgagtcccagctccccacacacagttcgcaccgcctggacatcagccacttctggtacacttggtactacccacatcacagagccgagcaccggcactagccacacccctgccgccactacaggaaccacgcaacatagtactccagccttgtcttccccgcatcctagttcaagaacaactgaatcgccaccgtcccctggcaccaccaccccagggcacactcgcgctaccagtaggacaactgccacagctacaccatcaaagacacgcacttcgacactcttgcccagctctcccacatcagcacccatcaccacagtggttacaatggggtgtgaaccgcagtgtgcatggtcagaatggttggactactcctaccctatgccaggaccgagtggcggggattttgacacatatagcaacatacgcgcggcaggaggcgctgtctgcgaacagccattgggactagaatgccgagcacaggcccagcctggcgttccattgagagaactaggccaagtcgtggaatgctcacttgattttggtctcgtatgcaggaacagggaacaagttgggaaatttaagatgtgctttaactacgagatacgggtgttctgctgtaattatggtcactgcccttcaacacccgcaacttctagcactgccactcccagttctacccccggcaccacctggatactgactgagcagaccacagccgctaccactaccgcaactacaggctctaccgctatcccctcctccacccccggaacggcgcccccgcctaaagtgttgaccagtaccgccaccacaccaaccgcaacctcaagcaaagccaccagctcctcatctccccgaaccgccaccaccctgcctgtccttacctctacagcaactaagagcactgccacgtcctttactccgattccgagtttcacactggggactactgggacgcttccagagcagaccaccacacccatggccacaatgagcacaatccatccctcttctacacccgaaaccacccacaccagcacagttctcactaccaaagccacgaccacccgcgctacttcttccatgtctacaccctcgtctacacccggcaccacttggatcctcacagaattaactaccgctgctaccacaacagccgcgaccggacccaccgccaccccatctagcacacccggcactacatggattttgaccgaaccctcaacaaccgctacagtcacagtcccaactgggtctaccgccacagctagctcaaccagggccaccgccggcactttgaaagtattgacctccaccgccacaacgcctacagtaatttcttctcgggcgactccgagttcatcacccggtacagccaccgcacttccagcgctgcgatcaaccgctactaccccaacagcaacaagcgtgaccgctattccttcttcatcactgggcacagcatggactcgactgtctcaaaccacgacccctactgcgaccatgagcaccgcaacaccctcctccacacccgaaaccgtgcacaccagcaccgtgttaacaaccaccacaactacaactcgagccaccggctcagttgcgactccatcctcgacaccaggcactgcgcatacaacgaaagtaccaactacaacaaccacgggctttaccgctaccccctcttcctcccccggcacagctttgaccccccctgtttggatatccaccaccaccacgcccactacaagaggttccaccgtgacgccctccagtattcccggaacgactcacaccgccaccgtgctgaccaccacaactacaaccgtcgccacagggagtatggccactcctagtagttccacccagacatcaggcacccctcctagcttgacaacaacagccactactataaccgcgacaggttccactaccaacccaagctcgaccccaggaacgactcctatccccccagttttgaccaccacagccaccacccccgccgccacctcctccacagtgacaccttcttctgcactcgggactacacatacccctcctgtgccaaataccaccgccacaacccatggacgcagtctgccaccctcaagcccacacaccgtcaggaccgcctggactagtgccacctcagggatccttggaacgactcacatcacggagccctcaacagttacttctcataccccggcggccacgacatctacaactcagcactctacccctgccctctcctcccctcatccttcttctcggaccacagaaagtcccccaagccctggaacgacgacacctgggcacacccgcgggactagtagaaccacagctacagctaccccctcaaagacacggacatcgactctcctgccaagtagtccaaccagcgcccccataaccacagtcgtaaccaccggatgcgagcctcagtgtgcctggtctgaatggctcgattacagctatcccatgcccggaccttcaggcggcgatttcgacacatattcaaatatccgtgctgccggtggagccgtatgcgagcaaccactagggttagagtgtagagctcaggcccagcccggtgttccactgcgggaattgggccaggtagttgagtgctcattggacttcgggctcgtttgcagaaacagagaacaggtcggcaaatttaaaatgtgtttcaactacgaaatccgcgtgttctgttgtaactatggccattgccccagcactcctgcaacttcatcaaccgctactccttcttccacacctggaaccacttggatactgacaaaactcactacaaccgcgacaaccacagaatccacaggctcgacagccacgccttcaagtacaccaggagcaacagccgggacacctcatgtgagtactaccgctactactccgaccgtgacatcctcaaaagccaccccattctcctctcccggaactgccaccgccttacccgccctgagaagcactgcaaccactccaaccgcaacttccttcaccgccatcccatcctcttcactcggaacgacttggacacgcctatctcagactacaaccccaacagctactatgagcactgccactccatccagcaccccagaaaccgcccacacatccacagtactgaccacaaccgccactaccactagagccacaggaagtgtggctacgccatcctcgactcctgggaccgcccacacaactaaagtacctacaacaacaaccaccgggtttaccgtcacccccagctcaagcccaggcacagccagaaccccgcctgtatggatatcaacaaccaccaccccaaccacaagtggctccactgttaccccttcgagtgtgcctggcactacacacacgcctacagtgctgaccacaactacaaccactgtcgccacgggctctatggccaccccctcatcatcgacccagacatctggcacgcctccttctctgatcacaaccgcaactacaatcactgccacaggctctaccaccaatccctcgtccacccctggcactacacccattccacccgtgctgactacaactgccaccactcctgctgcgacatcttcaacagtgaccccctcatctgcccttggtactactcacaccccaccagtcccaaataccactgcaacgacccacggccgctccttatctcctagttcgccacacacggtgcgcactgcctggacctctgcaacatcgggcacgctgggtaccacccatatcactgaaccttctacaggaacaagtcataccccagctgctactactggcactacccagcactcgacaccagctctgagctctccgcaccccagttcccgcaccaccgaaagtccacccagcccagggacaacaactcccggacacacgaccgctactagccgtaccacagcaacagccacaccaagcaagacaagaacaagtaccctactgccctcctcccccacctcagcccctataacaactgttgtaactacaggatgcgagccccagtgtgcctggagtgaatggctggattactcctaccccatgccaggcccatctggaggtgatttcgatacctatagtaacattagggcagccgggggagcggtttgcgaacagccattgggtctagaatgtagagcacaggcccaacccggcgttcctttaggcgagctcggacaggtcgtggagtgctctttggacttcggtcttgtgtgccgaaaccgcgagcaggtaggaaagtttaaaatgtgttttaactatgaaatcagggtcttttgttgcaactacggccactgcccgtctaccccagctacatcaagcacagcaatgcccagtagcacgcccgggactacttggatcttgacagagctcacaacaaccgccaccacaacagcctctacaggaagcaccgccacaccaagttcgactcccggcacagctcccccacctaaagttctcacttccccggcaaccacgccaacagcaacatccagcaaggccacatcctcctcatcaccgcgaacagccactacactgccagtactaacgtccacagctactaagtccaccgctacctctgtgacaccaataccatcctctacattaggcactaccggaaccctgccagagcagacaacgactcctgttgctacaatgagcaccattcacccatcctcaacccccgaaacaacacacacctctacagtcctaacaaccaaagccaccaccacacgggcaacttcatccacttcgactccctcctccacccccgggactacctggattctcacggaactcaccacagccgcaactaccacagcagcaaccggtcctaccgctaccccatcttccacccccggtactacttggatcctgactgaactgactactactgcaacaaccacagcaagcaccggttccacggcaacccctagcagcactcccggcacaacttggatcctaaccgagcccagtactactgcaactgttacagtcccaaccggatcaacagcaactgcatcctcaacccaggccacagccggtaccccacacgtttccactacggctaccactcccacagttactagctcaaaagccacgccctctagttcacccggcacagctactgctcttccagccctgagatctacagcaaccaccccaacagccacctcctttacggcgatcccatctagctctcttgggaccacgtggactagactcagccaaacaacaaccccaactgccaccatgtccactgccacgccctcaagtacgcccgaaaccgtacatacttcaactgttttaactgccactgctactactacaggggccactggcagtgttgccacaccctcatccactcctggtacagcgcatacgaccaaggttcctactacaactaccactggttttacagcgacgccttcctcatcccctggtacagccttaaccccgcccgtctggatcagcacaaccacaacgcctaccaccacgacccccacgacatccgggtcaaccgtgaccccgagctcaatcccaggaactacacacacagcacgcgttcttacaacaacaacaaccaccgtagctaccggttccatggctaccccctcaagtagtacccagacatcaggtactcccccatccctcaccacaacagcaaccacaattacagccaccggcagcaccactaacccaagctcaacgcccggaacaacaccaattacacctgtcctgacctctaccgccacgacccctgcggccacatccagtaaagccaccagctcttcatccccacgcaccgcaactacgttaccagtcttaacctccactgccacaaagtctacagcaacgagtttcacacccataccatcgagcaccctttggacgacttggacagtgcctgcccaaacaaccacccctatgtcaacaatgagcacaatccacacaagtagcacacccgaaaccacccataccagcacagttttaaccacaaccgccaccatgactcgggccactaattccaccgcaactccttcctccacgctcggaactacacgcatactcacagagctgactacaaccgcgaccaccacagcagcaactggaagcaccgccaccctgagttccacccctgggacgacctggattcttaccgagcctagtaccatagctactgtcatggtgccaaccggcagtactgcgaccgcatcctcaactctaggcacggcccatacccctaaagtcgtgacaacaatggctactatgcctactgccaccgcctcaactgttccctcatcctctactgttggcactactcgcacacccgccgtgcttccaagctctctccctacctttagtgtgtccacagtatcctcctcagtcctcacaacactccgtcctactggctttcctagttctcacttttccaccccatgcttctgccgagctttcggccaattcttctcccctggtgaagtgatttacaataagactgaccgagccggatgtcatttttacgcggtatgtaatcagcattgcgacatcgatagattccagggcgcatgtcctacctccccccctcccgttagcagcgcaccactctcttccccttcccccgcacccgggtgcgataatgcaatccccctccggcaagtaaatgagacctggacactcgaaaactgcacagtggctcggtgcgtgggcgacaaccgagtggtgctcctggatcccaaacctgtggctaatgtaacttgcgtcaataagcatctccccatcaaagtcagcgacccatcccaaccttgcgacttccattatgaatgcgaatgtatttgctcaatgtggggaggttcacactatagcacttttgatggtacgagttatacctttaggggcaattgtacctatgtcctgatgcgcgaaatccatgcccgattcggaaacctcagcctttaccttgataatcactactgcaccgcaagcgccaccgccgccgcagcccggtgcccccgagccttgtctatccactacaaatctatggacattgtgttgaccgtgactatggtccatggaaaggaggagggattaatcttgttcgatcagattccagttagcagtgggtttagcaagaacggtgttttggtgagcgttctgggcaccaccaccatgcgtgtagatatccctgccctcggcgtatccgtcactttcaatggtcaggtctttcaagctagactgccttattcacttttccacaataacaccgagggtcaatgcggcacgtgtactaacaaccagagggatgactgccttcagagagacggtaccactgcagcatcatgtaaggacatggcaaagacctggcttgtcccagatagtaggaaggacggatgctgggccccaacaggaacccccccgaccgcttcccctgcagctccagtgtcaagtacccccacaccaactccatgtcctcctcagcccctgtgcgatttaatgctttcccaggtgttcgcggagtgccacaacctagtccctcctggcccatttttcaacgcttgtatatccgaccactgccgcggtagactggaggtgccatgtcagtcgttagaagcgtatgccgaactttgccgagctcgaggcgtgtgctccgattggaggggagcaaccggaggcttatgcgaccttacatgtccaccaacgaaagtgtacaagccctgcggacccattcagcctgccacatgtaattctagaaatcagtcaccacagctcgagggcatggccgaggggtgtttctgtcctgaagaccaaatattatttaacgcacacatgggaatctgcgtgcaagcttgcccctgtgtcggtcccgacggtttcccaaagtttcccggagaaaggtgggtgtcaaattgccaatcatgcgtgtgcgacgagggatccgtgtccgttcagtgcaaacctctgccctgcgacgctcaaggacagcctcctccctgtaaccggcccggatttgtcacagttactagaccccgagccgaaaatccttgttgtccagaaaccgtatgtgtatgcaataccacgacctgtccccagagtctgcccgtctgccccccaggccaggagtctatctgtactcaggaagaaggggactgttgcccaaccttccgatgtcgaccccaactctgttcctataacggaacgttctatggcgttggcgccacttttccaggcgcattaccctgccacatgtgtacatgcctcagtggagatacacaagatcctacagtgcaatgccaggaagacgcctgtaacaacaccacatgccctcaaggattcgagtataaaagagtcgcaggacaatgttgcggcgagtgtgtccagaccgcgtgtctcacccccgatggccagcctgtccagctcaatgaaacatgggttaattcgcatgtggacaactgtaccgtctacctttgtgaggcggaaggaggagtccacctgctaacaccccagccagcctcctgccccgacgtatctagctgtaggggcagtctgcgtaagaccggttgttgctactcgtgcgaggaggactcgtgccaggtccggatcaacacaactatactatggcatcaaggatgcgagacagaagtgaatattacattttgcgaagggagttgtcccggggcttccaaatacagcgccgaggcccaggccatgcagcaccagtgcacatgctgccaggaacgacgagttcatgaggaaacagttcccctgcattgccctaacggatctgccatcctccacacttacacccacgtcgacgagtgtggctgtactccattttgcgtgccggcacctatggctcccccgcacacccgaggattcccagcccaggaagccacagccgtttag

SEQ ID NO: 128613 - DNA, 16587 bp, Artificial Sequence
  derived and/or modified sequence
gctcccaggatgggcgcacccagtgcttgccggacattggtgcttgctttggccgctatgctggtagtgccacaagccggaaagagtccacctttgcgaccactgagcagaaattccggcgccggcttagacggtggcgcgcccaccagctccccaactagacgagtgtcatttgtgccccctgtgacagttttcccttccttgagccgcaaacaaatgctgcccctaccagccggcaagggcgtgtttgcatctccaaaaggtggcgggccagacctcggcgtgcagctaccccccgcccttaatcccgctcacaatgggcgtgtctgctcaacatggggggactttcattacaaaacttttgacggggacgtgtttagatttcccggactttgtaactatgttttctcagaacactgtcgcgccgcgtacgaggatttcaatgttcagctcaggcggggcctggttggaagtcgtccggtggttactcgcgtcgtcataaaggctcaaggactcgttttggaagcttctaatggcagcgtcctgatcaacggtcagagagaggaactgccctattcacgcactggactgctggtagaacagtcaggagattacattaaggtcagcataagactggtgctcacttttctatggaacggcgaagacagcgcgctgctagagctcgaccctaaatacgcaaaccaaacatgtggcctttgtggcgatttcaacggcttgccagcatttaacgaattttatgcccacaacgctcgtttgacccccctccagtttggaaacctccagaagctcgacggccctaccgaacagtgtcccgatccactcccattgccagccggcaactgtacagacgaggaagggatctgccaccgtaccctgttgggacctgcattcgccgaatgccacgccctggtggacagcacagcttaccttgccgcttgtgcccaggatctgtgcaggtgccctacatgcccgtgcgcaaccttcgtcgaatatagcagacaatgcgctcatgccggggggcaacctcgcaattggagatgtcctgaactttgtccacgaacctgtccccttaatatgcagcatcaagagtgcggttcaccatgtacagacacctgtagtaacccacaaagggcccaattgtgtgaagaccattgcgtcgatggctgcttttgcccacccggccgctcatgtacagtgctcgatgacattacacactccggctgtcttcctcttggtcaatgtccttgtacacatggtggaagaacttactcccctggtactagctttaacaccacctgctcctcttgtacttgcagcgggggtttgtggcagtgccaagatttgccttgtcccggaacctgctccgtacagggtggggctcatatatcaacatacgacgagaagttatacgacctccacggggactgctcgtacgtgctgtctaaaaaatgcgcagattcaagttttaccgtactggcagagctccgcaagtgtggactgacggataatgagaactgtctgaaggccgtaactctgtcacttgacggtggggataccgctatccgcgtccaggcagatggaggcgtattcctcaacagcatttacacccagcttcccttgtccgccgcaaatatcaccctgttcaccccttcctccttcttcattgtggtccagacaggactgggattacagctgttagtccaactcgtaccattgatgcaggtgttcgttaggcttgaccccgcacaccaggggcagatgtgtggcttgtgcggtaattttaatcaaaaccaagccgacgattttactgctctatccggagtcgttgaagcaaccggtgccgcctttgcaaatacctggaaagcccaagccgcctgtgccaacgcccgaaatagctttgaagacccgtgcagcctgagcgtcgagaacgaaaactatgccagacactggtgctctagactgaccgacccaaactccgcattcagcagatgccatagtataataaacccaaagccattccattccaactgcatgttcgatacatgcaattgtgaacgaagtgaagactgcctgtgtgctgccctgagttcctacgttcatgcatgtgccgccaagggcgtgcaactgtctgattggcgagatggtgtctgcaccaagtacatgcagaactgccccaagtcccagcgatacgcgtatgtggtggacgcctgtcaaccaacttgtagaggtctttcagaggccgacgttacctgctcagtctcctttgtacctgttgacggctgtacctgtccagctggtaccttcctcaatgacgccggtgcatgtgttcctgcacaagaatgcccctgttatgcccacggtaccgtccttgccccgggggaagttgtccatgatgagggtgcggtgtgtagctgtactggaggaaaactttcatgtctcggagcctccctgcagaagtctacaggttgcgccgccccgatggtctatctggactgttccaactcgtctgcaggaacccccggcgccgagtgcctacgaagttgtcataccctcgacgtcggttgcttttcgacgcattgtgtctctggctgtgtgtgtccacctgggctggtctctgacggtagcggcggttgtattgccgaggaggactgtccttgcgtgcataatgaagcgacctataaaccaggcgagacaattagagtggattgtaatacttgcacatgtcgtaatcgaaggtgggagtgcagccacagactctgcctcggaacctgtgtggcttatggagatggacattttataaccttcgatggggatcgttacagcttcgaaggctcatgcgagtatattctagcgcaggattattgcggcgataatacaacccacggaacctttcggattgtcactgagaacattccatgcgggacgaccggaacgacctgtagtaaagcgattaaactgttcgtggaagtaaggactgcccccgcggtcagtacaccagatcccgcagcaaatgaacctgcccctagagaagctagtgtcggatttagacagagattgcctccccttcaatcttatgagctgattctgcaagagggaactttcaaagccgtggctcggggacccggcggcgaccccccttataaaattcgctacatgggcatatttttggtgatcgagacacacggaatggctgtgagctgggatcgaaaaacctccgtttttatccgcttacaccaggattataaaggaagagtgtgcggattgtgtgggaacttcgatgataacgccatcaacgatttcgcaaccaggtctaggtccgtcgtaggcgacgccctcgagttcgggaacagttggaaactgagcccttcatgtcctgacgccttagctcccaaagacccttgtaccgccaatccatttcgtaaaagctgggctcagaaacagtgttcgatcctccatggccccacatttgctgcatgccggtctcaagttgattctacaaagtattatgaggcttgcgtcaatgacgcctgtgcctgcgattccgggggagactgcgagtgtttctgtactgccgttgccgcttacgctcaggcgtgccacgacgctgggctgtgtgtttcttggcgcacccccgacacatgccccctgttctgcgacttttataacccccatggaggctgcgaatggcactaccagccatgcggggcgccttgcctaaagacatgtagaaacccctctggccattgtttagtggacctgcctggattagaaggctgctaccccaaatgtccaccgtctcaacccttttttaacgaggaccagatgaagtgcgtggctcaatgcggctgctacgacaaagatggtaactactacgacgttggcgctagagttcctacagccgaaaactgccagtcctgtaactgtaccccatcgggtatccaatgcgctcactcactggaagcctgtacctgcacttatgaagaccgtacctactcctaccaagacgtgatttataacactactgatggactcggcgcatgtttaatagcaatttgtggctcaaacggcacgattattcgtaaagctgtggcatgcccgggcaccccagctactactcctttcactttcacgaccgcttgggtccctcactcaaccaccagccctgccctacccgtcagcacagtatgtgtgagggaagtatgtagatggtcatcctggtataatgggcacagaccggagcccggactaggcgggggagattttgaaacctttgaaaaccttaggcaacgaggatatcaagtatgccccgtgctcgccgacatcgagtgtagagctgctcagttgcccgatatgcccctggaggagttaggtcagcaggttgattgtgatcggatgaggggcctcatgtgcgcaaattcgcaacagtcaccacctctttgtcatgattacgagctgcgggtgttatgttgtgagtacgtgccttgtggcccctccccagcccccggcacgtcaccacaaccgtctctgtcagccagcactgaaccagctgtacccacccccacccagactaccgctactgagaagacaaccctgtgggtaaccccatccattaggagtacagctgccttaacatcccagacaggctcaagttccggtccagttactgtgactccttcagccccaggtaccactacctgtcaaccaagatgccagtggaccgaatggtttgatgaagattacccaaagtcagaacagctcggtggcgatgtcgagtcctatgacaagatcagagcagcaggcggtcacctgtgccaacaaccaaaagacatcgagtgtcaggcagaaagctttcccaactggacgctcgcgcaggtcggtcagaaagtccactgtgatgtgcatttcggtctggtgtgccgcaattgggaacaagaaggtgtctttaagatgtgctacaactatagaatccgcgtgttatgctgtagcgatgatcactgccgcggccgagctaccactcctcctccgaccacggagttggaaacagctaccactaccaccacccaagccctcttcagtacaccccaaccaaccagcagccccggtctcacccgtgcccctcccgcctcgaccaccgcagtaccaaccctttctgaaggattgaccagtccccgatacactagcacgctcgggacagccactaccggaggtccaacaactccagccggcagtacagagcctacagtccccggcgtggccacttctaccctgccaacccgaagtgccctgcccggcactaccggatccttgggcacttggcgaccatcccagccccccactctggctccaactaccatggcaactagtcgggctcgtcctacaggaacggcttctaccgcctccaaggagccactgacaactagcttggcacctacattgacctcagaattaagtacctcgcaagccgagacaagtacccctagaactgagactaccatgagccccttgaccaacacaacaacctctcaaggcacaactagatgtcagccaaagtgcgagtggacagaatggttcgacgtggacttccccacctctggcgtagccggcggggatatggagacatttgaaaatataagagcggccggcgggaagatgtgttgggcccctaagagcatcgaatgtagggcagaaaactatccagaagtcagcattgaccaagttggtcaagttctcacttgctctcttgagaccggcctgacctgcaaaaatgaagaccagacaggaagattcaatatgtgctttaattataatgttcgcgtgctttgctgcgatgactacagccactgcccctctacaccagccacatcctctaccgccaccccctcttcaaccccaggaactacatggatcttaaccaagcctacaacaacggcgacaactactgcatcgactggaagcaccgctaccccgacttcgaccctgcgcaccgcccctccacccaaggtccttaccacaactgctaccacgcctactgttactagtagtaaagctacaccctcatcatcccccggaactgctaccgccttgcctgctctccggtccaccgctacaaccccaactgctaccagtgttacaccaatcccttccagcagcctcgggaccacctggacacgcctctctcaaaccacaacgccaacagctaccatgtccaccgccacacctagttccactccagagactgcccacacctccacagtccttaccgccacagccacaaccaccggcgctacaggctctgtggccaccccttcatccacccccggcaccgctcacaccactaaagtgcctacaaccactaccaccggtttcactgcaacccccagctcctcaccagggaccgccttgacaccccctgtgtggatttctacaacaaccacccccaccacccgcggcagcacagtaactccttcatccatacccgggacaacgcacactgcaaccgtgttaactactaccactaccaccgtcgcaacaggaagtatggctactccttccagcagcacacagacttccggaacaacccacaccccccctgtccctaatacaatggccaccactcatggacgaagcctgcccccctcatctcctcataccgtcaggactgcatggacatcagcaacctctggaatcctcggaactacccacataacagagccatcaactgttacgagccacaccctggccgccaccaccggtaccacgcaacattccaccccagcgctgtcgtcaccccacccttcttcacgcacgaccgaatctccacccagccctgggaccactacccccggacatacaaccgctacgagtcgcactacagcaaccgcaaccccttcaaagactcggacctcgacccttctgccctctagccccacctccgccccaataacgacagttgtcactatgggctgcgagcctcagtgtgcttggtcggaatggcttgattactcttacccgatgccagggccttcaggaggcgactttgacacatacagtaacataagagctgccggaggagccgtgtgcgaacagcccctgggactggaatgtcgtgctcaagcccaaccaggcgtacccctgcgcgaactcggacaagtggtggagtgtagcctggatttcggacttgtttgtcgtaaccgagagcaggtaggtaaattcaagatgtgctttaattacgaaattcgggttttctgttgcaattatggacattgtccttcgacccctgctacctcttcaaccgccatgccctcgtctacaccgggaacaacctggattctgactgaactgacaaccaccgccacaactaccgaaagtacaggcagtaccgcgactccatcatctacccccgggaccacatggatcctgacggaaccatctaccaccgctaccgttacagtgccgacgggctccactgctaccgcttctagtactcaggctacagccggcactccccacgtcagcaccaccgcaacaacacccactgtaacttcgtctaaagccactcctttttcctcaccaggcaccgcaaccgccctccctgccctcaggtcaacagcaactacgcccaccgcaaccagcttcaccgcaattcctagctccagcttaggtactacatggaccaggctgagtcaaactacaactcctactgccactatgtcaaccgccacccccagtagcacaccagagacagttcacacctcaaccgtcctaactactacagcgaccactaccggggcaaccggaagcgtcgctacccctagttccacccccggcactgctcataccactaaagttctcactaccaccaccaccggattcactgccaccccgtctagttcccctggaacggcccggactcttccagtttggattagtaccactacaactccaactacacgcggatcaacggtaaccccttctagcatccctggcaccactcacactccaacagttttgaccacaactaccactactgtcgctactggttcaatggccacacccagttcctctacccagacatcaggcacaacccacacacctcctgtgcctaacaccacagcaactactcacggcagatccctgagcccgtcaagtccacatacagttcgtacagcatggacatcagcgacaagcggcacccttggcactactcacattaccgaaccttctacaggcacttcacatacacctgctgccacaacaggaaccacacagcactcaacacccgcactcagctctcctcacccttcctcccgtaccacggagtctccaccctctccaggcactacaacccccgggcacacccgagccaccagccgaacaaccgcaactgccaccccgtctaaaactcgaaccagtacgctcctgccgtcctccccgacttctgcccctattactactgtcgtaacaatgggttgtgagccccagtgtgcctggagtgaatggttggattatagttatcctatgccagggcctagtggcggcgacttcgatacatactctaacatccgtgcagcagggggtgcggtgtgcgaacaacctctgggcctggaatgccgagcccaggcacagcccggtgtgcctctaagagaactcggccaggtagtagaatgtagcctggacttcggactcgtgtgtcgcaaccgagagcaggtcggaaagtttaagatgtgttttaattacgagattcgcgtattctgctgcaactatggacactgtccctctacacctgccacctctagcacagccactcctagcagcacccctggaacaacctggattctcacagagcagaccactgcagcaactactaccgccacaacaggcagcacggcaattccttcaagcacccctggcactgcaccgccccctaaagtccttacgagcacagctaccacgccaacagcaacgagcagcaaggccacctcgtcatccagcccaagaacagctacaacactcccggtactaacctctacagcaaccaagtccaccgccacttccttcacccccatccccagcttcaccctaggaactacaggaaccctccccgagcagacaacaacacccatggccactatgtccactatccatcccagctctacacccgagacgactcacacttcgacggtcctcacaactaaagctactacgactagagccactagcagcatgagcactcccagttcaactcctggcacaacatggattttgaccgaactgactacggccgctacaactactgcagccaccggaccaaccgctacaccaagcagtacacccggcaccacctggatacttactgagccatccaccaccgccacagtcactgtccctaccggatctactgccacagcatcttccaccagagctaccgcaggtaccctcaaagttctaacaagcaccgcgacgactcccactgtcatctcctcacgtgctactccctcatcctcccccggcaccgcaaccgctttgccggctttgcgcagcactgccacaacaccaactgctactagcgttactgctattcctagttcatccctcggaaccgcatggacccgcctctcacagaccacaaccccaaccgcaaccatgtccactgccaccccttcctccactcccgaaaccgtgcatacctctaccgtgctcaccactactacgaccacaacccgcgcaaccggctccgtcgccaccccctctagcacacctggtaccgcccatacaacaaaagtaccaaccaccaccaccaccggctttacggctacacctagctcttcccctgggacagctcttacgcccccggtttggatttctactaccacgaccccaaccacccggggctcaactgtaacacctagctctattcctggaacaactcatacagcgactgtgctaactactactaccactacagtggccacagggtcaatggccactcctagctccagcacacaaacctcaggaactacacataccccccccgtgccaaacacaacagctacaacccacggacgatcactgccgccatcctctcctcacacagtgcgcacggcctggactagtgctacctccggcattctcggcaccacacacatcaccgaacccagtactgtaacctcccatacacccgccgctacaacttccaccacccagcactccacaccagccctgtcttccccacatcccagttcaagaactaccgaatccccccccagtcctggcactacgacccccggtcacacacgcggcacctctcgtaccaccgctacagccaccccttcgaaaactcgtacctccaccctactgccctcatccccaacctcagcacccatcacaaccgtggtaactacaggctgcgagccacagtgtgcctggtcggagtggttggactatagctatcctatgcccggtccctcaggcggagattttgacacctattctaatatccgggccgccggaggggcagtatgcgaacagcctctgggcttagaatgtagagcacaggcgcaaccaggagtccccctgagggagctcggacaggtcgttgaatgctcgctcgactttggattagtgtgccggaatcgtgaacaggtcgggaagttcaaaatgtgttttaactacgagattagagtattttgttgtaattacggtcattgccccagcacgcccgctacatccagtactgccaccccctcatccaccccaggcactacatggatcttgactaaacttaccactactgctacaaccacagaatctacagggtctactgccacacctagttctacaccaggtacaacctggatcctgacagagccttcgacaactgcaaccgtgacagtgcctaccggatctacagccaccgcttcctccactcaagccaccgcaggcacaccccacgtgtcgacaactgcaaccacccccacagtcacatcatcaaaggctactccattctctagtcccggcacagcaaccgctctccccgcgttacgatccacagcaaccacgcccactgccaccagttttactgctatcccctcctcctctctgggcacaacatggaccagactcagccaaacgactacccccactgccaccatgtccaccgctacaccctcctctacacccgaaaccgctcacacttccacagttttgacgacaaccgctacaaccactcgcgcaactgggtccgttgcaaccccgtcatccacacccggcaccgcccacactaccaaagttcctacgacaactactacaggattcacagttacgcccagcagtagccctggaactgctcggactccgccggtgtggatctcaacaacaacaacacccaccacctcaggatccaccgttacccccagctcagtgcccggaacgacacacactcctaccgttcttacaaccaccactacaactgtagcgacaggcagtatggcgacaccttcctctagcacacagacctctggtactacccacacgcctccagtgcccaataccaccgcaaccactcatggccgttccctctccccttcttccccgcacacagttagaaccgcctggacctccgccacttccggaaccctgggaactacacacattacagaaccttccaccggcaccagtcatacacccgccgctactacaggaacaacccagcatagtacacctgcattatcaagcccccatccatccagtagaacaaccgaatcccccccatcaccaggaactacaaccccgggtcacaccacggcaaccagtcgaacaaccgctaccgctacgccttccaagacaaggacttcaacactgctgccatcatcccccacatccgctcccattaccaccgttgtcaccacaggatgcgagcctcagtgtgcgtggtccgaatggttagattatagttatcccatgcctggtccttccggcggagatttcgatacatatagtaacatccgggccgctggaggtgccgtctgcgaacagcctctaggcctcgaatgccgtgctcaagcccaacccggcgtgcctttaggagaattaggacaggtcgtagaatgctctctcgattttggcttggtttgcaggaaccgagagcaggtaggcaagtttaaaatgtgttttaattacgagattcgcgtgttttgttgtaattatggacattgtccctccacaccagctacatccagcaccgcaatgccgtccagcacaccagggactacctggatcctcacagagttaactacaaccgcaacaactacagcttctacaggaagtactgccacacctagttcaacccccggcacagcacctccaccaaaagtactgacctcacctgcaaccacacctaccgccacatcttcaaaggcaaccagcagctcgtccccccgcacggccactaccctgcccgttcttacatcaaccgccactaagtctaccgctacttctgtcacccccatcccgtcctccacactggggacaaccgggacacttccggaacagactaccacccctgttgccaccatgtctacaattcatccttccagtacccctgagactactcatacttccactgtccttactaccaaagctaccaccacccgggccacgagcagcacctcaaccccctcatccacacccggaaccacctggattctgactgaactgaccacagccgccacaaccactgcggctactggacccacggcgactccctcatcaactcctggaacgacctggatcctgacagaactcactactaccgcaaccacaacagcctctaccggatctaccgccaccccgagctccactcctggcacaacatggatactaacagagccctccacgacagccacggtgaccgtccccacaggttccaccgccaccgccagctccacccaggctacagccggcactccccacgtttccacgactgccacaactccaaccgttacatcctctaaagctacacctagcagctcacctggaaccgccaccgccctgcccgccttgcgcagtacagcaaccacccccaccgccacatcttttaccgcgattcctagttcttctctgggcaccacatggacccgtctgtcccagaccacaacaccaaccgcgacaatgagcaccgcaactccatcatccactcccgagaccgtccacacctccaccgtacttacagcaaccgccaccaccacaggtgctaccggtagcgttgctacaccctcttcgactcccggtactgctcatactactaaagttccgactacgaccacgaccggcttcactgccactccgagctcctcaccaggcaccgccctcacacccccgactacaacaccaatgtctactatgtcaacaatccataccagtagcacgcctgaaacaacgcacacctctaccgttttgactactacggcgacaatgactagggccacaaactccacagcaaccccgagcagcacactaggcactacacgaattttgactgaacttaccacgaccgccactactacagcagcgaccggatcaacggccaccctctcctctacaccagggaccacatggatactcacagaaccttctacaatcgcaaccgtaatggtccccactggctcaaccgccacagcatcatctaccttgggtactgcacacacccctaaggtcgttactacgatggccacgatgccaactgccaccgcttcgacagtaccatcctcatctacagttggtaccacgcggacccccgccgtcttgccatcgtccctgccaacattctcagtctctaccgtgtcctccagtgtcctcaccactctccgccctacaggattccctagttcacacttctcaacaccatgtttctgtcgcgcctttggccagttctttagtcccggagaagtgatatataacaaaactgacagagctgggtgtcacttctatgctgtgtgtaaccaacattgtgatatagataggttccaaggcgcctgtccaacaagcccccctccggtgtcttccgccccattgtcttcgcctagcccagcaccgggctgtgacaacgctatcccattgcggcaagtgaacgaaacttggactctggagaactgcaccgtggctcggtgtgtcggtgacaacagagtggtccttctcgatccaaaacccgtagctaatgtaacatgtgtgaacaagcatctgcctattaaggtatcagatccttcacaaccttgtgactttcattatgagtgcgagtgcgaatgtgtcggcggacgtggaattacaccaggcgcaggaatatgttcgatgtggggtggttcccactactcaacatttgacggaaccagctacacatttagggggaactgtacctacgtactcatgcgggaaatccacgcacgattcggcaacctctccttatatctggataaccactattgcactgcaagcgcgactgcagcggccgccagatgcccaagggcactgtctatccactataagagtatggacatcgtgcttactgtcactatggtgcacggaaaagaagaaggtttaatcctattcgatcagattccagtctcaagcggcttctcaaagaacggcgttctggtttctgtgctggggactacgacaatgagggttgacatcccggcccttggggtttctgtgacattcaacggccaagtgtttcaggctagactgccctattctctctttcacaataatactgaggggcagtgtggcacttgtaccaataaccaacgcgacgattgtttacagcgagatggcacaaccgctgcgtcttgtaaagatatggccaaaacatggttagtaccagattcaaggaaagatggatgttgggcccccactggcaccccccctacagcctcacctgccgcccctgtttcctccacccccacccctactccctgcccccctcaaccattatgcgacttgatgttgagccaggtttttgcggagtgccataatcttgtcccccctgggcctttttttaacgcctgcatcagcgatcattgtcgcgggcgactggaagtcccatgccagagtttagaagcctatgcagagctgtgtcgagcgaggggcgtgtgctctgattggaggggtgccaccggcggcctctgcgacttgacgtgcccaccaaccaaagtctataaaccctgtggacccattcagcccgcaacatgtaatagccgcaaccaatctccccaactggaaggtatggcggaaggctgtttctgcccagaagaccaaatactgtttaatgcccatatggggatttgtgttcaggcatgcccatgcgtcgggcctgatggttttccaaaattccccggtgaaaggtgggtatctaattgtcaatcttgtgtatgtgatgaggggagcgttagtgtacaatgtaaacccttgccctgcgatgctcaaggccagcccccaccttgcaacagacccggatttgtgacagtgaccagaccaagagccgagaacccctgttgcccagagacagtttgcgtctgtaatactactacgtgcccccaatcgttacccgtctgcccgcccggtcaagaatccatctgtactcaggaggaaggtgactgttgcccaacctttcgctgccgaccccagctatgttcatacaatggaactttctatggcgtgggcgctacatttccaggagcactgccctgccacatgtgtacctgtttatcaggagacacccaggatccaaccgtacaatgtcaagaggatgcatgtaacaatacaacttgcccgcaaggcttcgaatacaaacgggttgccggtcagtgttgcggggaatgtgtgcagacagcttgcttaaccccagatggacagcccgtgcaactgaatgaaacctgggtgaacagccacgttgacaattgtacagtctatctatgcgaggcagagggaggcgttcatctcctcaccccacaacctgcctcatgcccagacgtcagcagttgtagagggtcccttaggaaaaccgggtgttgctactcatgcgaagaagatagctgccaagtgagaattaacactacgatcctttggcaccagggctgcgaaacagaggtgaatatcacgttttgcgagggctcttgtcccggtgcatctaagtactccgctgaagcacaggccatgcagcaccagtgtacatgctgtcaggaacgaagagttcatgaggagaccgtgccccttcactgtcccaatggatctgctattctccacacatatacacacgctgtccaggtactctgcggtcttttggcgtggggcctgcaagctggagggcacattcggggcgcagtacaggaccctcagcagcccttaaaggaccaggaagcttcaggtaaggcgaggcagggtggaggatatcgccaaaccgtggcctggggtgataaatcaaacgcacgtgcctggctccagaaacctgtggtttgggtccagtccggtgcatttccaactcccggccctgcgtcagccttatgtccttggtag

SEQ ID NO: 128614 - DNA, 17298 bp, Artificial Sequence
  derived and/or modified sequence
atgggagccccctctgcgtgtcgtacactggtactcgctcttgcggccatgctggtcgtcccacaggccgagactcagggtcctgtggagccaagttgggagaatgcaggtcacactatggatggcggcgcccccacctcctctccaacccgtcgcgtcagcttcgtccctcccgttaccgtttttcctagtctctcccccttgaatccagcccacaacggcagagtttgtagtacttggggagactttcattacaagacctttgatggagacgtgttccgctttcccggcctatgtaattacgttttctccgagcattgtcgggccgcatacgaggactttaatgtccagctgagacggggactggtcggctcgaggcccgtagtgactcgcgtggtcataaaagcacagggcctcgttcttgaagcatccaacggatccgtgttaataaatggccagagggaagaactgccgtattctcggactgggctgctggtggaacagagcggtgattatattaaggttagtattcgtctggttctaacatttttatggaatggcgaggattcagcattattagaactagaccccaaatacgctaaccaaacatgtggtctgtgcggagattttaacggattaccagccttcaatgaattctatgcacacaacgctagattaacccccctgcagtttggaaatttacagaaactcgatggtcccaccgaacagtgcccagacccgctgcccctgccagccggaaattgtactgacgaggaaggcatctgtcacaggaccctgctggggccagcatttgcagaatgccacgccttagtcgactctaccgcctatttggccgcttgcgcccaggatctatgtcggtgccccacatgcccctgcgccacctttgtcgaatatagcagacagtgcgctcacgccggcggccaacccaggaattggcgctgcccagaactttgcccacgcacgtgcccactgaacatgcaacatcaggaatgtggatcaccatgcaccgacacctgttctaaccctcagcgagcgcagctctgtgaagaccattgcgtcgacggatgtttttgccccccaggaaggtcttgcaccgtactggatgatattacacatagcggctgcctcccactggggcagtgtccatgcacgcatggcgggcggacctatagccctggcacatcttttaacaccacatgttcttcttgcacttgttccgggggtctgtggcagtgtcaagatctcccttgtcccggcacttgctctgtccaggggggcgctcacatcagtacgtatgatgaaaaactctacgatctgcacggcgattgttcctacgttctttccaagaaatgcgcagacagcagcttcactgttctagccgagttacgtaagtgtggactgaccgataacgagaattgtctcaaggcagttacactgagcctcgacggaggggatactgccatccgagtccaggcggacggaggtgtattcctcaatagcatctacactcagctccctttgtccgcggctaatattacgctctttacccctagttcgttctttatagtggtacaaactggtctgggattgcagttactcgtccagctcgtgcccttaatgcaggtgtttgtgcgattagatccagcgcatcagggccagatgtgtggcctctgtggtaactttaatcaaaaccaggctgacgattttaccgctcttagcggagtagtagaggcaacaggagccgccttcgctaacacttggaaagcacaagctgcttgtgccaacgccagaaatagttttgaggatccctgtagcctgtctgtggagaacgagaactacgctagacattggtgctcccgactaaccgaccccaactctgctttctcccgctgtcactcaattatcaatcctaaaccttttcatagtaactgtatgttcgacacctgcaattgcgagaggagcgaggactgtctatgcgcagctttgagctcctacgtccacgcatgcgctgccaaaggagtccagctttctgattggcgcgacggcgtgtgtacaaagtatatgcagaactgccctaagtcccaacgttatgcgtatgtggtcgacgcctgtcagcccacctgccgcgggctctcagaggcagacgtaacctgctcagtaagtttcgtgccagtggatgggtgcacatgccccgcaggcaccttcctgaatgacgccggtgcatgtgtcccagctcaggaatgcccttgctatgcccatggtacagtgcttgcccccggtgaagtggtccacgatgaaggtgccgtttgttcctgtacaggagggaagctctcatgtttaggggccagtttgcaaaaaagtaccggctgtgccgcacctatggtgtatctggactgctcaaactcatctgctggtacaccgggagcagagtgcctccgcagctgtcataccctagatgtgggatgcttttctacccactgcgtctccggctgtgtctgtccgccaggccttgtttctgacggctctgggggctgtattgctgaagaagactgtccttgcgtccataacgaagctacctataagcccggcgagaccattcgcgtggactgcaatacatgtacttgtagaaatcgtcgatgggaatgctcccaccgcttgtgcctggggacatgcgtcgcctatggcgacgggcacttcattacatttgatggcgataggtactccttcgagggctcttgcgaatacattctcgcccaggactattgtggtgataataccactcacggcactttccgcatcgtgaccgaaaacatcccatgcggcacaacaggaaccacttgctcgaaggctattaagctgttcgtagaatcgtacgagcttatactacaggaaggcacatttaaagcagtcgctcgaggacccggtggcgatcctccctataagatcaggtatatgggaatcttccttgtgatagaaacccacggcatggctgtcagttgggatagaaagacttctgttttcattcggctccaccaggattacaagggtagagtttgcgggttgtgcgggaatttcgatgataacgctattaacgatttcgccacacgaagtcgatccgtggttggcgacgccctcgaattcggcaacagttggaaacttagtccttcttgcccagacgctctcgctcccaaagatccttgcaccgctaacccattcagaaagtcatgggctcagaagcaatgcagcattctacacgggcctacgtttgcagcctgtagatcccaagtagattccacgaaatactatgaagcatgtgtgaacgatgcctgtgcctgcgacagtggtggagattgcgagtgcttctgtacagccgtcgctgcatacgctcaagcatgtcatgatgctgggctctgtgtgtcatggcggacacctgatacctgtcctctgttctgtgacttctacaacccacacggcggatgcgaatggcactatcaaccatgtggcgctccctgcttgaaaacttgccggaatcccagcgggcactgtttggtcgaccttcccgggctcgaagggtgctatccaaaatgtccaccctcccaacccttcttcaatgaagaccagatgaaatgtgtcgcacagtgtggctgctacgacaaggacggaaactactacgacgtcggggccagagtacctaccgctgaaaattgccagtcatgcaactgcactcctagtggaatccagtgcgctcattctttggaggcctgtacatgtacctacgaagatagaacctacagctaccaagacgttatttacaacacgactgatggcttaggagcctgcttgattgccatatgtgggtccaacggaacaattatcaggaaggccgtggcatgccctggtacgcctgctactacaccatttacctttactacagcatgggttccacattcaaccacgtccccggctttaccagtgagtaccgtctgcgtgcgcgaggtgtgccgttggagctcatggtataatgggcatagacctgaacctggattggggggaggagacttcgaaacattcgaaaaccttaggcaaagaggataccaagtctgtccggttttagccgatatcgaatgccgcgccgcacagttgcccgatatgcctctggaggaattgggtcagcaagtggattgcgaccgcatgcgcggcttaatgtgcgccaatagccaacagtccccaccattgtgtcacgattatgaactccgcgtcctctgctgcgaatacgtaccatgcggaccctctcccgctcccgggacctctccccagccttccctcagcgcctccacagaacccgccgtgcctacgcctactcaaacaacagccactgagaagaccacattatgggtcaccccctccatccgctctacagccgccctgaccagccaaacaggctctagctccggacctgtaacggttacacccagcgcccctgggacaactacctgccagccccgctgccagtggaccgagtggttcgatgaggactacccaaagtctgaacaactcggcggagatgtggagtcgtacgataagattcgagccgcaggtggccatctttgccaacagcctaaagacatcgagtgtcaagccgagagttttcccaactggacgttagcacaagtgggtcagaaagtgcattgcgatgttcacttcggtcttgtatgtcgcaactgggaacaggagggtgtgttcaagatgtgttataactacagaattcgagtgctttgttgcagcgacgatcattgtcggggccgtgcaactacccctccccccacgaccgagcttgagacagcaacaactaccaccacccaggccttgttttccaccccccaacccacctctagtcctgggctgacaagagccccccccgccagcactaccgcagtacccaccctctcagaggggctgacttcccctagatatacctccaccctaggcacagcaacaaccggaggacccaccacacctgccggtagtacagaaccaactgtgccaggggtcgccacctccactctgcccacacgtagcgctctcccaggtacgacgggcagccttgggacctggagaccctcacaacctcctactcttgcgcctaccacaatggctaccagtcgcgcaaggcccacaggaacagcaagtactgcatcgaaggagcctctgactacgtccctggcaccaactttgacttcagaattatccactagccaagccgagacatccactcctcgtacagagacaaccatgtcccccttgaccaataccactacatcccagggcactactagatgtcagccgaaatgcgaatggacggagtggttcgacgtagatttcccaacatctggtgtggccgggggggacatggaaaccttcgagaatatccgagccgcgggcggtaaaatgtgttgggctcccaaaagcatcgagtgccgagccgaaaactatcccgaagtgtcaatcgatcaagtggggcaagttcttacatgctctttagagactgggctaacctgcaagaatgaggatcagacaggtcggttcaatatgtgctttaattataacgtaagagtactatgttgtgatgactattcacactgccctagtacacctgcaacttcaagcaccgcaaccccgagtagcaccccaggcaccacttggatactgactaagcccacgaccaccgccactaccacagcctctaccggctctacagccaccccgacttctacactccggaccgccccacctcctaaagtactgacgacaaccgccaccacccctacagtcacaagttccaaagccacgccctcctcgagcccgggaacagctacggccctgcccgccctccgatctactgccacaactcccaccgcgacctcagttacgccaatcccctcttcatccttaggcaccacatggactaggttgagtcagacaactactcctaccgccacgatgtctacagctacaccatcatcaacaccagagacagcccatacttctacagttctgaccgcgaccgccacgactaccggcgcaaccggctcagttgcaacaccctcatccacccctgggacagctcatacaactaaggtcccaacgactaccactacaggctttacggctactccatcctcctcacccggcaccgctttaacccctcccgtgtggatcagtactactaccacacccaccactcgtggatccactgtgactccttcctccatccctggaactacccacactgctacagttctgaccacgacgacgactaccgtggccaccggcagcatggccactccatctagctcgacgcagacttctggcacgcccccatccctgaccacgaccgcaaccacaattacagcaaccggatcaactactaatccttcctccactcccgggacgacacccatccctccagttttaactacaacagccaccacacccgcagcaactagtaacaccgtaaccccttcctctgctctaggcactacccatacaccccccgttcccaacaccatggctactacccacgggcgctctctccctccatctagcccacacactgtcaggaccgcatggacctctgccacttccggaatcctgggtactacacatattacagaaccaagcaccgtgacttctcataccctggccgccaccactggaactactcagcactcaacacccgctctgtcttcgccacatccatcatctaggaccactgaaagccccccaagtccgggaaccactactcctggccataccaccgctacttcacgaacaaccgcaaccgctacaccatccaagacacggacctcaaccctattgccgtcttcccccacctccgcccctatcacaacggtagtgactatgggatgcgaaccccaatgtgcttggagcgagtggttagactacagttatccaatgcccggtccctccggaggagatttcgatacttatagcaatattcgcgcagcgggaggtgcagtgtgcgaacagccattgggtctggaatgtagagctcaggcacagcccggggtacccctccgggaacttgggcaggtggttgagtgttcgttagacttcggactggtatgtagaaacagggagcaagtcggcaagtttaagatgtgcttcaattatgaaattcgagtgttctgctgcaactatggtcactgtccatctactccggcaacttcctctacagccatgccatcctctactcctggcactacttggatattaaccgagctgacaacgacagccacgactactgaatctactggttccactgcgacaccctcttctactcctgggacaacttggatacttactgaaccatccaccaccgcaaccgtaacagtccccaccggatccaccgccacagctagcagtacacaggcaaccgctggtaccccacacgtgagtactaccgccacaacccccactgtgacaagttcaaaggccactccgttttccagtcccggaactgccactgctttacccgcgctacgctcaacagcaactacacctacagccaccagtttcactgctattccctcctcttctttgggcacaacttggacccgtctttctcaaaccactacccccaccgcaaccatgtccactgctaccccatcctctactcctgaaaccgtgcacacttcaactgtattgacgaccacggctacgaccactggagctaccggctccgtcgcgaccccatcctcaactcctggaactgcccacacgaccaaagtgctcactaccaccaccaccggttttaccgccactccatcctcttctccaggtacagcccggacgctccctgtgtggatctctacgactaccacccctacaacccgcggatcaaccgttaccccaagttctattccaggcaccacgcacactcccactgtcttgactacaacgaccaccaccgtagcaaccggttctatggccacaccctcctcttctacacaaaccagcgggacgcccccctccctcaccaccacagctaccactatcaccgctactggctcaacaacgaatccttcatctacccccggtacaactcccattcctcctgttttaactaccaccgccacgacacctgcagctaccagcagcactgtgacaccttctagcgctttgggaactacacacacccctccagttccgaacaccacggccactacacacggtcgaagtctgtccccttcatcccctcacactgttcgcactgcctggacatctgcaacatctggaaccctgggcacgacacatatcacagagccttctactggaacctcccacacgcctgccgccactacgggcacgacacaacactccacacctgctctaagttccccccatcctagctcccgtaccactgagagtccccctagccccggtacgacaacccccggacacacccgtgcaaccagcaggaccaccgccaccgccactccaagcaaaactcgaacatcaaccttacttccttccagtccaacatcagctccaataaccaccgtggtcacaatgggctgcgaacctcagtgtgcttggtccgaatggctcgactactcttaccccatgcctggcccttccggtggcgactttgatacttattcaaacatcagggccgccggaggcgcagtgtgtgaacaacccctcggcctcgaatgtcgggcccaggctcaacccggagtccccttacgcgaactgggccaggtcgtagaatgcagcctagattttggactggtgtgcagaaaccgggagcaggtgggtaaatttaaaatgtgttttaactatgaaattagagtgttttgttgtaattatggacactgcccaagcacgccggccacctcttctactgcaactccatctagcacgcctggaaccacttggattctcactgagcaaactacagcggcaacgacaacggccaccaccggatctaccgctatccccagtagcactcctggcaccgcacccccccccaaggttcttacatctaccgcaaccacacccactgccactagctctaaagcaacaagttcatcttctcctcgtacagcaacaaccctgcccgtcctaaccagtactgccacgaagtctacggctacatccttcactccaatcccatcctttacattaggcactacaggcaccctacccgaacagactaccacccccatggctacaatgtctactatccacccctcaagtacccccgaaaccacacacacttccaccgtgctgacaacaaaggctaccactacacgggccacctctagtatgtcaaccccaagctctacccctggcacaacatggatcttaacagagctaacgaccgccgccacaactactgccgccaccgggccaacagctactccttcatcaacccctgggacaacttggatattaactgagccttctactacggccacagtcactgtacctactggatctaccgcgaccgcatcttctacccgtgccacagccgggacgttaaaagtgctcacctcaaccgccacaacccccaccgtgattagctctcgtgccacaccctcatcctccccaggtaccgcaacagcacttccagctttgagatcaacagctacaaccccaaccgccacctccgtgacagccattccctcctcctctttaggtactgcctggactagattgagtcagaccaccactcctacggctacaatgtcgacagctactccctctagcaccccagaaaccgtccatacttcgacagtcctcaccactaccacgactaccacgcgggctaccggaagcgtagccaccccatcctcaacccctggtaccgcacacacaacaaaagttcccacaacaacgaccaccgggttcaccgccaccccatcttctagccccggaacggccctaaccccaccagtatggatttcaaccaccaccacccctaccacacgcgggtcaactgtgacgccaagctctattcctggcactactcacacagctacagtgctcaccacgactacaacaacagttgctacaggctcaatggccaccccatcttcgagtactcaaacttctgggactcccccaagtctaaccacaactgcgacaacaatcacagctaccggatccaccacaaacccgagtagcacaccaggtactactcccatcccacccgttctgactactacagcaaccactccagccgcgacctcaagcaccgtcacaccatccagcgcactcggaaccactcacacacccccagttcctaacaccacagcaactacacacggaagatctctgcccccttcatcaccccacacagttcgaacagcttggacctccgccactagcggcatcctaggtacaacacatattaccgaacctagtactgtcacctcccacactcccgcagccacgacgagcactactcagcatagcacgcccgcactttcttcccctcatccatcctcccggaccacagaaagcccaccttcaccaggaacaaccacaccagggcacacccgcggaacctcaagaacgaccgcaactgccactccaagcaagacacgaacgagcaccctgcttccttcctcccccacgtccgctcctatcactactgtcgtcactaccggctgtgaaccccagtgcgcctggagtgaatggctcgactatagctaccctatgccaggccctagtggcggcgactttgacacttacagtaacattagagctgcgggaggggctgtgtgcgagcaacctttaggcttggagtgtcgggcccaggcccagcccggcgtccctctgcgcgaacttggccaggtggtggagtgtagcctggacttcggacttgtctgccggaatagagagcaagtcggcaaattcaagatgtgtttcaattacgaaatcagagtcttctgctgtaactatggacactgtccctcaacacccgcaacatcgtcaactgctacgccttcctctacacccggaactacatggatcctaacaaaactgacgacaaccgcaactacaacagagtctacaggtagcaccgccacaccatcatccacacctggtacgacctggatccttactgagccttcaaccacagccaccgtaacagtcccaaccggctccaccgctactgctagttcaactcaagcaacagcaggtactccccatgtgagcaccactgccactactcctaccgttacaagcagcaaagccacgccattctcttcccctggaacagccacagcactacccgcccttaggtcaacagctaccacgccaaccgccacctcattcaccgctatcccctcttcctccctgggaaccacctggacacgactgtctcagaccaccacacctacagctactatgtccacagccactccgagcagcacccccgaaacagctcataccagtaccgtgctgaccacaaccgccaccactactcgcgccaccgggtccgtggcgaccccttcatcgacacctggcacagcccataccactaaagtcccgaccacgaccaccacaggattcacagttactccctcatctagccctggcacagcgcgcactccgccagtttggatttccaccacgactactcccaccacttcaggtagcaccgtcactccgtcttctgtgcctgggacgacccacaccccaacagtccttaccaccacaacaactaccgtggctacaggaagcatggcgacacctagctcctccacccagacatccggcaccccaccttccctaattaccaccgcaacgactattaccgcaactggctcaacgaccaacccctcctctactccaggcacaactccaattcccccggtcctgacaactacggctaccacccctgccgccacatcctcaacagtcacaccatcctctgcactcggaacaacacacacgccacccgttcctaataccaccgctaccacacacggccgaagcttgtccccctctagcccacatactgttaggacagcctggacttcagcgacttctgggaccctaggaaccactcatatcacagaaccatctaccggaacctcacacactccagccgctacgactggaaccactcagcactccacaccagccctgtcctccccccacccttcaagtcggacaacagagtcaccgcccagcccaggaaccacaacccccggccacaccactgccacttctaggacaaccgccaccgcgactccttcaaaaactcgtacaagcaccttgctcccctctagccctacatccgctcctattactactgtagtgaccaccgggtgcgaaccccaatgcgcgtggagcgaatggctagactattcttaccctatgccaggacctagtggaggtgatttcgatacatacagtaatatacgtgcagcaggaggcgccgtctgtgagcaacctctcgggcttgaatgtagagcccaggcccagccaggggtgccattaggcgagctggggcaagtggtggaatgcagccttgactttggactagtgtgtaggaatagagagcaagtcggcaaatttaaaatgtgcttcaattatgagattcgagtgttttgttgcaactatggccattgcccttctacccccgcgacgtcatcaaccgccatgccatctagcacccccggaacaacctggattctgacagaactgaccacgacagccacaactactgcgtccactggttctaccgcaactccgtctagtacgcctggaacggcaccccctcctaaagtgctcactagcccagccaccacaccaacagcaacctctagcaaggcaaccagctcaagctcaccgcgaaccgccactaccctccctgtactgacatccaccgcgacgaaaagcactgcaacatccgtcactcctattccatccagcactttgggtacaacaggaactctgccagaacagaccaccacacctgtggccacaatgtccacaattcacccttctagcactcctgaaacgactcacacctcaaccgtgctgactactaaagctactacgactagagccacctcctcaactagcacgccctcctccacccctggaactacctggattctcaccgaacttactacagccgcgaccaccacggctgccaccggccctacagcgacccccagtagcacccctggaacaacctggattctcaccgaactgacaaccaccgccaccacgaccgctagcaccgggtccaccgccacaccgtcatcaactcccggcactacctggattctaacagagccatccaccaccgccacggttactgtgcccacagggtccacagcaactgcgagcagtacccaggccaccgcaggcaccccacatgtctcaacgaccgccactacacccaccgtcaccagctcgaaagcaaccccatctagttccccagggaccgccaccgccttaccagcactgagatcaaccgccactacccccacagccacatccttcacagcaatccctagctcctccctgggcaccacttggacccgtttaagccagactacaaccccgacagcgactatgagtaccgccaccccttcctcaacccccgagactgttcatacctccaccgtgctaaccgccactgccaccaccacgggcgctactggctccgtggcaacaccaagctctacacccggcacagcgcatacaaccaaagtgcctaccaccaccacgacaggatttacagccacaccatcgtcttctcctggaacggccttaacacccccagtttggatatctacaactacaacacccacaaccacaactcccacgacttccggctccacagtgacacctagctctatccccggtactactcacacggcccgagtcctgacaactacaaccacgactgtggctaccggctcgatggccactccctccagctccacacagacttctggaaccccaccatctttaaccaccaccgccaccacaattaccgcaactggatcaactaccaaccctagttccactcccggtacaaccccaatcacaccagttctgacatcaactgcaacaactcctgccgccacctctagcaaagccacaagcagtagctcccctcgcacagccaccaccctaccggtcctgacatcgacagcaactaagtctacggccacctccttcacacctatcccctcttcaaccctttggacaacttggaccgttcctgcccaaaccacaacaccaatgagtacaatgtccacaattcatactagtagtacaccggaaactacccacacatccaccgtcctcacaacgactgcaactatgacacgcgctactaatagcactgccactccctcctcaacattagggacaactcgtattttgactgagctcaccaccaccgcaacgacaacagctgcaacaggatccacggccacattatcctctacacccgggactacctggatcctcacggagccctctaccattgcaactgtcatggttcctactggttcaaccgccacagcctcctcaaccttgggcactgcccacacccccaaagtagtgactactatggccacgatgccaacagcaaccgcttcaaccgtaccatcctcaagcactgtaggtactacgcgtacccctgctgtgctgccttcctcgctccctactttttccgtctcaaccgtatctagcagtgtcctgactaccctccgcccaaccggatttccttcttcacactttagcaccccctgtttctgtagggcttttggtcagttcttctctccaggcgaagtcatatacaataagaccgatcgcgccggctgccatttttacgctgtctgtaaccaacactgcgacatcgacagattccagggggcttgccccactagtccaccccccgtctccagcgcacctcttagctcccccagtcctgctcccggttgcgacaacgctatccccttgcggcaggtgaacgagacctggactttagaaaattgtaccgtcgcccgttgcgtgggtgataatagagtcgttttgttagaccctaaaccagtcgccaatgtgacatgcgtgaataagcacctgcccattaaagtctccgaccccagccaaccatgcgattttcactatgaatgcgagtgcatctgctctatgtggggagggtcccactattccacctttgatggcacctcctacactttccgcggcaattgcacttacgtgttaatgcgggagatccacgcccgttttggcaacctgagtctgtacctggataaccactattgtaccgcgtccgccactgctgccgccgcaagatgtccccgcgccctatctattcattataagagcatggatatcgtgcttactgtgaccatggttcatgggaaggaggaaggcctaatcctttttgatcagattcctgtctccagcggcttctccaagaacggagttctcgtgtctgtattagggaccacaaccatgcgcgttgatatccccgctttgggagtttctgtcacattcaacggccaggttttccaagcaagactgccctactccttgtttcacaacaataccgaaggacagtgcggtacatgcacaaataaccaacgcgacgattgcctgcagcgggacggtaccacagctgcttcgtgcaaggatatggcaaaaacatggctagtccccgattcccggaaagatggatgctgggcacctaccggtacaccaccaacagcaagcccagccgctcccgtatcctccacacccactccaaccccctgcccaccccagcccctctgcgacctgatgctttcccaggtctttgctgaatgccacaatctcgttcccccaggacccttctttaacgcatgcatatccgatcactgccgcggacggctggaggtaccatgccaatcattagaggcttacgcagagttatgcagagccaggggtgtgtgttctgattggcgcggcgctacaggtggactttgtgatctgacgtgcccccccactaaagtgtataagccctgcggacccatacagcccgctacttgcaattctaggaatcagagcccgcagctggagggcatggctgaaggctgcttctgtccagaggatcagattctgtttaacgcccacatggggatctgcgtgcaagcctgcccctgtgtaggtcccgacggctttccaaagtttccgggtgagagatgggtgtcaaattgccaaagctgtgtgtgtgacgaaggttccgtgtccgttcaatgtaagcctctcccatgcgacgctcagggacagcccccgccctgtaatcgacccggctttgtaacagtgacccgacccagagctgagaacccctgttgtcccgagaccgtgtgcgtgtgtaatactacaacctgccctcagagtctgcctgtgtgcccaccaggacaggaaagcatttgtacacaagaagagggcgattgctgccctaccttcagatgcagaccccagctatgttcttacaacgggaccttctatggagtgggagctactttccctggggcactcccatgtcacatgtgcacatgcctgagcggtgacacccaggaccccaccgtccaatgccaggaagacgcatgcaacaatacaacttgtccacaagggttcgaatacaaaagggttgcaggacagtgttgtggcgagtgcgtgcagaccgcttgtctgacaccagatggacagcctgtccaactgaatgagacttgggtgaattctcacgttgataactgtactgtttacctatgcgaggcggaaggaggtgtccatttactaaccccccagccagcctcatgccccgatgtgtcttcttgccgcgggtcactgagaaagaccggttgctgctattcctgtgaggaggattcctgtcaggtgcgaataaacaccaccattctatggcaccaggggtgtgaaacggaggtcaacattactttttgtgaagggtcttgtcctggagcttccaagtacagtgctgaggctcaagcaatgcagcatcagtgcacatgctgccaagaaaggagggtccacgaggagactgtcccccttcattgtcctaatgggtccgctattttacatacatacacccacgttgacgagtgcggttgtacccccttttgtgtccccgctccgatggctcccccacatacccgcggatttcctgcacaggaagcaacagcagtctag

SEQ ID NO: 128615 - DNA, 17289 bp, Artificial Sequence
  derived and/or modified sequence
atgggtgccccatcagcctgtaggacccttgtcttagccttagcagctatgctcgtcgttccgcaagcggagactcagggaccagtggaaccaagttgggagaatgctggccacactatggacggtggtgcacctacctcgtcccctacccgccgcgtgtcttttgtgcctcccgtgaccgttttcccatccttaagccccctcaatccagcacacaatggcagggtgtgttccacttggggagacttccattataagacttttgatggcgatgtgttcagattccccggcctgtgtaactatgtgttcagcgagcattgtcgcgcagcctatgaggacttcaacgtgcaattaaggagggggcttgttggcagtcgtcctgtggtcacaagagtagtcataaaggcccaaggcttagttctcgaggccagcaacgggtcagtgcttattaatggacagagagaagaactcccctattcaagaaccgggttattagtagagcagagcggtgactacatcaaagtatcaatccgtctagttctcaccttcctctggaatggcgaagactctgctcttctggaactggatcctaaatacgcaaatcaaacatgtggactttgcggagattttaacggcttacctgcatttaatgaattttacgcacataatgccagattgaccccactgcagttcggaaacttgcagaaattagatggccccaccgagcaatgtccagaccctttacctttaccagccggcaactgcactgacgaggaaggcatctgccaccgcacgctacttggtccggctttcgcggaatgccatgctttggtggacagcactgcttatctggctgcatgtgcccaagacctgtgtcgttgcccaacatgtccttgcgccacgttcgtcgaatatagcagacaatgtgcgcacgcaggtggacagcctaggaactggagatgccccgagttatgcccaagaacctgtcctttgaacatgcagcatcaagagtgtggctctccttgtactgacacgtgctccaatccgcagcgggcacagctatgtgaggatcactgcgtggatggttgtttctgcccacccggaacagtccttgacgacattactcattccggttgtctccccctcggccaatgtccatgcacacatggcggaagaacctacagtcctgggacttctttcaacaccacatgctcttcgtgtacttgctcaggtggtttatggcagtgccaagatctcccatgccctggcacatgtagcgtgcaaggaggggctcatataagtacctatgacgaaaaactgtatgacttgcacggcgattgctcatacgtgctgtccaaaaagtgtgccgatagttctttcactgtactagcagagctgagaaaatgtggtctgactgacaatgaaaactgcctgaaagcggtgactctgtcgcttgatgggggtgatacagccatacgggtccaagctgacggcggagtgtttctgaattcaatctatactcagttacctttaagtgccgctaatatcacactatttacaccttcctctttctttatagtcgtccaaacaggactgggtctgcaattgctcgtccagctcgtccccttgatgcaagtctttgttagactggaccccgctcaccagggacaaatgtgcgggttgtgtgggaatttcaatcagaaccaggctgacgatttcacagcactgtcaggagttgtggaggctacaggtgctgctttcgctaacacatggaaggctcaagctgcctgcgccaacgcccggaatagtttcgaggacccgtgctctttatctgtcgagaatgagaattacgctcgacattggtgttcgcgcttgaccgaccccaacagtgctttctcaaggtgccactcaattatcaacccaaaaccttttcattccaattgtatgttcgatacctgtaattgtgagcggagcgaggattgtctgtgcgcagcattgagcagttacgtgcacgcctgcgctgccaaaggagttcagctgagtgactggagagatggcgtttgtactaaatatatgcagaattgtcccaaatcacagagatatgcctacgtcgtggatgcttgtcagcctacgtgtagaggcctctctgaggccgacgtcacctgttctgtatcatttgtgccagtagatggctgtacatgtcccgctggaaccttcttaaacgatgccggagcctgcgtccccgcccaagaatgcccctgttacgcgcacggaaccgtgctggctcctggagaggtagtgcacgacgaaggagccgtatgctcctgtacaggtggcaagttgtcttgtctgggagcctcgttgcaaaagtcaactggatgtgccgcacccatggtgtacttggattgcagcaactcatctgctggcactcccggcgcagagtgccttagatcctgccacaccctggatgtggggtgtttttctacccattgcgtttcgggttgtgtgtgtcccccgggcttggtttccgacgggagcggagggtgcatcgctgaagaggactgcccctgtgtacacaacgaagctacctataaacctggagagactatcagagttgattgtaatacctgtacatgtcgtaatcgccgctgggagtgcagtcatcgtctctgcctgggcacatgtgttgcatacggggatgggcacttcataacattcgacggagatcggtacagcttcgaaggatcttgcgagtatatcttggctcaggattattgtggcgacaacacgacgcatggcacgtttaggatagtgacggagaatattccgtgtgggacaaccgggacaacctgtagcaaggccatcaaactttttgtggaatcctacgaattgatcctccaggaaggcaccttcaaagccgtagcgcggggacccggcggggatcctccttacaagattagatacatgggaatcttcctagtgattgagactcatggtatggctgtttcttgggatagaaaaacatccgtgtttatccgattgcaccaagattacaaaggcagagtatgtgggctgtgtggcaatttcgatgacaatgcgataaatgattttgcaacccgtagcaggtctgtagtaggcgatgctcttgagtttgggaactcctggaagcttagtcctagttgcccagatgccctggctccaaaggacccctgtaccgcaaatccctttcgtaaatcatgggctcagaagcagtgttctatcttgcacgggccaacgttcgccgcctgtcgaagtcaggttgacagcactaaatattatgaggcttgtgtaaatgacgcatgcgcctgcgactctggaggagattgtgaatgcttttgcacagccgtcgccgcctatgcccaagcctgtcatgatgccggactttgtgtgagctggagaacccctgacacatgcccattgttttgtgatttctataatccgcacggagggtgtgaatggcattaccagccctgcggcgcgccctgcctgaagacatgccggaacccctcgggtcactgcctggtggatctgcccggcctcgaaggatgttaccccaaatgtccaccttcccagccctttttcaacgaagaccagatgaaatgtgtagctcagtgcggctgttacgataaagacggaaattactacgatgtgggggcccgggttcccaccgctgagaactgtcagagttgcaattgtaccccaagcggcatccagtgcgcccattccctcgaggcatgtacctgtacgtacgaggaccggacttattcttaccaggacgtgatttataatactactgatggcctcggcgcttgtctgatagctatctgtggctctaatggtactattattcggaaggcagttgcctgcccgggaacacccgcaactacaccatttaccttcaccacagcctgggtcccacacagtaccacaagcccagccctgcctgtgtccacagtctgcgtaagggaagtttgtcgttggagttcttggtacaacggtcatagaccagaacctggcttgggtggcggcgatttcgaaactttcgagaatctcagacaaagaggatatcaggtttgccccgtattagccgacatcgaatgccgcgcggctcaactcccagacatgcctctcgaggagttaggccaacaagtagattgtgaccggatgagaggactcatgtgcgcgaacagtcaacagtcaccacctctctgtcacgattatgagcttcgggtcctctgttgcgaatatgtgccctgcggccccagtccagctcccggcacctctccgcagccttcactatcagctagcacggaacctgccgtccccactcctacccagacgaccgccacggaaaaaacaacactatgggtcacaccctctatacgatcaacagcggcccttactagccagacaggtagtagctccggtccggtcaccgtaaccccctccgccccaggaaccaccacttgccagcctaggtgccagtggacagagtggttcgatgaggattacccaaaatcagaacagctcgggggcgacgttgaaagctatgacaagatccgcgccgctgggggccatctttgccagcagcctaaggacatcgaatgtcaagcagaaagcttccctaattggactcttgcacaggtgggccagaaagtgcattgtgatgtccactttggcctcgtatgtaggaattgggagcaagaaggagtcttcaagatgtgttataactacagaatccgagtattatgttgcagcgatgatcattgccgaggtagagccaccacccccccccccactactgagcttgaaaccgccaccacaactacaacgcaggcactgttctccactccacaacccacctcctcgcccggcctcacccgcgccccacccgcaagcactaccgcagtcccaacactgtctgagggccttacatcacctagatatacctcaacccttggtaccgctacaactggcggccctacaacacccgcaggtagtactgaaccaaccgtacccggtgttgctacaagcacgctgccgactcgctccgccctgccaggcacaaccgggtcgctcggcacgtggcgtccttctcagccccccactcttgcacctactactatggccacgtcaagagcaaggcccacaggtacagcttcaaccgctagtaaagagcctctgaccaccagcttagcaccaactttaacatccgagctctcaacttcccaagctgaaacctctacacctagaacagagactacaatgtcacctcttaccaacacaaccacatcacaaggaaccactagatgccagcccaaatgcgagtggacagaatggttcgatgtcgacttccccacctcaggtgtcgccggtggcgacatggagacattcgagaacattagagctgccggcggcaagatgtgctgggccccaaagtctatcgaatgtagagccgaaaattaccccgaggtgtctatagatcaagtgggacaggtactcacgtgctccctggagactggcctgacgtgcaagaatgaagatcagactgggaggtttaatatgtgctttaactataatgtccgcgtcctgtgctgtgatgattactcacattgcccttcaacccctgcaaccagctctaccgcaaccccaagttcaacccctggcactacatggattttaactaaaccaacaacgaccgccaccaccactgcaagcacaggctccaccgccacccctacatcaaccttgagaacagcgccgccgccaaaagtgcttacaactaccgccaccacacccacagtcacatctagcaaagctacccccagctccagccctggtaccgcgacagctcttcctgcacttcggtcaacagctaccaccccaaccgcgacaagtgttacacctatcccctcatcatcgcttggaactacttggacacgcctgtcacaaacaacaactcctacggccactatgtccaccgccaccccctcatcaactccagagaccgcccacacatccaccgtgctaactgcgaccgccacaaccaccggcgccacaggatcagtggcgactccttccagcacaccaggaacggctcacacaaccaaagttcccaccacaaccacgaccggattcacagcaacccctagctcatcccccggaaccgcactaacacctcctgtttggatcagcacaactacaaccccaacaaccagaggatcaacagtcacccccagctctattccgggaactacccacaccgccaccgtattaacaaccactacgacaaccgtggctacaggctctatggctaccccaagctccagtacccagacctcaggaactcctccaagcctcactactaccgccactaccattactgccactggctccaccaccaacccttctagcacgcccggcaccacacctattcctcctgtccttaccacaacagcaacaacaccggccgccacctccaatactgtcactccttcttcagctttaggaactacccacactccccccgtccccaatacaatggcgactactcacggacgtagcctgcctccctccagccctcacaccgttagaaccgcatggacaagcgcaacatccggcatccttggcacgacacacattactgagccatccaccgtgacgtcccataccctcgccgctactacaggaactacacagcattccacgccagcccttagcagcccacacccatcatcaagaacaacagagtcacctcccagtcctgggaccacaacaccaggccatacaacagccacctcaaggactacagctaccgccactccgtccaaaacccgaactagtaccttgcttccgagcagtccaacctctgcaccgataacaaccgtggtaaccatgggctgtgaaccccagtgtgcgtggtcagagtggttagactatagttaccccatgcccggcccctccggcggcgactttgacacctactccaatatcagagctgcgggcggggcagtttgcgagcagcccctcggactggaatgcagagctcaagcccaacccggtgtgccactgcgcgagctcggacaagtcgttgagtgctccctcgactttggtttagtgtgccgaaatcgcgaacaggtgggaaagttcaaaatgtgttttaattatgaaattagggtattttgctgcaattatggtcactgcccctctacccctgccacttcttccactgccatgccatcctctacacccggtactacgtggattctcaccgaactgacaactaccgctacaacaaccgagtccaccggttcaaccgctacacccagtagtacccctggcacgacctggatccttacagagccatcaactaccgccactgtgacagttcctacgggaagtaccgccactgcttcttccactcaggccactgccggcactcctcacgtctcaaccactgctaccacgcctacggttacctcatctaaagccaccccgttttcgagtcccggcaccgccacagctcttccagccctccgaagcacggctaccacacctacagcaacctcattcacagcgattccttcaagctcactcgggacaacatggacccgcctgagtcagactacaacaccaaccgcaactatgtctaccgccacccctagctcaaccccagagaccgtccatacctcaaccgttcttacaacgaccgcgaccactaccggagcaactggatcagtagccaccccatcctcaacacccggaacagcccatactaccaaagtgctaacaaccacaactaccggctttacagcaaccccatcttcctcaccaggtaccgctcgcacactgcctgtatggatttccaccactaccaccccgaccacgcgcggttcaacggtgactccttccagcattccaggaacgacacacacaccaacagtcttgacaacgacaactactaccgtggccactggctcaatggccaccccttcttcatcaacgcaaacatctggtaccccacccagcctgacaacaactgctactacaatcaccgctacaggatcgacgacaaacccaagttctacccccggaacaaccccaattcctcctgttttgaccacgactgccaccacgccagccgccacatcgagtaccgtaaccccttccagcgcactgggcaccacacacactccccccgtccctaacacaaccgccactacccacggtcgatctctttctcctagctctccacataccgtaaggactgcttggaccagcgcgacatctggaaccctcggaacgacccatataaccgagccctcaaccggaacttcacacactcccgcagctactacgggcactacccagcattctacacccgcgctttcttcccctcacccttccagcaggaccaccgagtcacccccctcccctgggaccacaacacccggccatacccgcgcaacctcacgcacaaccgccacggctacaccttccaagacacgtacatcaaccttgttgccatcttcacctacttctgcacccatcacaaccgtcgtgaccatgggatgcgaacctcagtgtgcatggtctgagtggttagactatagttatcccatgcctggacccagcggcggagactttgacacttacagcaacatacgtgccgcaggaggagccgtgtgtgagcagccactcggtcttgagtgtcgtgcacaagcacagccaggggttcctttacgtgagttggggcaggtcgtagaatgctctctggattttggactcgtctgtcgcaaccgcgaacaagtgggaaagtttaagatgtgttttaattatgagatcagagtgttttgctgcaactacggccactgtcctagcaccccagccacatccagcacagccacgccaagttctaccccaggcactacctggattctgaccgaacaaacaacagcagcaacaaccaccgcgacaaccggatctacagctatcccgtcttctacaccaggcacggccccaccacctaaggtgctgacatctaccgcaactactccaaccgccacctcttctaaagctacaagctcttcttctccccgcaccgctactacccttcctgtcctgacatccacagcaaccaaaagcacagctacttcatttacgcccatcccctcatttactctcggaactacaggcaccctcccggagcagaccaccaccccaatggcaacaatgtccaccattcacccttcctcaaccccggaaacgacccacacctccactgttcttacaacaaaagctacaaccacacgtgcgacctctagcatgtcaacaccttcctctactcctggcactacctggatcctaaccgaactgaccaccgccgctaccacgaccgctgcaacaggccccaccgcgactccgtctagtactcctgggaccacttggatcctgaccgaaccgagtacaacagcgacagtcaccgtacccacaggctctacggccaccgccagctcgactcgcgccacagcaggaactctcaaagtgctcacctccactgcgaccacaccaaccgtgataagctccagagcgaccccatccagcagcccgggcacagcgactgccctgccagcattgcgttcaacagccacgacccctactgcaacgtcagtcacagccataccttcgagcagcctcgggaccgcttggacccgactctcccaaaccacaacccccacagccacaatgtctactgccaccccttccagtacaccagagacagttcatacatccaccgttctaactacaacaacaactactactcgggcgacaggcagcgttgccaccccctccagtacacctgggactgctcatactactaaggtgcccacaacgaccacaacaggctttaccgcaacaccttcttccagtccaggcacagctctaacacctcctgtgtggattagcactacaaccacacctaccacccggggttccactgtgacgcctagctctattccaggtaccacccacaccgccaccgtgctgacgactactacaacgaccgttgcgactgggtcaatggctaccccaagctcttccacccaaacatctggcactcctccctcactgactacgaccgccacaacaattaccgctaccggatccacaactaacccttcctctacacccggaacaacaccaattcctcccgttctgacaacaaccgctaccactcccgctgcaacgagctccactgtcacaccatcttctgcactgggaacaactcatacccctcccgttccaaatactacagctactacccacggtcggtccctccccccctcaagcccccatactgttagaactgcttggacttccgcaacatcagggattctcggcacaacccacatcacagagccatctactgtgaccagccacacccctgcagctacgacttccaccactcagcacagcaccccagccctgtccagcccccatccctcaagtcgtaccacagagagtcctccctcaccagggaccacaacgcccggtcacacacgaggcacttcccgaacaactgcgactgccacaccttcaaaaacgagaacgtcaactttactcccgtcttctcctacctctgcgcccattactaccgtcgttactacaggctgtgaacctcagtgcgcctggtctgaatggctagattacagttaccccatgccaggaccaagtgggggcgattttgatacctacagcaacatacgagcagccggcggagccgtttgcgagcaacctctgggcttggaatgtcgggctcaagctcaacctggggtcccacttagggaactggggcaggtcgtcgagtgttctcttgactttgggctagtatgccgcaatcgagagcaagtggggaagttcaaaatgtgctttaattatgaaatacgcgttttctgttgcaattacggacactgtccctcaactcctgctacttcgtcaacggctacaccatcctctactcccgggacaacctggatcttaactaaactgactacaacagcgactactacagaatctacaggctccacggctacaccttcctctacaccagggactacatggatcttgacagagccatccactacagccactgttacagttcccacaggcagtactgcgaccgcctcttccacacaagccacagcaggaacgcctcatgttagcaccaccgccaccacccccacagttacctcaagcaaagctactccattttcctctccaggaacagcaactgctttacccgctcttaggtcgaccgccaccaccccaactgccacaagttttactgctatcccctcaagttcccttggcaccacatggaccaggctctcacagactactacgcctaccgccaccatgtcaacagccaccccatcatcaacgcccgaaaccgctcacacatctaccgtcttaaccacaaccgcaactactacaagagctacaggctccgtcgcaaccccatcaagtaccccaggaaccgcgcataccacaaaggtccccactaccaccaccacagggttcaccgtaacaccatcttccagccctggaactgcacggacccctccagtgtggatatctacgacaaccaccccaacaacgagtggctctacagtgacaccgagttcagtccctggaactactcatacccccaccgttctcacaactacgaccacaactgttgctaccggctcaatggccactccatcctccagcactcagaccagcgggacaccaccctcactgattactaccgcgactactatcacggctactggatctaccacaaacccctcttccacccccggaaccacccccatcccccctgtccttacaaccactgctacaactcccgctgcaacttctagcacagtcacccccagcagtgcccttggtactacccacacaccccccgtcccaaataccaccgcgaccacacacggcaggtcactgtccccaagttccccacatacagtcagaacagcctggacatccgctacatctggtaccttgggaaccacacatataactgagccttccactgggaccagtcataccccagccgccacaaccggcactacacagcattcaacgcccgcactctcatccccccatccatctagccgcaccacagagtcaccacccagccctggcacaaccactcctggccacaccacagctacaagccgcactacagctaccgccactccatcaaagactagaaccagtacactgctgccctcatcgccaacatccgccccaattactaccgtagtgacaactggctgcgagccccagtgcgcatggtccgaatggttggactatagttaccctatgcctgggcctagcggcggtgattttgatacctactcgaacattagggctgccggtggcgcggtgtgcgaacagcctttaggactcgagtgtagggctcaggcgcagccgggcgtccctcttggagaactcggccaagttgtcgaatgttcccttgacttcggacttgtctgcagaaacagagagcaggttgggaaattcaaaatgtgtttcaattacgaaataagagttttctgttgtaactacggccactgcccttcaacacccgccacatccagtactgccatgccttcttctacgcccggcaccacatggatactgactgagctcaccacaaccgcaaccaccacagcatctactggatctactgcaaccccctcctccacacctggcacagcccctccccctaaagtgctgacctcccctgccaccaccccgactgctacctcctccaaagcaacttccagtagttccccaagaactgcaaccaccttaccagtgctgacatcgacagccaccaaaagtacagccacatctgtgactccaatcccctcctccactcttggcacaaccgggacactccctgaacaaaccacaactcctgtagcaaccatgtctacgatacatccgtcctccacaccagagaccacacacaccagcactgtcctcaccactaaggctacaacaacccgtgcgacgtcctctaccagtacgccttcttctacccctggcaccacttggattctgacagagctcacaaccgccgcaacgacgacagccgccacagggccaaccgccacacccagcagcactcccggcacgacatggatactaacagagttaactactacggccacaacgaccgcatccacaggctcaaccgcgaccccatcatctacacctgggactacttggattctcaccgaaccctcaacaacagctaccgttacagtaccaaccggaagcacagccaccgcctcctcaacacaagcaacagcaggaacaccacacgtgagtaccacggctacaactcctaccgtcacatcgtccaaggctacaccatcatcctcaccagggaccgcaaccgccctgccagctctgcgctcaacagccaccaccccaacagcgaccagcttcacagctataccttctagctctctcggaaccacatggacaaggctctctcaaacaaccactcccaccgctactatgtcaacggccaccccatcatctacacccgaaactgtccacacctcaaccgtcctgaccgcaacagctaccacaacaggggcaaccggaagcgttgccaccccaagttctacgcccggcacagcacacacgactaaggtgcctacgactactactactggttttactgctacaccctcatcgagtcctggcacagcgctaacacccccagtatggatttcgactaccaccacgcccactactacaacacccactaccagcggatcgacagtaaccccgtcaagtattccaggaacaactcacaccgctcgcgtcctgactaccactacaacgacagtcgcaaccggatctatggctaccccgtctagcagtacccagacatccgggaccccaccttctcttaccaccaccgccactaccattactgcaactggatccaccactaacccatcatccaccccaggcaccacccctataacccccgtcctgacctccacagccaccacacccgcagccaccagttcaaaggccaccagctcatccagcccccgaacagccacgactttgccagttctgactagtaccgcgaccaagtctacagcaacaagcttcaccccaatccctagcagcacactttggacgacctggactgttcccgcacaaactactacccccatgagcacaatgtctaccatccacacatcaagcactcctgaaacaacccatacttcaactgtcctgaccactacagcaactatgacaagagccaccaatagcaccgccaccccgtccagtactctcggcacaacaagaatccttacagaactgactacgacagctaccaccactgcagcgacgggctcaaccgccacactctcctctacccccggtactacttggatcctgactgagccctcaacgatcgcaaccgtgatggtgccaacaggctccacggctaccgcatccagcaccctcgggacagctcatacgcccaaagtcgtgaccacaatggcaaccatgccaaccgcaaccgcttccacagtgcctagctcatccactgtcggaactactaggaccccagcagttttaccatcttcccttcctacattttccgtctccactgtttcatcctctgtgttgactacactccgtcctaccggatttccctcctcacatttctcaaccccatgcttctgccgcgccttcggacagtttttttctccaggcgaggtcatttataacaaaaccgaccgggccgggtgccacttctatgcagtctgtaaccagcactgcgacatcgatcgattccagggagcatgcccaacctctccacctcctgtcagctccgcccctttaagcagtcctagcccagcccccggctgcgacaatgcaatcccccttagacaggtgaacgaaacctggacacttgaaaactgtacagtggcccgctgcgtcggtgacaacagagtagtcctgttggacccaaagccagtcgctaacgtcacctgtgtcaacaaacacctgccaattaaagtcagtgatccatctcaaccttgtgactttcactatgaatgcgagtgtatatgttcaatgtggggcggatctcattactccacctttgacgggacctcctacaccttcaggggaaattgtacttatgtgttgatgagagagatacacgcacgttttggcaacctgtccttgtatttagataaccattactgcacagcctccgcaaccgcagctgccgcccgatgcccgagagcactgtccattcattacaagtctatggacatcgtacttaccgttaccatggtgcatggcaaggaggaggggctaatcttgttcgatcaaatcccagtgtcctcaggattttccaagaacggcgtcctggtgtcagtgttgggcactactacaatgagagtcgatatccctgcactcggcgtttcggtgacctttaatggtcaagtgtttcaggcgaggctcccctactcattattccataacaacacagagggccagtgcggtacctgtaccaacaatcagcgagatgattgtcttcagagagacggaacaaccgcagcaagttgtaaagatatggccaagacctggcttgtgccagacagcagaaaggacggctgttgggccccaactggcactccccctactgcctccccggccgccccggtgagctctacccccacccctaccccatgtcccccccagccgttgtgtgacctaatgctgtctcaggtttttgctgaatgtcacaaccttgttccacccggccctttctttaatgcctgtatctccgaccattgccgaggtcggctcgaagtcccttgccagtccctcgaagcttatgctgagctgtgccgggctaggggcgtgtgtagcgactggcgaggagctaccggcggactttgcgacttgacctgcccccctacaaaggtatacaagccatgtggccccatccaacccgccacttgcaactcgcggaatcagtccccacaacttgagggcatggccgaaggctgtttttgtcctgaggaccagatcttgttcaatgcgcatatgggaatttgcgtgcaggcatgtccctgtgttggtcctgatggatttcctaaatttccaggtgaacgctgggtctctaattgtcaatcctgtgtttgtgacgagggcagtgtctccgtccagtgtaaaccactaccctgtgatgcgcaaggccagccccctccctgtaaccgtcctggatttgtgacagtgactaggcccagagctgaaaacccttgctgccccgagacggtttgcgtgtgtaataccacaacctgcccccagtccctcccagtatgtccccctggccaggagtctatttgtacccaggaagaaggtgattgctgcccaacatttagatgcagacctcaactctgtagctacaacggtactttttacggagtgggggcaactttcccaggtgccttaccttgccatatgtgtacctgtctcagcggagatactcaagaccccactgtccagtgccaggaggatgcctgtaataatactacctgtccccaggggttcgagtacaagcgcgttgccggccagtgttgtggtgaatgcgtccaaacagcatgtctgactccggacgggcagccagttcaacttaatgaaacgtgggtcaactcacatgttgacaattgcaccgtgtacctttgtgaagctgaggggggcgtacacttgctaactccacaacctgcttcctgtcctgacgtgagcagctgcagagggtctttgagaaaaactggatgctgctactcctgcgaagaagattcttgccaggtacgtatcaacaccaccatcctatggcaccagggatgtgagaccgaagttaatattacattttgtgagggaagttgcccaggcgcatcgaaatattccgctgaggctcaggctatgcagcatcagtgcacctgttgccaggaacgcagagtgcacgaagaaacagtgccactacattgccccaatggttccgccattcttcacacatacacccatgtcgatgagtgcggttgtacacctttttgtgtccccgcccctatggccccccctcacacacgcggcttcccagctcaggaggctaccgccgtttag

SEQ ID NO: 128616 - DNA, 561 bp, Artificial Sequence
  derived and/or modified sequence
agttctacccccggcactacctggattttgaccgaacctagtaccacagctactgtcacagtgccaaccggatcaacagctactgcaagctctacccaggctacagcaggcactccacacgtctcaaccacagccacaacacctacagtaacttcttcaaaagccacccccttctcttctccagggacagccacagcactgccagccctgagaagcactgcaactacaccaacagcaacctcttttaccgccatccctagtagctgggctcccccaggccctgcataccacaggccgccccatcccaggccaccttgtcctcagccccacccccctccactgcagcgcctaagtacaccaccccaatgtctgcccccaagacctccacggggccaccgcctgtgcggacatccactgttgcatcctcggaactcatcccactaccagtcagcagactaccataatcacttcacagcgaccccatcttccagtcctggcacagcacgtaccctccctgtctggatcagcaccaccacaacccccacaacccgcggttcctag

SEQ ID NO: 128617 - DNA, 2007 bp, Artificial Sequence
  derived and/or modified sequence
atgagggaaattcacgcccgcttcggcaatctctccctctatctcgacaaccattattgtaccgcttctgctaccgccgccgcagccagatgtcctagagctctttctattcattataaaagtatggatattgtgttgacagtgacgatggtgcatgggaaggaggaggggctgattctgttcgatcaaatcccagtttctagcggattctccaagaatggtgtgttggtcagtgttctaggcacaacaactatgcgagtagatatccccgccctgggtgtctctgtgacttttaacggacaagtgtttcaagcccgattgccatactcgctgttccacaacaacacggaaggccaatgcggtacttgcactaacaatcagagggacgactgtttacaaagagatgggaccaccgctgcctcgtgtaaagatatggctaagacttggctggtgccggattcacggaaagacgggtgctgggccccgaccggaacaccacctactgcctcccccgccgctcctgtcagcagtactcctactccaaccccatgcccacctcaacccttgtgtgacctcatgctgagtcaggtgttcgccgaatgccacaatcttgtcccacccggacccttcttcaacgcttgtatctccgaccattgccgaggacgccttgaggtcccctgtcaatccctggaagcgtacgctgagctctgtagagctcggggagtgtgttccgactggagaggcgctacaggcggcctatgtgacctcacctgcccaccaacaaaagtatacaagccatgtggaccaattcagcctgcaacttgcaattcaaggaatcagtcgccccagctggagggtatggctgagggatgcttttgtccagaagatcaaattctgttcaatgcacacatgggcatctgtgtgcaggcctgtccttgtgtgggccctgatggcttcccaaagtttccaggagaacgctgggtatccaattgtcaatcatgcgtgtgtgatgaaggatcagtgtccgtgcagtgtaagcccctaccatgcgatgcccaaggccagcctcccccctgtaacagacccggattcgtgaccgttacccgccccagagcagaaaatccttgctgcccagagaccgtgtgcgtttgcaacactactacatgtcctcagtctctgcccgtgtgccccccgggtcaggaaagcatttgcacacaggaagagggggattgctgtcctactttccggtgtcgcccgcagctctgcagttataacggaacattttatggagttggcgcaacattccctggtgcactcccctgccacatgtgcacctgcctgtctggcgatacccaagatcccactgtccagtgccaagaggacgcttgcaataacacaacttgtccccagggattcgaatataaacgggtggccggacagtgctgcggagaatgtgtccagactgcctgcctgacccctgatggccaacctgttcaacttaacgagacttgggttaatagccatgtggacaactgtactgtatacttgtgtgaagcagagggaggcgtgcaccttctgacccctcaacccgcctcttgtcctgatgtttcttcatgtagaggttcacttcgcaagactgggtgttgctatagctgcgaggaagatagctgtcaggtccggatcaacaccaccattttatggcatcagggatgtgaaaccgaggtcaatatcacgttttgcgaaggctcttgtcctggagcctccaaatatagcgccgaggcccaagcaatgcagcatcagtgcacctgttgccaagagagaagagtccacgaggagaccgtcccacttcattgccccaatggttcagccatcctccatacttatacacatgttgacgaatgtgggtgcacccctttttgtgttcctgcccctatgtctccccccgcctgcgtgtggcaccccgccctacgcgccccagcagctcacctcggactcgcccccccctag

SEQ ID NO: 128618 - DNA, 17121 bp, Artificial Sequence
  derived and/or modified sequence
atgggcgcccccagcgcctgcagaaccctggtgctggccctggccgccatgctggtggtgccccaggccgagacccagggccccgtggagcccagctgggagaacgccggccacaccatggacggcggcgcccccaccagcagccccaccagaagagtgagcttcgtgccccccgtgaccgtgttccccagcctgagccccctgaaccccgcccacaacggcagagtgtgcagcacctggggcgacttccactacaagaccttcgacggcgacgtgttcagattccccggcctgtgcaactacgtgttcagcgagcactgcagagccgcctacgaggacttcaacgtgcagctgagaagaggcctggtgggcagcagacccgtggtgaccagagtggtgatcaaggcccagggcctggtgctggaggccagcaacggcagcgtgctgatcaacggccagagagaggagctgccctacagcagaaccggcctgctggtggagcagagcggcgactacatcaaggtgagcatcagactggtgctgaccttcctgtggaacggcgaggacagcgccctgctggagctggaccccaagtacgccaaccagacctgcggcctgtgcggcgacttcaacggcctgcccgccttcaacgagttctacgcccacaacgccagactgacccccctgcagttcggcaacctgcagaagctggacggccccaccgagcagtgccccgaccccctgcccctgcccgccggcaactgcaccgacgaggagggcatctgccacagaaccctgctgggccccgccttcgccgagtgccacgccctggtggacagcaccgcctacctggccgcctgcgcccaggacctgtgcagatgccccacctgcccctgcgccaccttcgtggagtacagcagacagtgcgcccacgccggcggccagcccagaaactggagatgccccgagctgtgccccagaacctgccccctgaacatgcagcaccaggagtgcggcagcccctgcaccgacacctgcagcaacccccagagagcccagctgtgcgaggaccactgcgtggacggctgcttctgcccccccggcagcaccgtgctggacgacatcacccacagcggctgcctgcccctgggccagtgcccctgcacccacggcggcagaacctacagccccggcaccagcttcaacaccacctgcagcagctgcacctgcagcggcggcctgtggcagtgccaggacctgccctgccccggcacctgcagcgtgcagggcggcgcccacatcagcacctacgacgagaagctgtacgacctgcacggcgactgcagctacgtgctgagcaagaagtgcgccgacagcagcttcaccgtgctggccgagctgagaaagtgcggcctgaccgacaacgagaactgcctgaaggccgtgaccctgagcctggacggcggcgacaccgccatcagagtgcaggccgacggcggcgtgttcctgaacagcatctacacccagctgcccctgagcgccgccaacatcaccctgttcacccccagcagcttcttcatcgtggtgcagaccggcctgggcctgcagctgctggtgcagctggtgcccctgatgcaggtgttcgtgagactggaccccgcccaccagggccagatgtgcggcctgtgcggcaacttcaaccagaaccaggccgacgacttcaccgccctgagcggcgtggtggaggccaccggcgccgccttcgccaacacctggaaggcccaggccgcctgcgccaacgccagaaacagcttcgaggacccctgcagcctgagcgtggagaacgagaactacgccagacactggtgcagcagactgaccgaccccaacagcgccttcagcagatgccacagcatcatcaaccccaagcccttccacagcaactgcatgttcgacacctgcaactgcgagagaagcgaggactgcctgtgcgccgccctgagcagctacgtgcacgcctgcgccgccaagggcgtgcagctgagcgactggagagacggcgtgtgcaccaagtacatgcagaactgccccaagagccagagatacgcctacgtggtggacgcctgccagcccacctgcagaggcctgagcgaggccgacgtgacctgcagcgtgagcttcgtgcccgtggacggctgcacctgccccgccggcaccttcctgaacgacgccggcgcctgcgtgcccgcccaggagtgcccctgctacgcccacggcaccgtgctggcccccggcgaggtggtgcacgacgagggcgccgtgtgcagctgcaccggcggcaagctgagctgcctgggcgccagcctgcagaagagcaccggctgcgccgcccccatggtgtacctggactgcagcaacagcagcgccggcacccccggcgccgagtgcctgagaagctgccacaccctggacgtgggctgcttcagcacccactgcgtgagcggctgcgtgtgcccccccggcctggtgagcgacggcagcggcggctgcatcgccgaggaggactgcccctgcgtgcacaacgaggccacctacaagcccggcgagaccatcagagtggactgcaacacctgcacctgcagaaacagaagatgggagtgcagccacagactgtgcctgggcacctgcgtggcctacggcgacggccacttcatcaccttcgacggcgacagatacagcttcgagggcagctgcgagtacatcctggcccaggactactgcggcgacaacaccacccacggcaccttcagaatcgtgaccgagaacatcccctgcggcaccaccggcaccacctgcagcaaggccatcaagctgttcgtggagagctacgagctgatcctgcaggagggcaccttcaaggccgtggccagaggccccggcggcgaccccccctacaagatcagatacatgggcatcttcctggtgatcgagacccacggcatggccgtgagctgggacagaaagaccagcgtgttcatcagactgcaccaggactacaagggcagagtgtgcggcctgtgcggcaacttcgacgacaacgccatcaacgacttcgccaccagaagcagaagcgtggtgggcgacgccctggagttcggcaacagctggaagctgagccccagctgccccgacgccctggcccccaaggacccctgcaccgccaaccccttcagaaagagctgggcccagaagcagtgcagcatcctgcacggccccaccttcgccgcctgcagaagccaggtggacagcaccaagtactacgaggcctgcgtgaacgacgcctgcgcctgcgacagcggcggcgactgcgagtgcttctgcaccgccgtggccgcctacgcccaggcctgccacgacgccggcctgtgcgtgagctggagaacccccgacacctgccccctgttctgcgacttctacaacccccacggcggctgcgagtggcactaccagccctgcggcgccccctgcctgaagacctgcagaaaccccagcggccactgcctggtggacctgcccggcctggagggctgctaccccaagtgcccccccagccagcccttcttcaacgaggaccagatgaagtgcgtggcccagtgcggctgctacgacaaggacggcaactactacgacgtgggcgccagagtgcccaccgccgagaactgccagagctgcaactgcacccccagcggcatccagtgcgcccacagcctggaggcctgcacctgcacctacgaggacagaacctacagctaccaggacgtgatctacaacaccaccgacggcctgggcgcctgcctgatcgccatctgcggcagcaacggcaccatcatcagaaaggccgtggcctgccccggcacccccgccaccacccccttcaccttcaccaccgcctgggtgccccacagcaccaccagccccgccctgcccgtgagcaccgtgtgcgtgagagaggtgtgcagatggagcagctggtacaacggccacagacccgagcccggcctgggcggcggcgacttcgagaccttcgagaacctgagacagagaggctaccaggtgtgccccgtgctggccgacatcgagtgcagagccgcccagctgcccgacatgcccctggaggagctgggccagcaggtggactgcgacagaatgagaggcctgatgtgcgccaacagccagcagagcccccccctgtgccacgactacgagctgagagtgctgtgctgcgagtacgtgccctgcggccccagccccgcccccggcaccagcccccagcccagcctgagcgccagcaccgagcccgccgtgcccacccccacccagaccaccgccaccgagaagaccaccctgtgggtgacccccagcatcagaagcaccgccgccctgaccagccagaccggcagcagcagcggccccgtgaccgtgacccccagcgcccccggcaccaccacctgccagcccagatgccagtggaccgagtggttcgacgaggactaccccaagagcgagcagctgggcggcgacgtggagagctacgacaagatcagagccgccggcggccacctgtgccagcagcccaaggacatcgagtgccaggccgagagcttccccaactggaccctggcccaggtgggccagaaggtgcactgcgacgtgcacttcggcctggtgtgcagaaactgggagcaggagggcgtgttcaagatgtgctacaactacagaatcagagtgctgtgctgcagcgacgaccactgcagaggcagagccaccacccccccccccaccaccgagctggagaccgccaccaccaccaccacccaggccctgttcagcaccccccagcccaccagcagccccggcctgaccagagccccccccgccagcaccaccgccgtgcccaccctgagcgagggcctgaccagccccagatacaccagcaccctgggcaccgccaccaccggcggccccaccacccccgccggcagcaccgagcccaccgtgcccggcgtggccaccagcaccctgcccaccagaagcgccctgcccggcaccaccggcagcctgggcacctggagacccagccagccccccaccctggcccccaccaccatggccaccagcagagccagacccaccggcaccgccagcaccgccagcaaggagcccctgaccaccagcctggcccccaccctgaccagcgagctgagcaccagccaggccgagaccagcacccccagaaccgagaccaccatgagccccctgaccaacaccaccaccagccagggcaccaccagatgccagcccaagtgcgagtggaccgagtggttcgacgtggacttccccaccagcggcgtggccggcggcgacatggagaccttcgagaacatcagagccgccggcggcaagatgtgctgggcccccaagagcatcgagtgcagagccgagaactaccccgaggtgagcatcgaccaggtgggccaggtgctgacctgcagcctggagaccggcctgacctgcaagaacgaggaccagaccggcagattcaacatgtgcttcaactacaacgtgagagtgctgtgctgcgacgactacagccactgccccagcacccccgccaccagcagcaccgccacccccagcagcacccccggcaccacctggatcctgaccaagcccaccaccaccgccaccaccaccgccagcaccggcagcaccgccacccccaccagcaccctgagaaccgcccccccccccaaggtgctgaccaccaccgccaccacccccaccgtgaccagcagcaaggccacccccagcagcagccccggcaccgccaccgccctgcccgccctgagaagcaccgccaccacccccaccgccaccagcgtgacccccatccccagcagcagcctgggcaccacctggaccagactgagccagaccaccacccccaccgccaccatgagcaccgccacccccagcagcacccccgagaccgcccacaccagcaccgtgctgaccgccaccgccaccaccaccggcgccaccggcagcgtggccacccccagcagcacccccggcaccgcccacaccaccaaggtgcccaccaccaccaccaccggcttcaccgccacccccagcagcagccccggcaccgccctgaccccccccgtgtggatcagcaccaccaccacccccaccaccagaggcagcaccgtgacccccagcagcatccccggcaccacccacaccgccaccgtgctgaccaccaccaccaccaccgtggccaccggcagcatggccacccccagcagcagcacccagaccagcggcaccccccccagcctgaccaccaccgccaccaccatcaccgccaccggcagcaccaccaaccccagcagcacccccggcaccacccccatcccccccgtgctgaccaccaccgccaccacccccgccgccaccagcaacaccgtgacccccagcagcgccctgggcaccacccacaccccccccgtgcccaacaccatggccaccacccacggcagaagcctgccccccagcagcccccacaccgtgagaaccgcctggaccagcgccaccagcggcatcctgggcaccacccacatcaccgagcccagcaccgtgaccagccacaccctggccgccaccaccggcaccacccagcacagcacccccgccctgagcagcccccaccccagcagcagaaccaccgagagcccccccagccccggcaccaccacccccggccacaccaccgccaccagcagaaccaccgccaccgccacccccagcaagaccagaaccagcaccctgctgcccagcagccccaccagcgcccccatcaccaccgtggtgaccatgggctgcgagccccagtgcgcctggagcgagtggctggactacagctaccccatgcccggccccagcggcggcgacttcgacacctacagcaacatcagagccgccggcggcgccgtgtgcgagcagcccctgggcctggagtgcagagcccaggcccagcccggcgtgcccctgagagagctgggccaggtggtggagtgcagcctggacttcggcctggtgtgcagaaacagagagcaggtgggcaagttcaagatgtgcttcaactacgagatcagagtgttctgctgcaactacggccactgccccagcacccccgccaccagcagcaccgccatgcccagcagcacccccggcaccacctggatcctgaccgagctgaccaccaccgccaccaccaccgagagcaccggcagcaccgccacccccagcagcacccccgccaccgccggcaccccccacgtgagcaccaccgccaccacccccaccgtgaccagcagcaaggccacccccttcagcagccccggcaccgccaccgccctgcccgccctgagaagcaccgccaccacccccaccgccaccagcttcaccgccatccccagcagcagcctgggcaccacctggaccagactgagccagaccaccacccccaccgccaccatgagcaccgccacccccagcagcacccccgagaccgtgcacaccagcaccgtgctgaccaccaccgccaccaccaccggcgccaccggcagcgtggccacccccagcagcacccccggcaccgcccacaccaccaaggtgctgaccaccaccaccaccggcttcaccgccacccccagcagcagccccggcaccgccagaaccctgcccgtgtggatcagcaccaccaccacccccaccaccagaggcagcaccgtgacccccagcagcatccccggcaccacccacacccccaccgtgctgaccaccaccaccaccaccgtggccaccggcagcatggccacccccagcagcagcacccagaccagcggcaccccccccagcctgaccaccaccgccaccaccatcaccgccaccggcagcaccaccaaccccagcagcacccccggcaccacccccatcccccccgtgctgaccaccaccgccaccacccccgccgccaccagcagcaccgtgacccccagcagcgccctgggcaccacccacaccccccccgtgcccaacaccaccgccaccacccacggcagaagcctgagccccagcagcccccacaccgtgagaaccgcctggaccagcgccaccagcggcaccctgggcaccacccacatcaccgagcccagcaccggcaccagccacacccccgccgccaccaccggcaccacccagcacagcacccccgccctgagcagcccccaccccagcagcagaaccaccgagagcccccccagccccggcaccaccacccccggccacaccagagccaccagcagaaccaccgccaccgccacccccagcaagaccagaaccagcaccctgctgcccagcagccccaccagcgcccccatcaccaccgtggtgaccatgggctgcgagccccagtgcgcctggagcgagtggctggactacagctaccccatgcccggccccagcggcggcgacttcgacacctacagcaacatcagagccgccggcggcgccgtgtgcgagcagcccctgggcctggagtgcagagcccaggcccagcccggcgtgcccctgagagagctgggccaggtggtggagtgcagcctggacttcggcctggtgtgcagaaacagagagcaggtgggcaagttcaagatgtgcttcaactacgagatcagagtgttctgctgcaactacggccactgccccagcacccccgccaccagcagcaccgccacccccagcagcacccccggcaccacctggatcctgaccgagcagaccaccgccgccaccaccaccgccaccaccggcagcaccgccatccccagcagcacccccggcaccgcccccccccccaaggtgctgaccagcaccgccaccacccccaccgccaccagcagcaaggccaccagcagcagcagccccagaaccgccaccaccctgcccgtgctgaccagcaccgccaccaagagcaccgccaccagcttcacccccatccccagcttcaccctgggcaccaccggcaccctgcccgagcagaccaccacccccatggccaccatgagcaccatccaccccagcagcacccccgagaccacccacaccagcaccgtgctgaccaccaaggccaccaccaccagagccaccagcagcatgagcacccccagcagcacccccggcaccacctggatcctgaccgagctgaccaccgccgccaccaccaccgccgccaccggccccaccgccacccccagcagcacccccggcaccacctggatcctgaccgagcccagcaccaccgccaccgtgaccgtgcccaccggcagcaccgccaccgccagcagcaccagagccaccgccggcaccctgaaggtgctgaccagcaccgccaccacccccaccgtgatcagcagcagagccacccccagcagcagccccggcaccgccaccgccctgcccgccctgagaagcaccgccaccacccccaccgccaccagcgtgaccgccatccccagcagcagcctgggcaccgcctggaccagactgagccagaccaccacccccaccgccaccatgagcaccgccacccccagcagcacccccgagaccgtgcacaccagcaccgtgctgaccaccaccaccaccaccaccagagccaccggcagcgtggccacccccagcagcacccccggcaccgcccacaccaccaaggtgcccaccaccaccaccaccggcttcaccgccacccccagcagcagccccggcaccgccctgaccccccccgtgtggatcagcaccaccaccacccccaccaccagaggcagcaccgtgacccccagcagcatccccggcaccacccacaccgccaccgtgctgaccaccaccaccaccaccgtggccaccggcagcatggccacccccagcagcagcacccagaccagcggcaccccccccagcctgaccaccaccgccaccaccatcaccgccaccggcagcaccaccaaccccagcagcacccccggcaccacccccatcccccccgtgctgaccaccaccgccaccacccccgccgccaccagcagcaccgtgacccccagcagcgccctgggcaccacccacaccccccccgtgcccaacaccaccgccaccacccacggcagaagcctgccccccagcagcccccacaccgtgagaaccgcctggaccagcgccaccagcggcatcctgggcaccacccacatcaccgagcccagcaccgtgaccagccacacccccgccgccaccaccagcaccacccagcacagcacccccgccctgagcagcccccaccccagcagcagaaccaccgagagcccccccagccccggcaccaccacccccggccacaccagaggcaccagcagaaccaccgccaccgccacccccagcaagaccagaaccagcaccctgctgcccagcagccccaccagcgcccccatcaccaccgtggtgaccaccggctgcgagccccagtgcgcctggagcgagtggctggactacagctaccccatgcccggccccagcggcggcgacttcgacacctacagcaacatcagagccgccggcggcgccgtgtgcgagcagcccctgggcctggagtgcagagcccaggcccagcccggcgtgcccctgagagagctgggccaggtggtggagtgcagcctggacttcggcctggtgtgcagaaacagagagcaggtgggcaagttcaagatgtgcttcaactacgagatcagagtgttctgctgcaactacggccactgccccagcacccccgccaccagcagcaccgccacccccagcagcacccccggcaccacctggatcctgaccaagctgaccaccaccgccaccaccaccgagagcaccggcagcaccgccacccccagcagcacccccggcgccaccgccggcaccccccacgtgagcaccaccgccaccacccccaccgtgaccagcagcaaggccacccccttcagcagccccggcaccgccaccgccctgcccgccctgagaagcaccgccaccacccccaccgccaccagcttcaccgccatccccagcagcagcctgggcaccacctggaccagactgagccagaccaccacccccaccgccaccatgagcaccgccacccccagcagcacccccgagaccgcccacaccagcaccgtgctgaccaccaccgccaccaccaccagagccaccggcagcgtggccacccccagcagcacccccggcaccgcccacaccaccaaggtgcccaccaccaccaccaccggcttcaccgtgacccccagcagcagccccggcaccgccagaaccccccccgtgtggatcagcaccaccaccacccccaccaccagcggcagcaccgtgacccccagcagcgtgcccggcaccacccacacccccaccgtgctgaccaccaccaccaccaccgtggccaccggcagcatggccacccccagcagcagcacccagaccagcggcaccccccccagcctgatcaccaccgccaccaccatcaccgccaccggcagcaccaccaaccccagcagcacccccggcaccacccccatcccccccgtgctgaccaccaccgccaccacccccgccgccaccagcagcaccgtgacccccagcagcgccctgggcaccacccacaccccccccgtgcccaacaccaccgccaccacccacggcagaagcctgagccccagcagcccccacaccgtgagaaccgcctggaccagcgccaccagcggcaccctgggcaccacccacatcaccgagcccagcaccggcaccagccacacccccgccgccaccaccggcaccacccagcacagcacccccgccctgagcagcccccaccccagcagcagaaccaccgagagcccccccagccccggcaccaccacccccggccacaccaccgccaccagcagaaccaccgccaccgccacccccagcaagaccagaaccagcaccctgctgcccagcagccccaccagcgcccccatcaccaccgtggtgaccaccggctgcgagccccagtgcgcctggagcgagtggctggactacagctaccccatgcccggccccagcggcggcgacttcgacacctacagcaacatcagagccgccggcggcgccgtgtgcgagcagcccctgggcctggagtgcagagcccaggcccagcccggcgtgcccctgggcgagctgggccaggtggtggagtgcagcctggacttcggcctggtgtgcagaaacagagagcaggtgggcaagttcaagatgtgcttcaactacgagatcagagtgttctgctgcaactacggccactgccccagcacccccgccaccagcagcaccgccatgcccagcagcacccccggcaccacctggatcctgaccgagctgaccaccaccgccaccaccaccgccagcaccggcagcaccgccacccccagcagcacccccggcaccgcccccccccccaaggtgctgaccagccccgccaccacccccaccgccaccagcagcaaggccaccagcagcagcagccccagaaccgccaccaccctgcccgtgctgaccagcaccgccaccaagagcaccgccaccagcgtgacccccatccccagcagcaccctgggcaccaccggcaccctgcccgagcagaccaccacccccgtggccaccatgagcaccatccaccccagcagcacccccgagaccacccacaccagcaccgtgctgaccaccaaggccaccaccaccagagccaccagcagcaccagcacccccagcagcacccccggcaccacctggatcctgaccgagctgaccaccgccgccaccaccaccgccgccaccggccccaccgccacccccagcagcacccccggcaccacctggatcctgaccgagctgaccaccaccgccaccaccaccgccagcaccggcagcaccgccacccccagcagcacccccggcaccacctggatcctgaccgagcccagcaccaccgccaccgtgaccgtgcccaccggcagcaccgccaccgccagcagcacccaggccaccgccggcaccccccacgtgagcaccaccgccaccacccccaccgtgaccagcagcaaggccacccccagcagcagccccggcaccgccaccgccctgcccgccctgagaagcaccgccaccacccccaccgccaccagcttcaccgccatccccagcagcagcctgggcaccacctggaccagactgagccagaccaccacccccaccgccaccatgagcaccgccacccccagcagcacccccgagaccgtgcacaccagcaccgtgctgaccgccaccgccaccaccaccggcgccaccggcagcgtggccacccccagcagcacccccggcaccgcccacaccaccaaggtgcccaccaccaccaccaccggcttcaccgccacccccagcagcagccccggcaccgccctgaccccccccgtgtggatcagcaccaccaccacccccaccaccaccacccccaccaccagcggcagcaccgtgacccccagcagcatccccggcaccacccacaccgccagagtgctgaccaccaccaccaccaccgtggccaccggcagcatggccacccccagcagcagcacccagaccagcggcaccccccccagcctgaccaccaccgccaccaccatcaccgccaccggcagcaccaccaaccccagcagcacccccggcaccacccccatcacccccgtgctgaccagcaccgccaccacccccgccgccaccagcagcaaggccaccagcagcagcagccccagaaccgccaccaccctgcccgtgctgaccagcaccgccaccaagagcaccgccaccagcttcacccccatccccagcagcaccctgtggaccacctggaccgtgcccgcccagaccaccacccccatgagcaccatgagcaccatccacaccagcagcacccccgagaccacccacaccagcaccgtgctgaccaccaccgccaccatgaccagagccaccaacagcaccgccacccccagcagcaccctgggcaccaccagaatcctgaccgagctgaccaccaccgccaccaccaccgccgccaccggcagcaccgccaccctgagcagcacccccggcaccacctggatcctgaccgagcccagcaccatcgccaccgtgatggtgcccaccggcagcaccgccaccgccagcagcaccctgggcaccgcccacacccccaaggtggtgaccaccatggccaccatgcccaccgccaccgccagcaccgtgcccagcagcagcaccgtgggcaccaccagaacccccgccgtgctgcccagcagcctgcccaccttcagcgtgagcaccgtgagcagcagcgtgctgaccaccctgagacccaccggcttccccagcagccacttcagcaccccctgcttctgcagagccttcggccagttcttcagccccggcgaggtgatctacaacaagaccgacagagccggctgccacttctacgccgtgtgcaaccagcactgcgacatcgacagattccagggcgcctgccccaccagccccccccccgtgagcagcgcccccctgagcagccccagccccgcccccggctgcgacaacgccatccccctgagacaggtgaacgagacctggaccctggagaactgcaccgtggccagatgcgtgggcgacaacagagtggtgctgctggaccccaagcccgtggccaacgtgacctgcgtgaacaagcacctgcccatcaaggtgagcgaccccagccagccctgcgacttccactacgagtgcgagtgcatctgcagcatgtggggcggcagccactacagcaccttcgacggcaccagctacaccttcagaggcaactgcacctacgtgctgatgagagagatccacgccagattcggcaacctgagcctgtacctggacaaccactactgcaccgccagcgccaccgccgccgccgccagatgccccagagccctgagcatccactacaagagcatggacatcgtgctgaccgtgaccatggtgcacggcaaggaggagggcctgatcctgttcgaccagatccccgtgagcagcggcttcagcaagaacggcgtgctggtgagcgtgctgggcaccaccaccatgagagtggacatccccgccctgggcgtgagcgtgaccttcaacggccaggtgttccaggccagactgccctacagcctgttccacaacaacaccgagggccagtgcggcacctgcaccaacaaccagagagacgactgcctgcagagagacggcaccaccgccgccagctgcaaggacatggccaagacctggctggtgcccgacagcagaaaggacggctgctgggcccccaccggcaccccccccaccgccagccccgccgcccccgtgagcagcacccccacccccaccccctgccccccccagcccctgtgcgacctgatgctgagccaggtgttcgccgagtgccacaacctggtgccccccggccccttcttcaacgcctgcatcagcgaccactgcagaggcagactggaggtgccctgccagagcctggaggcctacgccgagctgtgcagagccagaggcgtgtgcagcgactggagaggcgccaccggcggcctgtgcgacctgacctgcccccccaccaaggtgtacaagccctgcggccccatccagcccgccacctgcaacagcagaaaccagagcccccagctggagggcatggccgagggctgcttctgccccgaggaccagatcctgttcaacgcccacatgggcatctgcgtgcaggcctgcccctgcgtgggccccgacggcttccccaagttccccggcgagagatgggtgagcaactgccagagctgcgtgtgcgacgagggcagcgtgagcgtgcagtgcaagcccctgccctgcgacgcccagggccagccccccccctgcaacagacccggcttcgtgaccgtgaccagacccagagccgagaacccctgctgccccgagaccgtgtgcgtgtgcaacaccaccacctgcccccagagcctgcccgtgtgcccccccggccaggagagcatctgcacccaggaggagggcgactgctgccccaccttcagatgcagaccccagctgtgcagctacaacggcaccttctacggcgtgggcgccaccttccccggcgccctgccctgccacatgtgcacctgcctgagcggcgacacccaggaccccaccgtgcagtgccaggaggacgcctgcaacaacaccacctgcccccagggcttcgagtacaagagagtggccggccagtgctgcggcgagtgcgtgcagaccgcctgcctgacccccgacggccagcccgtgcagctgaacgagacctgggtgaacagccacgtggacaactgcaccgtgtacctgtgcgaggccgagggcggcgtgcacctgctgaccccccagcccgccagctgccccgacgtgagcagctgcagaggcagcctgagaaagaccggctgctgctacagctgcgaggaggacagctgccaggtgagaatcaacaccaccatcctgtggcaccagggctgcgagaccgaggtgaacatcaccttctgcgagggcagctgccccggcgccagcaagtacagcgccgaggcccaggccatgcagcaccagtgcacctgctgccaggagagaagagtgcacgaggagaccgtgcccctgcactgccccaacggcagcgccatcctgcacacctacacccacgtggacgagtgcggctgcacccccttctgcgtgcccgcccccatggcccccccccacaccagaggcttccccgcccaggaggccaccgccgtgtag

SEQ ID NO: 128619 - DNA, 16587 bp, Artificial Sequence
  derived and/or modified sequence
gcccccagaatgggcgcccccagcgcctgcagaaccctggtgctggccctggccgccatgctggtggtgccccaggccggcaagagcccccccctgagacccctgagcagaaacagcggcgccggcctggacggcggcgcccccaccagcagccccaccagaagagtgagcttcgtgccccccgtgaccgtgttccccagcctgagcagaaagcagatgctgcccctgcccgccggcaagggcgtgttcgccagccccaagggcggcggccccgacctgggcgtgcagctgccccccgccctgaaccccgcccacaacggcagagtgtgcagcacctggggcgacttccactacaagaccttcgacggcgacgtgttcagattccccggcctgtgcaactacgtgttcagcgagcactgcagagccgcctacgaggacttcaacgtgcagctgagaagaggcctggtgggcagcagacccgtggtgaccagagtggtgatcaaggcccagggcctggtgctggaggccagcaacggcagcgtgctgatcaacggccagagagaggagctgccctacagcagaaccggcctgctggtggagcagagcggcgactacatcaaggtgagcatcagactggtgctgaccttcctgtggaacggcgaggacagcgccctgctggagctggaccccaagtacgccaaccagacctgcggcctgtgcggcgacttcaacggcctgcccgccttcaacgagttctacgcccacaacgccagactgacccccctgcagttcggcaacctgcagaagctggacggccccaccgagcagtgccccgaccccctgcccctgcccgccggcaactgcaccgacgaggagggcatctgccacagaaccctgctgggccccgccttcgccgagtgccacgccctggtggacagcaccgcctacctggccgcctgcgcccaggacctgtgcagatgccccacctgcccctgcgccaccttcgtggagtacagcagacagtgcgcccacgccggcggccagcccagaaactggagatgccccgagctgtgccccagaacctgccccctgaacatgcagcaccaggagtgcggcagcccctgcaccgacacctgcagcaacccccagagagcccagctgtgcgaggaccactgcgtggacggctgcttctgcccccccggcagaagctgcaccgtgctggacgacatcacccacagcggctgcctgcccctgggccagtgcccctgcacccacggcggcagaacctacagccccggcaccagcttcaacaccacctgcagcagctgcacctgcagcggcggcctgtggcagtgccaggacctgccctgccccggcacctgcagcgtgcagggcggcgcccacatcagcacctacgacgagaagctgtacgacctgcacggcgactgcagctacgtgctgagcaagaagtgcgccgacagcagcttcaccgtgctggccgagctgagaaagtgcggcctgaccgacaacgagaactgcctgaaggccgtgaccctgagcctggacggcggcgacaccgccatcagagtgcaggccgacggcggcgtgttcctgaacagcatctacacccagctgcccctgagcgccgccaacatcaccctgttcacccccagcagcttcttcatcgtggtgcagaccggcctgggcctgcagctgctggtgcagctggtgcccctgatgcaggtgttcgtgagactggaccccgcccaccagggccagatgtgcggcctgtgcggcaacttcaaccagaaccaggccgacgacttcaccgccctgagcggcgtggtggaggccaccggcgccgccttcgccaacacctggaaggcccaggccgcctgcgccaacgccagaaacagcttcgaggacccctgcagcctgagcgtggagaacgagaactacgccagacactggtgcagcagactgaccgaccccaacagcgccttcagcagatgccacagcatcatcaaccccaagcccttccacagcaactgcatgttcgacacctgcaactgcgagagaagcgaggactgcctgtgcgccgccctgagcagctacgtgcacgcctgcgccgccaagggcgtgcagctgagcgactggagagacggcgtgtgcaccaagtacatgcagaactgccccaagagccagagatacgcctacgtggtggacgcctgccagcccacctgcagaggcctgagcgaggccgacgtgacctgcagcgtgagcttcgtgcccgtggacggctgcacctgccccgccggcaccttcctgaacgacgccggcgcctgcgtgcccgcccaggagtgcccctgctacgcccacggcaccgtgctggcccccggcgaggtggtgcacgacgagggcgccgtgtgcagctgcaccggcggcaagctgagctgcctgggcgccagcctgcagaagagcaccggctgcgccgcccccatggtgtacctggactgcagcaacagcagcgccggcacccccggcgccgagtgcctgagaagctgccacaccctggacgtgggctgcttcagcacccactgcgtgagcggctgcgtgtgcccccccggcctggtgagcgacggcagcggcggctgcatcgccgaggaggactgcccctgcgtgcacaacgaggccacctacaagcccggcgagaccatcagagtggactgcaacacctgcacctgcagaaacagaagatgggagtgcagccacagactgtgcctgggcacctgcgtggcctacggcgacggccacttcatcaccttcgacggcgacagatacagcttcgagggcagctgcgagtacatcctggcccaggactactgcggcgacaacaccacccacggcaccttcagaatcgtgaccgagaacatcccctgcggcaccaccggcaccacctgcagcaaggccatcaagctgttcgtggaggtgagaaccgcccccgccgtgagcacccccgaccccgccgccaacgagcccgcccccagagaggccagcgtgggcttcagacagagactgccccccctgcagagctacgagctgatcctgcaggagggcaccttcaaggccgtggccagaggccccggcggcgaccccccctacaagatcagatacatgggcatcttcctggtgatcgagacccacggcatggccgtgagctgggacagaaagaccagcgtgttcatcagactgcaccaggactacaagggcagagtgtgcggcctgtgcggcaacttcgacgacaacgccatcaacgacttcgccaccagaagcagaagcgtggtgggcgacgccctggagttcggcaacagctggaagctgagccccagctgccccgacgccctggcccccaaggacccctgcaccgccaaccccttcagaaagagctgggcccagaagcagtgcagcatcctgcacggccccaccttcgccgcctgcagaagccaggtggacagcaccaagtactacgaggcctgcgtgaacgacgcctgcgcctgcgacagcggcggcgactgcgagtgcttctgcaccgccgtggccgcctacgcccaggcctgccacgacgccggcctgtgcgtgagctggagaacccccgacacctgccccctgttctgcgacttctacaacccccacggcggctgcgagtggcactaccagccctgcggcgccccctgcctgaagacctgcagaaaccccagcggccactgcctggtggacctgcccggcctggagggctgctaccccaagtgcccccccagccagcccttcttcaacgaggaccagatgaagtgcgtggcccagtgcggctgctacgacaaggacggcaactactacgacgtgggcgccagagtgcccaccgccgagaactgccagagctgcaactgcacccccagcggcatccagtgcgcccacagcctggaggcctgcacctgcacctacgaggacagaacctacagctaccaggacgtgatctacaacaccaccgacggcctgggcgcctgcctgatcgccatctgcggcagcaacggcaccatcatcagaaaggccgtggcctgccccggcacccccgccaccacccccttcaccttcaccaccgcctgggtgccccacagcaccaccagccccgccctgcccgtgagcaccgtgtgcgtgagagaggtgtgcagatggagcagctggtacaacggccacagacccgagcccggcctgggcggcggcgacttcgagaccttcgagaacctgagacagagaggctaccaggtgtgccccgtgctggccgacatcgagtgcagagccgcccagctgcccgacatgcccctggaggagctgggccagcaggtggactgcgacagaatgagaggcctgatgtgcgccaacagccagcagagcccccccctgtgccacgactacgagctgagagtgctgtgctgcgagtacgtgccctgcggccccagccccgcccccggcaccagcccccagcccagcctgagcgccagcaccgagcccgccgtgcccacccccacccagaccaccgccaccgagaagaccaccctgtgggtgacccccagcatcagaagcaccgccgccctgaccagccagaccggcagcagcagcggccccgtgaccgtgacccccagcgcccccggcaccaccacctgccagcccagatgccagtggaccgagtggttcgacgaggactaccccaagagcgagcagctgggcggcgacgtggagagctacgacaagatcagagccgccggcggccacctgtgccagcagcccaaggacatcgagtgccaggccgagagcttccccaactggaccctggcccaggtgggccagaaggtgcactgcgacgtgcacttcggcctggtgtgcagaaactgggagcaggagggcgtgttcaagatgtgctacaactacagaatcagagtgctgtgctgcagcgacgaccactgcagaggcagagccaccacccccccccccaccaccgagctggagaccgccaccaccaccaccacccaggccctgttcagcaccccccagcccaccagcagccccggcctgaccagagccccccccgccagcaccaccgccgtgcccaccctgagcgagggcctgaccagccccagatacaccagcaccctgggcaccgccaccaccggcggccccaccacccccgccggcagcaccgagcccaccgtgcccggcgtggccaccagcaccctgcccaccagaagcgccctgcccggcaccaccggcagcctgggcacctggagacccagccagccccccaccctggcccccaccaccatggccaccagcagagccagacccaccggcaccgccagcaccgccagcaaggagcccctgaccaccagcctggcccccaccctgaccagcgagctgagcaccagccaggccgagaccagcacccccagaaccgagaccaccatgagccccctgaccaacaccaccaccagccagggcaccaccagatgccagcccaagtgcgagtggaccgagtggttcgacgtggacttccccaccagcggcgtggccggcggcgacatggagaccttcgagaacatcagagccgccggcggcaagatgtgctgggcccccaagagcatcgagtgcagagccgagaactaccccgaggtgagcatcgaccaggtgggccaggtgctgacctgcagcctggagaccggcctgacctgcaagaacgaggaccagaccggcagattcaacatgtgcttcaactacaacgtgagagtgctgtgctgcgacgactacagccactgccccagcacccccgccaccagcagcaccgccacccccagcagcacccccggcaccacctggatcctgaccaagcccaccaccaccgccaccaccaccgccagcaccggcagcaccgccacccccaccagcaccctgagaaccgcccccccccccaaggtgctgaccaccaccgccaccacccccaccgtgaccagcagcaaggccacccccagcagcagccccggcaccgccaccgccctgcccgccctgagaagcaccgccaccacccccaccgccaccagcgtgacccccatccccagcagcagcctgggcaccacctggaccagactgagccagaccaccacccccaccgccaccatgagcaccgccacccccagcagcacccccgagaccgcccacaccagcaccgtgctgaccgccaccgccaccaccaccggcgccaccggcagcgtggccacccccagcagcacccccggcaccgcccacaccaccaaggtgcccaccaccaccaccaccggcttcaccgccacccccagcagcagccccggcaccgccctgaccccccccgtgtggatcagcaccaccaccacccccaccaccagaggcagcaccgtgacccccagcagcatccccggcaccacccacaccgccaccgtgctgaccaccaccaccaccaccgtggccaccggcagcatggccacccccagcagcagcacccagaccagcggcaccacccacaccccccccgtgcccaacaccatggccaccacccacggcagaagcctgccccccagcagcccccacaccgtgagaaccgcctggaccagcgccaccagcggcatcctgggcaccacccacatcaccgagcccagcaccgtgaccagccacaccctggccgccaccaccggcaccacccagcacagcacccccgccctgagcagcccccaccccagcagcagaaccaccgagagcccccccagccccggcaccaccacccccggccacaccaccgccaccagcagaaccaccgccaccgccacccccagcaagaccagaaccagcaccctgctgcccagcagccccaccagcgcccccatcaccaccgtggtgaccatgggctgcgagccccagtgcgcctggagcgagtggctggactacagctaccccatgcccggccccagcggcggcgacttcgacacctacagcaacatcagagccgccggcggcgccgtgtgcgagcagcccctgggcctggagtgcagagcccaggcccagcccggcgtgcccctgagagagctgggccaggtggtggagtgcagcctggacttcggcctggtgtgcagaaacagagagcaggtgggcaagttcaagatgtgcttcaactacgagatcagagtgttctgctgcaactacggccactgccccagcacccccgccaccagcagcaccgccatgcccagcagcacccccggcaccacctggatcctgaccgagctgaccaccaccgccaccaccaccgagagcaccggcagcaccgccacccccagcagcacccccggcaccacctggatcctgaccgagcccagcaccaccgccaccgtgaccgtgcccaccggcagcaccgccaccgccagcagcacccaggccaccgccggcaccccccacgtgagcaccaccgccaccacccccaccgtgaccagcagcaaggccacccccttcagcagccccggcaccgccaccgccctgcccgccctgagaagcaccgccaccacccccaccgccaccagcttcaccgccatccccagcagcagcctgggcaccacctggaccagactgagccagaccaccacccccaccgccaccatgagcaccgccacccccagcagcacccccgagaccgtgcacaccagcaccgtgctgaccaccaccgccaccaccaccggcgccaccggcagcgtggccacccccagcagcacccccggcaccgcccacaccaccaaggtgctgaccaccaccaccaccggcttcaccgccacccccagcagcagccccggcaccgccagaaccctgcccgtgtggatcagcaccaccaccacccccaccaccagaggcagcaccgtgacccccagcagcatccccggcaccacccacacccccaccgtgctgaccaccaccaccaccaccgtggccaccggcagcatggccacccccagcagcagcacccagaccagcggcaccacccacaccccccccgtgcccaacaccaccgccaccacccacggcagaagcctgagccccagcagcccccacaccgtgagaaccgcctggaccagcgccaccagcggcaccctgggcaccacccacatcaccgagcccagcaccggcaccagccacacccccgccgccaccaccggcaccacccagcacagcacccccgccctgagcagcccccaccccagcagcagaaccaccgagagcccccccagccccggcaccaccacccccggccacaccagagccaccagcagaaccaccgccaccgccacccccagcaagaccagaaccagcaccctgctgcccagcagccccaccagcgcccccatcaccaccgtggtgaccatgggctgcgagccccagtgcgcctggagcgagtggctggactacagctaccccatgcccggccccagcggcggcgacttcgacacctacagcaacatcagagccgccggcggcgccgtgtgcgagcagcccctgggcctggagtgcagagcccaggcccagcccggcgtgcccctgagagagctgggccaggtggtggagtgcagcctggacttcggcctggtgtgcagaaacagagagcaggtgggcaagttcaagatgtgcttcaactacgagatcagagtgttctgctgcaactacggccactgccccagcacccccgccaccagcagcaccgccacccccagcagcacccccggcaccacctggatcctgaccgagcagaccaccgccgccaccaccaccgccaccaccggcagcaccgccatccccagcagcacccccggcaccgcccccccccccaaggtgctgaccagcaccgccaccacccccaccgccaccagcagcaaggccaccagcagcagcagccccagaaccgccaccaccctgcccgtgctgaccagcaccgccaccaagagcaccgccaccagcttcacccccatccccagcttcaccctgggcaccaccggcaccctgcccgagcagaccaccacccccatggccaccatgagcaccatccaccccagcagcacccccgagaccacccacaccagcaccgtgctgaccaccaaggccaccaccaccagagccaccagcagcatgagcacccccagcagcacccccggcaccacctggatcctgaccgagctgaccaccgccgccaccaccaccgccgccaccggccccaccgccacccccagcagcacccccggcaccacctggatcctgaccgagcccagcaccaccgccaccgtgaccgtgcccaccggcagcaccgccaccgccagcagcaccagagccaccgccggcaccctgaaggtgctgaccagcaccgccaccacccccaccgtgatcagcagcagagccacccccagcagcagccccggcaccgccaccgccctgcccgccctgagaagcaccgccaccacccccaccgccaccagcgtgaccgccatccccagcagcagcctgggcaccgcctggaccagactgagccagaccaccacccccaccgccaccatgagcaccgccacccccagcagcacccccgagaccgtgcacaccagcaccgtgctgaccaccaccaccaccaccaccagagccaccggcagcgtggccacccccagcagcacccccggcaccgcccacaccaccaaggtgcccaccaccaccaccaccggcttcaccgccacccccagcagcagccccggcaccgccctgaccccccccgtgtggatcagcaccaccaccacccccaccaccagaggcagcaccgtgacccccagcagcatccccggcaccacccacaccgccaccgtgctgaccaccaccaccaccaccgtggccaccggcagcatggccacccccagcagcagcacccagaccagcggcaccacccacaccccccccgtgcccaacaccaccgccaccacccacggcagaagcctgccccccagcagcccccacaccgtgagaaccgcctggaccagcgccaccagcggcatcctgggcaccacccacatcaccgagcccagcaccgtgaccagccacacccccgccgccaccaccagcaccacccagcacagcacccccgccctgagcagcccccaccccagcagcagaaccaccgagagcccccccagccccggcaccaccacccccggccacaccagaggcaccagcagaaccaccgccaccgccacccccagcaagaccagaaccagcaccctgctgcccagcagccccaccagcgcccccatcaccaccgtggtgaccaccggctgcgagccccagtgcgcctggagcgagtggctggactacagctaccccatgcccggccccagcggcggcgacttcgacacctacagcaacatcagagccgccggcggcgccgtgtgcgagcagcccctgggcctggagtgcagagcccaggcccagcccggcgtgcccctgagagagctgggccaggtggtggagtgcagcctggacttcggcctggtgtgcagaaacagagagcaggtgggcaagttcaagatgtgcttcaactacgagatcagagtgttctgctgcaactacggccactgccccagcacccccgccaccagcagcaccgccacccccagcagcacccccggcaccacctggatcctgaccaagctgaccaccaccgccaccaccaccgagagcaccggcagcaccgccacccccagcagcacccccggcaccacctggatcctgaccgagcccagcaccaccgccaccgtgaccgtgcccaccggcagcaccgccaccgccagcagcacccaggccaccgccggcaccccccacgtgagcaccaccgccaccacccccaccgtgaccagcagcaaggccacccccttcagcagccccggcaccgccaccgccctgcccgccctgagaagcaccgccaccacccccaccgccaccagcttcaccgccatccccagcagcagcctgggcaccacctggaccagactgagccagaccaccacccccaccgccaccatgagcaccgccacccccagcagcacccccgagaccgcccacaccagcaccgtgctgaccaccaccgccaccaccaccagagccaccggcagcgtggccacccccagcagcacccccggcaccgcccacaccaccaaggtgcccaccaccaccaccaccggcttcaccgtgacccccagcagcagccccggcaccgccagaaccccccccgtgtggatcagcaccaccaccacccccaccaccagcggcagcaccgtgacccccagcagcgtgcccggcaccacccacacccccaccgtgctgaccaccaccaccaccaccgtggccaccggcagcatggccacccccagcagcagcacccagaccagcggcaccacccacaccccccccgtgcccaacaccaccgccaccacccacggcagaagcctgagccccagcagcccccacaccgtgagaaccgcctggaccagcgccaccagcggcaccctgggcaccacccacatcaccgagcccagcaccggcaccagccacacccccgccgccaccaccggcaccacccagcacagcacccccgccctgagcagcccccaccccagcagcagaaccaccgagagcccccccagccccggcaccaccacccccggccacaccaccgccaccagcagaaccaccgccaccgccacccccagcaagaccagaaccagcaccctgctgcccagcagccccaccagcgcccccatcaccaccgtggtgaccaccggctgcgagccccagtgcgcctggagcgagtggctggactacagctaccccatgcccggccccagcggcggcgacttcgacacctacagcaacatcagagccgccggcggcgccgtgtgcgagcagcccctgggcctggagtgcagagcccaggcccagcccggcgtgcccctgggcgagctgggccaggtggtggagtgcagcctggacttcggcctggtgtgcagaaacagagagcaggtgggcaagttcaagatgtgcttcaactacgagatcagagtgttctgctgcaactacggccactgccccagcacccccgccaccagcagcaccgccatgcccagcagcacccccggcaccacctggatcctgaccgagctgaccaccaccgccaccaccaccgccagcaccggcagcaccgccacccccagcagcacccccggcaccgcccccccccccaaggtgctgaccagccccgccaccacccccaccgccaccagcagcaaggccaccagcagcagcagccccagaaccgccaccaccctgcccgtgctgaccagcaccgccaccaagagcaccgccaccagcgtgacccccatccccagcagcaccctgggcaccaccggcaccctgcccgagcagaccaccacccccgtggccaccatgagcaccatccaccccagcagcacccccgagaccacccacaccagcaccgtgctgaccaccaaggccaccaccaccagagccaccagcagcaccagcacccccagcagcacccccggcaccacctggatcctgaccgagctgaccaccgccgccaccaccaccgccgccaccggccccaccgccacccccagcagcacccccggcaccacctggatcctgaccgagctgaccaccaccgccaccaccaccgccagcaccggcagcaccgccacccccagcagcacccccggcaccacctggatcctgaccgagcccagcaccaccgccaccgtgaccgtgcccaccggcagcaccgccaccgccagcagcacccaggccaccgccggcaccccccacgtgagcaccaccgccaccacccccaccgtgaccagcagcaaggccacccccagcagcagccccggcaccgccaccgccctgcccgccctgagaagcaccgccaccacccccaccgccaccagcttcaccgccatccccagcagcagcctgggcaccacctggaccagactgagccagaccaccacccccaccgccaccatgagcaccgccacccccagcagcacccccgagaccgtgcacaccagcaccgtgctgaccgccaccgccaccaccaccggcgccaccggcagcgtggccacccccagcagcacccccggcaccgcccacaccaccaaggtgcccaccaccaccaccaccggcttcaccgccacccccagcagcagccccggcaccgccctgaccccccccaccaccacccccatgagcaccatgagcaccatccacaccagcagcacccccgagaccacccacaccagcaccgtgctgaccaccaccgccaccatgaccagagccaccaacagcaccgccacccccagcagcaccctgggcaccaccagaatcctgaccgagctgaccaccaccgccaccaccaccgccgccaccggcagcaccgccaccctgagcagcacccccggcaccacctggatcctgaccgagcccagcaccatcgccaccgtgatggtgcccaccggcagcaccgccaccgccagcagcaccctgggcaccgcccacacccccaaggtggtgaccaccatggccaccatgcccaccgccaccgccagcaccgtgcccagcagcagcaccgtgggcaccaccagaacccccgccgtgctgcccagcagcctgcccaccttcagcgtgagcaccgtgagcagcagcgtgctgaccaccctgagacccaccggcttccccagcagccacttcagcaccccctgcttctgcagagccttcggccagttcttcagccccggcgaggtgatctacaacaagaccgacagagccggctgccacttctacgccgtgtgcaaccagcactgcgacatcgacagattccagggcgcctgccccaccagccccccccccgtgagcagcgcccccctgagcagccccagccccgcccccggctgcgacaacgccatccccctgagacaggtgaacgagacctggaccctggagaactgcaccgtggccagatgcgtgggcgacaacagagtggtgctgctggaccccaagcccgtggccaacgtgacctgcgtgaacaagcacctgcccatcaaggtgagcgaccccagccagccctgcgacttccactacgagtgcgagtgcgagtgcgtgggcggcagaggcatcacccccggcgccggcatctgcagcatgtggggcggcagccactacagcaccttcgacggcaccagctacaccttcagaggcaactgcacctacgtgctgatgagagagatccacgccagattcggcaacctgagcctgtacctggacaaccactactgcaccgccagcgccaccgccgccgccgccagatgccccagagccctgagcatccactacaagagcatggacatcgtgctgaccgtgaccatggtgcacggcaaggaggagggcctgatcctgttcgaccagatccccgtgagcagcggcttcagcaagaacggcgtgctggtgagcgtgctgggcaccaccaccatgagagtggacatccccgccctgggcgtgagcgtgaccttcaacggccaggtgttccaggccagactgccctacagcctgttccacaacaacaccgagggccagtgcggcacctgcaccaacaaccagagagacgactgcctgcagagagacggcaccaccgccgccagctgcaaggacatggccaagacctggctggtgcccgacagcagaaaggacggctgctgggcccccaccggcaccccccccaccgccagccccgccgcccccgtgagcagcacccccacccccaccccctgccccccccagcccctgtgcgacctgatgctgagccaggtgttcgccgagtgccacaacctggtgccccccggccccttcttcaacgcctgcatcagcgaccactgcagaggcagactggaggtgccctgccagagcctggaggcctacgccgagctgtgcagagccagaggcgtgtgcagcgactggagaggcgccaccggcggcctgtgcgacctgacctgcccccccaccaaggtgtacaagccctgcggccccatccagcccgccacctgcaacagcagaaaccagagcccccagctggagggcatggccgagggctgcttctgccccgaggaccagatcctgttcaacgcccacatgggcatctgcgtgcaggcctgcccctgcgtgggccccgacggcttccccaagttccccggcgagagatgggtgagcaactgccagagctgcgtgtgcgacgagggcagcgtgagcgtgcagtgcaagcccctgccctgcgacgcccagggccagccccccccctgcaacagacccggcttcgtgaccgtgaccagacccagagccgagaacccctgctgccccgagaccgtgtgcgtgtgcaacaccaccacctgcccccagagcctgcccgtgtgcccccccggccaggagagcatctgcacccaggaggagggcgactgctgccccaccttcagatgcagaccccagctgtgcagctacaacggcaccttctacggcgtgggcgccaccttccccggcgccctgccctgccacatgtgcacctgcctgagcggcgacacccaggaccccaccgtgcagtgccaggaggacgcctgcaacaacaccacctgcccccagggcttcgagtacaagagagtggccggccagtgctgcggcgagtgcgtgcagaccgcctgcctgacccccgacggccagcccgtgcagctgaacgagacctgggtgaacagccacgtggacaactgcaccgtgtacctgtgcgaggccgagggcggcgtgcacctgctgaccccccagcccgccagctgccccgacgtgagcagctgcagaggcagcctgagaaagaccggctgctgctacagctgcgaggaggacagctgccaggtgagaatcaacaccaccatcctgtggcaccagggctgcgagaccgaggtgaacatcaccttctgcgagggcagctgccccggcgccagcaagtacagcgccgaggcccaggccatgcagcaccagtgcacctgctgccaggagagaagagtgcacgaggagaccgtgcccctgcactgccccaacggcagcgccatcctgcacacctacacccacgccgtgcaggtgctgtgcggcctgctggcctggggcctgcaggccggcggccacatcagaggcgccgtgcaggacccccagcagcccctgaaggaccaggaggccagcggcaaggccagacagggcggcggctacagacagaccgtggcctggggcgacaagagcaacgccagagcctggctgcagaagcccgtggtgtgggtgcagagcggcgccttccccacccccggccccgccagcgccctgtgcccctggtag

SEQ ID NO: 128620 - DNA, 17298 bp, Artificial Sequence
  derived and/or modified sequence
atgggcgcccccagcgcctgcagaaccctggtgctggccctggccgccatgctggtggtgccccaggccgagacccagggccccgtggagcccagctgggagaacgccggccacaccatggacggcggcgcccccaccagcagccccaccagaagagtgagcttcgtgccccccgtgaccgtgttccccagcctgagccccctgaaccccgcccacaacggcagagtgtgcagcacctggggcgacttccactacaagaccttcgacggcgacgtgttcagattccccggcctgtgcaactacgtgttcagcgagcactgcagagccgcctacgaggacttcaacgtgcagctgagaagaggcctggtgggcagcagacccgtggtgaccagagtggtgatcaaggcccagggcctggtgctggaggccagcaacggcagcgtgctgatcaacggccagagagaggagctgccctacagcagaaccggcctgctggtggagcagagcggcgactacatcaaggtgagcatcagactggtgctgaccttcctgtggaacggcgaggacagcgccctgctggagctggaccccaagtacgccaaccagacctgcggcctgtgcggcgacttcaacggcctgcccgccttcaacgagttctacgcccacaacgccagactgacccccctgcagttcggcaacctgcagaagctggacggccccaccgagcagtgccccgaccccctgcccctgcccgccggcaactgcaccgacgaggagggcatctgccacagaaccctgctgggccccgccttcgccgagtgccacgccctggtggacagcaccgcctacctggccgcctgcgcccaggacctgtgcagatgccccacctgcccctgcgccaccttcgtggagtacagcagacagtgcgcccacgccggcggccagcccagaaactggagatgccccgagctgtgccccagaacctgccccctgaacatgcagcaccaggagtgcggcagcccctgcaccgacacctgcagcaacccccagagagcccagctgtgcgaggaccactgcgtggacggctgcttctgcccccccggcagaagctgcaccgtgctggacgacatcacccacagcggctgcctgcccctgggccagtgcccctgcacccacggcggcagaacctacagccccggcaccagcttcaacaccacctgcagcagctgcacctgcagcggcggcctgtggcagtgccaggacctgccctgccccggcacctgcagcgtgcagggcggcgcccacatcagcacctacgacgagaagctgtacgacctgcacggcgactgcagctacgtgctgagcaagaagtgcgccgacagcagcttcaccgtgctggccgagctgagaaagtgcggcctgaccgacaacgagaactgcctgaaggccgtgaccctgagcctggacggcggcgacaccgccatcagagtgcaggccgacggcggcgtgttcctgaacagcatctacacccagctgcccctgagcgccgccaacatcaccctgttcacccccagcagcttcttcatcgtggtgcagaccggcctgggcctgcagctgctggtgcagctggtgcccctgatgcaggtgttcgtgagactggaccccgcccaccagggccagatgtgcggcctgtgcggcaacttcaaccagaaccaggccgacgacttcaccgccctgagcggcgtggtggaggccaccggcgccgccttcgccaacacctggaaggcccaggccgcctgcgccaacgccagaaacagcttcgaggacccctgcagcctgagcgtggagaacgagaactacgccagacactggtgcagcagactgaccgaccccaacagcgccttcagcagatgccacagcatcatcaaccccaagcccttccacagcaactgcatgttcgacacctgcaactgcgagagaagcgaggactgcctgtgcgccgccctgagcagctacgtgcacgcctgcgccgccaagggcgtgcagctgagcgactggagagacggcgtgtgcaccaagtacatgcagaactgccccaagagccagagatacgcctacgtggtggacgcctgccagcccacctgcagaggcctgagcgaggccgacgtgacctgcagcgtgagcttcgtgcccgtggacggctgcacctgccccgccggcaccttcctgaacgacgccggcgcctgcgtgcccgcccaggagtgcccctgctacgcccacggcaccgtgctggcccccggcgaggtggtgcacgacgagggcgccgtgtgcagctgcaccggcggcaagctgagctgcctgggcgccagcctgcagaagagcaccggctgcgccgcccccatggtgtacctggactgcagcaacagcagcgccggcacccccggcgccgagtgcctgagaagctgccacaccctggacgtgggctgcttcagcacccactgcgtgagcggctgcgtgtgcccccccggcctggtgagcgacggcagcggcggctgcatcgccgaggaggactgcccctgcgtgcacaacgaggccacctacaagcccggcgagaccatcagagtggactgcaacacctgcacctgcagaaacagaagatgggagtgcagccacagactgtgcctgggcacctgcgtggcctacggcgacggccacttcatcaccttcgacggcgacagatacagcttcgagggcagctgcgagtacatcctggcccaggactactgcggcgacaacaccacccacggcaccttcagaatcgtgaccgagaacatcccctgcggcaccaccggcaccacctgcagcaaggccatcaagctgttcgtggagagctacgagctgatcctgcaggagggcaccttcaaggccgtggccagaggccccggcggcgaccccccctacaagatcagatacatgggcatcttcctggtgatcgagacccacggcatggccgtgagctgggacagaaagaccagcgtgttcatcagactgcaccaggactacaagggcagagtgtgcggcctgtgcggcaacttcgacgacaacgccatcaacgacttcgccaccagaagcagaagcgtggtgggcgacgccctggagttcggcaacagctggaagctgagccccagctgccccgacgccctggcccccaaggacccctgcaccgccaaccccttcagaaagagctgggcccagaagcagtgcagcatcctgcacggccccaccttcgccgcctgcagaagccaggtggacagcaccaagtactacgaggcctgcgtgaacgacgcctgcgcctgcgacagcggcggcgactgcgagtgcttctgcaccgccgtggccgcctacgcccaggcctgccacgacgccggcctgtgcgtgagctggagaacccccgacacctgccccctgttctgcgacttctacaacccccacggcggctgcgagtggcactaccagccctgcggcgccccctgcctgaagacctgcagaaaccccagcggccactgcctggtggacctgcccggcctggagggctgctaccccaagtgcccccccagccagcccttcttcaacgaggaccagatgaagtgcgtggcccagtgcggctgctacgacaaggacggcaactactacgacgtgggcgccagagtgcccaccgccgagaactgccagagctgcaactgcacccccagcggcatccagtgcgcccacagcctggaggcctgcacctgcacctacgaggacagaacctacagctaccaggacgtgatctacaacaccaccgacggcctgggcgcctgcctgatcgccatctgcggcagcaacggcaccatcatcagaaaggccgtggcctgccccggcacccccgccaccacccccttcaccttcaccaccgcctgggtgccccacagcaccaccagccccgccctgcccgtgagcaccgtgtgcgtgagagaggtgtgcagatggagcagctggtacaacggccacagacccgagcccggcctgggcggcggcgacttcgagaccttcgagaacctgagacagagaggctaccaggtgtgccccgtgctggccgacatcgagtgcagagccgcccagctgcccgacatgcccctggaggagctgggccagcaggtggactgcgacagaatgagaggcctgatgtgcgccaacagccagcagagcccccccctgtgccacgactacgagctgagagtgctgtgctgcgagtacgtgccctgcggccccagccccgcccccggcaccagcccccagcccagcctgagcgccagcaccgagcccgccgtgcccacccccacccagaccaccgccaccgagaagaccaccctgtgggtgacccccagcatcagaagcaccgccgccctgaccagccagaccggcagcagcagcggccccgtgaccgtgacccccagcgcccccggcaccaccacctgccagcccagatgccagtggaccgagtggttcgacgaggactaccccaagagcgagcagctgggcggcgacgtggagagctacgacaagatcagagccgccggcggccacctgtgccagcagcccaaggacatcgagtgccaggccgagagcttccccaactggaccctggcccaggtgggccagaaggtgcactgcgacgtgcacttcggcctggtgtgcagaaactgggagcaggagggcgtgttcaagatgtgctacaactacagaatcagagtgctgtgctgcagcgacgaccactgcagaggcagagccaccacccccccccccaccaccgagctggagaccgccaccaccaccaccacccaggccctgttcagcaccccccagcccaccagcagccccggcctgaccagagccccccccgccagcaccaccgccgtgcccaccctgagcgagggcctgaccagccccagatacaccagcaccctgggcaccgccaccaccggcggccccaccacccccgccggcagcaccgagcccaccgtgcccggcgtggccaccagcaccctgcccaccagaagcgccctgcccggcaccaccggcagcctgggcacctggagacccagccagccccccaccctggcccccaccaccatggccaccagcagagccagacccaccggcaccgccagcaccgccagcaaggagcccctgaccaccagcctggcccccaccctgaccagcgagctgagcaccagccaggccgagaccagcacccccagaaccgagaccaccatgagccccctgaccaacaccaccaccagccagggcaccaccagatgccagcccaagtgcgagtggaccgagtggttcgacgtggacttccccaccagcggcgtggccggcggcgacatggagaccttcgagaacatcagagccgccggcggcaagatgtgctgggcccccaagagcatcgagtgcagagccgagaactaccccgaggtgagcatcgaccaggtgggccaggtgctgacctgcagcctggagaccggcctgacctgcaagaacgaggaccagaccggcagattcaacatgtgcttcaactacaacgtgagagtgctgtgctgcgacgactacagccactgccccagcacccccgccaccagcagcaccgccacccccagcagcacccccggcaccacctggatcctgaccaagcccaccaccaccgccaccaccaccgccagcaccggcagcaccgccacccccaccagcaccctgagaaccgcccccccccccaaggtgctgaccaccaccgccaccacccccaccgtgaccagcagcaaggccacccccagcagcagccccggcaccgccaccgccctgcccgccctgagaagcaccgccaccacccccaccgccaccagcgtgacccccatccccagcagcagcctgggcaccacctggaccagactgagccagaccaccacccccaccgccaccatgagcaccgccacccccagcagcacccccgagaccgcccacaccagcaccgtgctgaccgccaccgccaccaccaccggcgccaccggcagcgtggccacccccagcagcacccccggcaccgcccacaccaccaaggtgcccaccaccaccaccaccggcttcaccgccacccccagcagcagccccggcaccgccctgaccccccccgtgtggatcagcaccaccaccacccccaccaccagaggcagcaccgtgacccccagcagcatccccggcaccacccacaccgccaccgtgctgaccaccaccaccaccaccgtggccaccggcagcatggccacccccagcagcagcacccagaccagcggcaccccccccagcctgaccaccaccgccaccaccatcaccgccaccggcagcaccaccaaccccagcagcacccccggcaccacccccatcccccccgtgctgaccaccaccgccaccacccccgccgccaccagcaacaccgtgacccccagcagcgccctgggcaccacccacaccccccccgtgcccaacaccatggccaccacccacggcagaagcctgccccccagcagcccccacaccgtgagaaccgcctggaccagcgccaccagcggcatcctgggcaccacccacatcaccgagcccagcaccgtgaccagccacaccctggccgccaccaccggcaccacccagcacagcacccccgccctgagcagcccccaccccagcagcagaaccaccgagagcccccccagccccggcaccaccacccccggccacaccaccgccaccagcagaaccaccgccaccgccacccccagcaagaccagaaccagcaccctgctgcccagcagccccaccagcgcccccatcaccaccgtggtgaccatgggctgcgagccccagtgcgcctggagcgagtggctggactacagctaccccatgcccggccccagcggcggcgacttcgacacctacagcaacatcagagccgccggcggcgccgtgtgcgagcagcccctgggcctggagtgcagagcccaggcccagcccggcgtgcccctgagagagctgggccaggtggtggagtgcagcctggacttcggcctggtgtgcagaaacagagagcaggtgggcaagttcaagatgtgcttcaactacgagatcagagtgttctgctgcaactacggccactgccccagcacccccgccaccagcagcaccgccatgcccagcagcacccccggcaccacctggatcctgaccgagctgaccaccaccgccaccaccaccgagagcaccggcagcaccgccacccccagcagcacccccggcaccacctggatcctgaccgagcccagcaccaccgccaccgtgaccgtgcccaccggcagcaccgccaccgccagcagcacccaggccaccgccggcaccccccacgtgagcaccaccgccaccacccccaccgtgaccagcagcaaggccacccccttcagcagccccggcaccgccaccgccctgcccgccctgagaagcaccgccaccacccccaccgccaccagcttcaccgccatccccagcagcagcctgggcaccacctggaccagactgagccagaccaccacccccaccgccaccatgagcaccgccacccccagcagcacccccgagaccgtgcacaccagcaccgtgctgaccaccaccgccaccaccaccggcgccaccggcagcgtggccacccccagcagcacccccggcaccgcccacaccaccaaggtgctgaccaccaccaccaccggcttcaccgccacccccagcagcagccccggcaccgccagaaccctgcccgtgtggatcagcaccaccaccacccccaccaccagaggcagcaccgtgacccccagcagcatccccggcaccacccacacccccaccgtgctgaccaccaccaccaccaccgtggccaccggcagcatggccacccccagcagcagcacccagaccagcggcaccccccccagcctgaccaccaccgccaccaccatcaccgccaccggcagcaccaccaaccccagcagcacccccggcaccacccccatcccccccgtgctgaccaccaccgccaccacccccgccgccaccagcagcaccgtgacccccagcagcgccctgggcaccacccacaccccccccgtgcccaacaccaccgccaccacccacggcagaagcctgagccccagcagcccccacaccgtgagaaccgcctggaccagcgccaccagcggcaccctgggcaccacccacatcaccgagcccagcaccggcaccagccacacccccgccgccaccaccggcaccacccagcacagcacccccgccctgagcagcccccaccccagcagcagaaccaccgagagcccccccagccccggcaccaccacccccggccacaccagagccaccagcagaaccaccgccaccgccacccccagcaagaccagaaccagcaccctgctgcccagcagccccaccagcgcccccatcaccaccgtggtgaccatgggctgcgagccccagtgcgcctggagcgagtggctggactacagctaccccatgcccggccccagcggcggcgacttcgacacctacagcaacatcagagccgccggcggcgccgtgtgcgagcagcccctgggcctggagtgcagagcccaggcccagcccggcgtgcccctgagagagctgggccaggtggtggagtgcagcctggacttcggcctggtgtgcagaaacagagagcaggtgggcaagttcaagatgtgcttcaactacgagatcagagtgttctgctgcaactacggccactgccccagcacccccgccaccagcagcaccgccacccccagcagcacccccggcaccacctggatcctgaccgagcagaccaccgccgccaccaccaccgccaccaccggcagcaccgccatccccagcagcacccccggcaccgcccccccccccaaggtgctgaccagcaccgccaccacccccaccgccaccagcagcaaggccaccagcagcagcagccccagaaccgccaccaccctgcccgtgctgaccagcaccgccaccaagagcaccgccaccagcttcacccccatccccagcttcaccctgggcaccaccggcaccctgcccgagcagaccaccacccccatggccaccatgagcaccatccaccccagcagcacccccgagaccacccacaccagcaccgtgctgaccaccaaggccaccaccaccagagccaccagcagcatgagcacccccagcagcacccccggcaccacctggatcctgaccgagctgaccaccgccgccaccaccaccgccgccaccggccccaccgccacccccagcagcacccccggcaccacctggatcctgaccgagcccagcaccaccgccaccgtgaccgtgcccaccggcagcaccgccaccgccagcagcaccagagccaccgccggcaccctgaaggtgctgaccagcaccgccaccacccccaccgtgatcagcagcagagccacccccagcagcagccccggcaccgccaccgccctgcccgccctgagaagcaccgccaccacccccaccgccaccagcgtgaccgccatccccagcagcagcctgggcaccgcctggaccagactgagccagaccaccacccccaccgccaccatgagcaccgccacccccagcagcacccccgagaccgtgcacaccagcaccgtgctgaccaccaccaccaccaccaccagagccaccggcagcgtggccacccccagcagcacccccggcaccgcccacaccaccaaggtgcccaccaccaccaccaccggcttcaccgccacccccagcagcagccccggcaccgccctgaccccccccgtgtggatcagcaccaccaccacccccaccaccagaggcagcaccgtgacccccagcagcatccccggcaccacccacaccgccaccgtgctgaccaccaccaccaccaccgtggccaccggcagcatggccacccccagcagcagcacccagaccagcggcaccccccccagcctgaccaccaccgccaccaccatcaccgccaccggcagcaccaccaaccccagcagcacccccggcaccacccccatcccccccgtgctgaccaccaccgccaccacccccgccgccaccagcagcaccgtgacccccagcagcgccctgggcaccacccacaccccccccgtgcccaacaccaccgccaccacccacggcagaagcctgccccccagcagcccccacaccgtgagaaccgcctggaccagcgccaccagcggcatcctgggcaccacccacatcaccgagcccagcaccgtgaccagccacacccccgccgccaccaccagcaccacccagcacagcacccccgccctgagcagcccccaccccagcagcagaaccaccgagagcccccccagccccggcaccaccacccccggccacaccagaggcaccagcagaaccaccgccaccgccacccccagcaagaccagaaccagcaccctgctgcccagcagccccaccagcgcccccatcaccaccgtggtgaccaccggctgcgagccccagtgcgcctggagcgagtggctggactacagctaccccatgcccggccccagcggcggcgacttcgacacctacagcaacatcagagccgccggcggcgccgtgtgcgagcagcccctgggcctggagtgcagagcccaggcccagcccggcgtgcccctgagagagctgggccaggtggtggagtgcagcctggacttcggcctggtgtgcagaaacagagagcaggtgggcaagttcaagatgtgcttcaactacgagatcagagtgttctgctgcaactacggccactgccccagcacccccgccaccagcagcaccgccacccccagcagcacccccggcaccacctggatcctgaccaagctgaccaccaccgccaccaccaccgagagcaccggcagcaccgccacccccagcagcacccccggcaccacctggatcctgaccgagcccagcaccaccgccaccgtgaccgtgcccaccggcagcaccgccaccgccagcagcacccaggccaccgccggcaccccccacgtgagcaccaccgccaccacccccaccgtgaccagcagcaaggccacccccttcagcagccccggcaccgccaccgccctgcccgccctgagaagcaccgccaccacccccaccgccaccagcttcaccgccatccccagcagcagcctgggcaccacctggaccagactgagccagaccaccacccccaccgccaccatgagcaccgccacccccagcagcacccccgagaccgcccacaccagcaccgtgctgaccaccaccgccaccaccaccagagccaccggcagcgtggccacccccagcagcacccccggcaccgcccacaccaccaaggtgcccaccaccaccaccaccggcttcaccgtgacccccagcagcagccccggcaccgccagaaccccccccgtgtggatcagcaccaccaccacccccaccaccagcggcagcaccgtgacccccagcagcgtgcccggcaccacccacacccccaccgtgctgaccaccaccaccaccaccgtggccaccggcagcatggccacccccagcagcagcacccagaccagcggcaccccccccagcctgatcaccaccgccaccaccatcaccgccaccggcagcaccaccaaccccagcagcacccccggcaccacccccatcccccccgtgctgaccaccaccgccaccacccccgccgccaccagcagcaccgtgacccccagcagcgccctgggcaccacccacaccccccccgtgcccaacaccaccgccaccacccacggcagaagcctgagccccagcagcccccacaccgtgagaaccgcctggaccagcgccaccagcggcaccctgggcaccacccacatcaccgagcccagcaccggcaccagccacacccccgccgccaccaccggcaccacccagcacagcacccccgccctgagcagcccccaccccagcagcagaaccaccgagagcccccccagccccggcaccaccacccccggccacaccaccgccaccagcagaaccaccgccaccgccacccccagcaagaccagaaccagcaccctgctgcccagcagccccaccagcgcccccatcaccaccgtggtgaccaccggctgcgagccccagtgcgcctggagcgagtggctggactacagctaccccatgcccggccccagcggcggcgacttcgacacctacagcaacatcagagccgccggcggcgccgtgtgcgagcagcccctgggcctggagtgcagagcccaggcccagcccggcgtgcccctgggcgagctgggccaggtggtggagtgcagcctggacttcggcctggtgtgcagaaacagagagcaggtgggcaagttcaagatgtgcttcaactacgagatcagagtgttctgctgcaactacggccactgccccagcacccccgccaccagcagcaccgccatgcccagcagcacccccggcaccacctggatcctgaccgagctgaccaccaccgccaccaccaccgccagcaccggcagcaccgccacccccagcagcacccccggcaccgcccccccccccaaggtgctgaccagccccgccaccacccccaccgccaccagcagcaaggccaccagcagcagcagccccagaaccgccaccaccctgcccgtgctgaccagcaccgccaccaagagcaccgccaccagcgtgacccccatccccagcagcaccctgggcaccaccggcaccctgcccgagcagaccaccacccccgtggccaccatgagcaccatccaccccagcagcacccccgagaccacccacaccagcaccgtgctgaccaccaaggccaccaccaccagagccaccagcagcaccagcacccccagcagcacccccggcaccacctggatcctgaccgagctgaccaccgccgccaccaccaccgccgccaccggccccaccgccacccccagcagcacccccggcaccacctggatcctgaccgagctgaccaccaccgccaccaccaccgccagcaccggcagcaccgccacccccagcagcacccccggcaccacctggatcctgaccgagcccagcaccaccgccaccgtgaccgtgcccaccggcagcaccgccaccgccagcagcacccaggccaccgccggcaccccccacgtgagcaccaccgccaccacccccaccgtgaccagcagcaaggccacccccagcagcagccccggcaccgccaccgccctgcccgccctgagaagcaccgccaccacccccaccgccaccagcttcaccgccatccccagcagcagcctgggcaccacctggaccagactgagccagaccaccacccccaccgccaccatgagcaccgccacccccagcagcacccccgagaccgtgcacaccagcaccgtgctgaccgccaccgccaccaccaccggcgccaccggcagcgtggccacccccagcagcacccccggcaccgcccacaccaccaaggtgcccaccaccaccaccaccggcttcaccgccacccccagcagcagccccggcaccgccctgaccccccccgtgtggatcagcaccaccaccacccccaccaccaccacccccaccaccagcggcagcaccgtgacccccagcagcatccccggcaccacccacaccgccagagtgctgaccaccaccaccaccaccgtggccaccggcagcatggccacccccagcagcagcacccagaccagcggcaccccccccagcctgaccaccaccgccaccaccatcaccgccaccggcagcaccaccaaccccagcagcacccccggcaccacccccatcacccccgtgctgaccagcaccgccaccacccccgccgccaccagcagcaaggccaccagcagcagcagccccagaaccgccaccaccctgcccgtgctgaccagcaccgccaccaagagcaccgccaccagcttcacccccatccccagcagcaccctgtggaccacctggaccgtgcccgcccagaccaccacccccatgagcaccatgagcaccatccacaccagcagcacccccgagaccacccacaccagcaccgtgctgaccaccaccgccaccatgaccagagccaccaacagcaccgccacccccagcagcaccctgggcaccaccagaatcctgaccgagctgaccaccaccgccaccaccaccgccgccaccggcagcaccgccaccctgagcagcacccccggcaccacctggatcctgaccgagcccagcaccatcgccaccgtgatggtgcccaccggcagcaccgccaccgccagcagcaccctgggcaccgcccacacccccaaggtggtgaccaccatggccaccatgcccaccgccaccgccagcaccgtgcccagcagcagcaccgtgggcaccaccagaacccccgccgtgctgcccagcagcctgcccaccttcagcgtgagcaccgtgagcagcagcgtgctgaccaccctgagacccaccggcttccccagcagccacttcagcaccccctgcttctgcagagccttcggccagttcttcagccccggcgaggtgatctacaacaagaccgacagagccggctgccacttctacgccgtgtgcaaccagcactgcgacatcgacagattccagggcgcctgccccaccagccccccccccgtgagcagcgcccccctgagcagccccagccccgcccccggctgcgacaacgccatccccctgagacaggtgaacgagacctggaccctggagaactgcaccgtggccagatgcgtgggcgacaacagagtggtgctgctggaccccaagcccgtggccaacgtgacctgcgtgaacaagcacctgcccatcaaggtgagcgaccccagccagccctgcgacttccactacgagtgcgagtgcatctgcagcatgtggggcggcagccactacagcaccttcgacggcaccagctacaccttcagaggcaactgcacctacgtgctgatgagagagatccacgccagattcggcaacctgagcctgtacctggacaaccactactgcaccgccagcgccaccgccgccgccgccagatgccccagagccctgagcatccactacaagagcatggacatcgtgctgaccgtgaccatggtgcacggcaaggaggagggcctgatcctgttcgaccagatccccgtgagcagcggcttcagcaagaacggcgtgctggtgagcgtgctgggcaccaccaccatgagagtggacatccccgccctgggcgtgagcgtgaccttcaacggccaggtgttccaggccagactgccctacagcctgttccacaacaacaccgagggccagtgcggcacctgcaccaacaaccagagagacgactgcctgcagagagacggcaccaccgccgccagctgcaaggacatggccaagacctggctggtgcccgacagcagaaaggacggctgctgggcccccaccggcaccccccccaccgccagccccgccgcccccgtgagcagcacccccacccccaccccctgccccccccagcccctgtgcgacctgatgctgagccaggtgttcgccgagtgccacaacctggtgccccccggccccttcttcaacgcctgcatcagcgaccactgcagaggcagactggaggtgccctgccagagcctggaggcctacgccgagctgtgcagagccagaggcgtgtgcagcgactggagaggcgccaccggcggcctgtgcgacctgacctgcccccccaccaaggtgtacaagccctgcggccccatccagcccgccacctgcaacagcagaaaccagagcccccagctggagggcatggccgagggctgcttctgccccgaggaccagatcctgttcaacgcccacatgggcatctgcgtgcaggcctgcccctgcgtgggccccgacggcttccccaagttccccggcgagagatgggtgagcaactgccagagctgcgtgtgcgacgagggcagcgtgagcgtgcagtgcaagcccctgccctgcgacgcccagggccagccccccccctgcaacagacccggcttcgtgaccgtgaccagacccagagccgagaacccctgctgccccgagaccgtgtgcgtgtgcaacaccaccacctgcccccagagcctgcccgtgtgcccccccggccaggagagcatctgcacccaggaggagggcgactgctgccccaccttcagatgcagaccccagctgtgcagctacaacggcaccttctacggcgtgggcgccaccttccccggcgccctgccctgccacatgtgcacctgcctgagcggcgacacccaggaccccaccgtgcagtgccaggaggacgcctgcaacaacaccacctgcccccagggcttcgagtacaagagagtggccggccagtgctgcggcgagtgcgtgcagaccgcctgcctgacccccgacggccagcccgtgcagctgaacgagacctgggtgaacagccacgtggacaactgcaccgtgtacctgtgcgaggccgagggcggcgtgcacctgctgaccccccagcccgccagctgccccgacgtgagcagctgcagaggcagcctgagaaagaccggctgctgctacagctgcgaggaggacagctgccaggtgagaatcaacaccaccatcctgtggcaccagggctgcgagaccgaggtgaacatcaccttctgcgagggcagctgccccggcgccagcaagtacagcgccgaggcccaggccatgcagcaccagtgcacctgctgccaggagagaagagtgcacgaggagaccgtgcccctgcactgccccaacggcagcgccatcctgcacacctacacccacgtggacgagtgcggctgcacccccttctgcgtgcccgcccccatggcccccccccacaccagaggcttccccgcccaggaggccaccgccgtgtag

SEQ ID NO: 128621 - DNA, 17289 bp, Artificial Sequence
  derived and/or modified sequence
atgggcgcccccagcgcctgcagaaccctggtgctggccctggccgccatgctggtggtgccccaggccgagacccagggccccgtggagcccagctgggagaacgccggccacaccatggacggcggcgcccccaccagcagccccaccagaagagtgagcttcgtgccccccgtgaccgtgttccccagcctgagccccctgaaccccgcccacaacggcagagtgtgcagcacctggggcgacttccactacaagaccttcgacggcgacgtgttcagattccccggcctgtgcaactacgtgttcagcgagcactgcagagccgcctacgaggacttcaacgtgcagctgagaagaggcctggtgggcagcagacccgtggtgaccagagtggtgatcaaggcccagggcctggtgctggaggccagcaacggcagcgtgctgatcaacggccagagagaggagctgccctacagcagaaccggcctgctggtggagcagagcggcgactacatcaaggtgagcatcagactggtgctgaccttcctgtggaacggcgaggacagcgccctgctggagctggaccccaagtacgccaaccagacctgcggcctgtgcggcgacttcaacggcctgcccgccttcaacgagttctacgcccacaacgccagactgacccccctgcagttcggcaacctgcagaagctggacggccccaccgagcagtgccccgaccccctgcccctgcccgccggcaactgcaccgacgaggagggcatctgccacagaaccctgctgggccccgccttcgccgagtgccacgccctggtggacagcaccgcctacctggccgcctgcgcccaggacctgtgcagatgccccacctgcccctgcgccaccttcgtggagtacagcagacagtgcgcccacgccggcggccagcccagaaactggagatgccccgagctgtgccccagaacctgccccctgaacatgcagcaccaggagtgcggcagcccctgcaccgacacctgcagcaacccccagagagcccagctgtgcgaggaccactgcgtggacggctgcttctgcccccccggcaccgtgctggacgacatcacccacagcggctgcctgcccctgggccagtgcccctgcacccacggcggcagaacctacagccccggcaccagcttcaacaccacctgcagcagctgcacctgcagcggcggcctgtggcagtgccaggacctgccctgccccggcacctgcagcgtgcagggcggcgcccacatcagcacctacgacgagaagctgtacgacctgcacggcgactgcagctacgtgctgagcaagaagtgcgccgacagcagcttcaccgtgctggccgagctgagaaagtgcggcctgaccgacaacgagaactgcctgaaggccgtgaccctgagcctggacggcggcgacaccgccatcagagtgcaggccgacggcggcgtgttcctgaacagcatctacacccagctgcccctgagcgccgccaacatcaccctgttcacccccagcagcttcttcatcgtggtgcagaccggcctgggcctgcagctgctggtgcagctggtgcccctgatgcaggtgttcgtgagactggaccccgcccaccagggccagatgtgcggcctgtgcggcaacttcaaccagaaccaggccgacgacttcaccgccctgagcggcgtggtggaggccaccggcgccgccttcgccaacacctggaaggcccaggccgcctgcgccaacgccagaaacagcttcgaggacccctgcagcctgagcgtggagaacgagaactacgccagacactggtgcagcagactgaccgaccccaacagcgccttcagcagatgccacagcatcatcaaccccaagcccttccacagcaactgcatgttcgacacctgcaactgcgagagaagcgaggactgcctgtgcgccgccctgagcagctacgtgcacgcctgcgccgccaagggcgtgcagctgagcgactggagagacggcgtgtgcaccaagtacatgcagaactgccccaagagccagagatacgcctacgtggtggacgcctgccagcccacctgcagaggcctgagcgaggccgacgtgacctgcagcgtgagcttcgtgcccgtggacggctgcacctgccccgccggcaccttcctgaacgacgccggcgcctgcgtgcccgcccaggagtgcccctgctacgcccacggcaccgtgctggcccccggcgaggtggtgcacgacgagggcgccgtgtgcagctgcaccggcggcaagctgagctgcctgggcgccagcctgcagaagagcaccggctgcgccgcccccatggtgtacctggactgcagcaacagcagcgccggcacccccggcgccgagtgcctgagaagctgccacaccctggacgtgggctgcttcagcacccactgcgtgagcggctgcgtgtgcccccccggcctggtgagcgacggcagcggcggctgcatcgccgaggaggactgcccctgcgtgcacaacgaggccacctacaagcccggcgagaccatcagagtggactgcaacacctgcacctgcagaaacagaagatgggagtgcagccacagactgtgcctgggcacctgcgtggcctacggcgacggccacttcatcaccttcgacggcgacagatacagcttcgagggcagctgcgagtacatcctggcccaggactactgcggcgacaacaccacccacggcaccttcagaatcgtgaccgagaacatcccctgcggcaccaccggcaccacctgcagcaaggccatcaagctgttcgtggagagctacgagctgatcctgcaggagggcaccttcaaggccgtggccagaggccccggcggcgaccccccctacaagatcagatacatgggcatcttcctggtgatcgagacccacggcatggccgtgagctgggacagaaagaccagcgtgttcatcagactgcaccaggactacaagggcagagtgtgcggcctgtgcggcaacttcgacgacaacgccatcaacgacttcgccaccagaagcagaagcgtggtgggcgacgccctggagttcggcaacagctggaagctgagccccagctgccccgacgccctggcccccaaggacccctgcaccgccaaccccttcagaaagagctgggcccagaagcagtgcagcatcctgcacggccccaccttcgccgcctgcagaagccaggtggacagcaccaagtactacgaggcctgcgtgaacgacgcctgcgcctgcgacagcggcggcgactgcgagtgcttctgcaccgccgtggccgcctacgcccaggcctgccacgacgccggcctgtgcgtgagctggagaacccccgacacctgccccctgttctgcgacttctacaacccccacggcggctgcgagtggcactaccagccctgcggcgccccctgcctgaagacctgcagaaaccccagcggccactgcctggtggacctgcccggcctggagggctgctaccccaagtgcccccccagccagcccttcttcaacgaggaccagatgaagtgcgtggcccagtgcggctgctacgacaaggacggcaactactacgacgtgggcgccagagtgcccaccgccgagaactgccagagctgcaactgcacccccagcggcatccagtgcgcccacagcctggaggcctgcacctgcacctacgaggacagaacctacagctaccaggacgtgatctacaacaccaccgacggcctgggcgcctgcctgatcgccatctgcggcagcaacggcaccatcatcagaaaggccgtggcctgccccggcacccccgccaccacccccttcaccttcaccaccgcctgggtgccccacagcaccaccagccccgccctgcccgtgagcaccgtgtgcgtgagagaggtgtgcagatggagcagctggtacaacggccacagacccgagcccggcctgggcggcggcgacttcgagaccttcgagaacctgagacagagaggctaccaggtgtgccccgtgctggccgacatcgagtgcagagccgcccagctgcccgacatgcccctggaggagctgggccagcaggtggactgcgacagaatgagaggcctgatgtgcgccaacagccagcagagcccccccctgtgccacgactacgagctgagagtgctgtgctgcgagtacgtgccctgcggccccagccccgcccccggcaccagcccccagcccagcctgagcgccagcaccgagcccgccgtgcccacccccacccagaccaccgccaccgagaagaccaccctgtgggtgacccccagcatcagaagcaccgccgccctgaccagccagaccggcagcagcagcggccccgtgaccgtgacccccagcgcccccggcaccaccacctgccagcccagatgccagtggaccgagtggttcgacgaggactaccccaagagcgagcagctgggcggcgacgtggagagctacgacaagatcagagccgccggcggccacctgtgccagcagcccaaggacatcgagtgccaggccgagagcttccccaactggaccctggcccaggtgggccagaaggtgcactgcgacgtgcacttcggcctggtgtgcagaaactgggagcaggagggcgtgttcaagatgtgctacaactacagaatcagagtgctgtgctgcagcgacgaccactgcagaggcagagccaccacccccccccccaccaccgagctggagaccgccaccaccaccaccacccaggccctgttcagcaccccccagcccaccagcagccccggcctgaccagagccccccccgccagcaccaccgccgtgcccaccctgagcgagggcctgaccagccccagatacaccagcaccctgggcaccgccaccaccggcggccccaccacccccgccggcagcaccgagcccaccgtgcccggcgtggccaccagcaccctgcccaccagaagcgccctgcccggcaccaccggcagcctgggcacctggagacccagccagccccccaccctggcccccaccaccatggccaccagcagagccagacccaccggcaccgccagcaccgccagcaaggagcccctgaccaccagcctggcccccaccctgaccagcgagctgagcaccagccaggccgagaccagcacccccagaaccgagaccaccatgagccccctgaccaacaccaccaccagccagggcaccaccagatgccagcccaagtgcgagtggaccgagtggttcgacgtggacttccccaccagcggcgtggccggcggcgacatggagaccttcgagaacatcagagccgccggcggcaagatgtgctgggcccccaagagcatcgagtgcagagccgagaactaccccgaggtgagcatcgaccaggtgggccaggtgctgacctgcagcctggagaccggcctgacctgcaagaacgaggaccagaccggcagattcaacatgtgcttcaactacaacgtgagagtgctgtgctgcgacgactacagccactgccccagcacccccgccaccagcagcaccgccacccccagcagcacccccggcaccacctggatcctgaccaagcccaccaccaccgccaccaccaccgccagcaccggcagcaccgccacccccaccagcaccctgagaaccgcccccccccccaaggtgctgaccaccaccgccaccacccccaccgtgaccagcagcaaggccacccccagcagcagccccggcaccgccaccgccctgcccgccctgagaagcaccgccaccacccccaccgccaccagcgtgacccccatccccagcagcagcctgggcaccacctggaccagactgagccagaccaccacccccaccgccaccatgagcaccgccacccccagcagcacccccgagaccgcccacaccagcaccgtgctgaccgccaccgccaccaccaccggcgccaccggcagcgtggccacccccagcagcacccccggcaccgcccacaccaccaaggtgcccaccaccaccaccaccggcttcaccgccacccccagcagcagccccggcaccgccctgaccccccccgtgtggatcagcaccaccaccacccccaccaccagaggcagcaccgtgacccccagcagcatccccggcaccacccacaccgccaccgtgctgaccaccaccaccaccaccgtggccaccggcagcatggccacccccagcagcagcacccagaccagcggcaccccccccagcctgaccaccaccgccaccaccatcaccgccaccggcagcaccaccaaccccagcagcacccccggcaccacccccatcccccccgtgctgaccaccaccgccaccacccccgccgccaccagcaacaccgtgacccccagcagcgccctgggcaccacccacaccccccccgtgcccaacaccatggccaccacccacggcagaagcctgccccccagcagcccccacaccgtgagaaccgcctggaccagcgccaccagcggcatcctgggcaccacccacatcaccgagcccagcaccgtgaccagccacaccctggccgccaccaccggcaccacccagcacagcacccccgccctgagcagcccccaccccagcagcagaaccaccgagagcccccccagccccggcaccaccacccccggccacaccaccgccaccagcagaaccaccgccaccgccacccccagcaagaccagaaccagcaccctgctgcccagcagccccaccagcgcccccatcaccaccgtggtgaccatgggctgcgagccccagtgcgcctggagcgagtggctggactacagctaccccatgcccggccccagcggcggcgacttcgacacctacagcaacatcagagccgccggcggcgccgtgtgcgagcagcccctgggcctggagtgcagagcccaggcccagcccggcgtgcccctgagagagctgggccaggtggtggagtgcagcctggacttcggcctggtgtgcagaaacagagagcaggtgggcaagttcaagatgtgcttcaactacgagatcagagtgttctgctgcaactacggccactgccccagcacccccgccaccagcagcaccgccatgcccagcagcacccccggcaccacctggatcctgaccgagctgaccaccaccgccaccaccaccgagagcaccggcagcaccgccacccccagcagcacccccggcaccacctggatcctgaccgagcccagcaccaccgccaccgtgaccgtgcccaccggcagcaccgccaccgccagcagcacccaggccaccgccggcaccccccacgtgagcaccaccgccaccacccccaccgtgaccagcagcaaggccacccccttcagcagccccggcaccgccaccgccctgcccgccctgagaagcaccgccaccacccccaccgccaccagcttcaccgccatccccagcagcagcctgggcaccacctggaccagactgagccagaccaccacccccaccgccaccatgagcaccgccacccccagcagcacccccgagaccgtgcacaccagcaccgtgctgaccaccaccgccaccaccaccggcgccaccggcagcgtggccacccccagcagcacccccggcaccgcccacaccaccaaggtgctgaccaccaccaccaccggcttcaccgccacccccagcagcagccccggcaccgccagaaccctgcccgtgtggatcagcaccaccaccacccccaccaccagaggcagcaccgtgacccccagcagcatccccggcaccacccacacccccaccgtgctgaccaccaccaccaccaccgtggccaccggcagcatggccacccccagcagcagcacccagaccagcggcaccccccccagcctgaccaccaccgccaccaccatcaccgccaccggcagcaccaccaaccccagcagcacccccggcaccacccccatcccccccgtgctgaccaccaccgccaccacccccgccgccaccagcagcaccgtgacccccagcagcgccctgggcaccacccacaccccccccgtgcccaacaccaccgccaccacccacggcagaagcctgagccccagcagcccccacaccgtgagaaccgcctggaccagcgccaccagcggcaccctgggcaccacccacatcaccgagcccagcaccggcaccagccacacccccgccgccaccaccggcaccacccagcacagcacccccgccctgagcagcccccaccccagcagcagaaccaccgagagcccccccagccccggcaccaccacccccggccacaccagagccaccagcagaaccaccgccaccgccacccccagcaagaccagaaccagcaccctgctgcccagcagccccaccagcgcccccatcaccaccgtggtgaccatgggctgcgagccccagtgcgcctggagcgagtggctggactacagctaccccatgcccggccccagcggcggcgacttcgacacctacagcaacatcagagccgccggcggcgccgtgtgcgagcagcccctgggcctggagtgcagagcccaggcccagcccggcgtgcccctgagagagctgggccaggtggtggagtgcagcctggacttcggcctggtgtgcagaaacagagagcaggtgggcaagttcaagatgtgcttcaactacgagatcagagtgttctgctgcaactacggccactgccccagcacccccgccaccagcagcaccgccacccccagcagcacccccggcaccacctggatcctgaccgagcagaccaccgccgccaccaccaccgccaccaccggcagcaccgccatccccagcagcacccccggcaccgcccccccccccaaggtgctgaccagcaccgccaccacccccaccgccaccagcagcaaggccaccagcagcagcagccccagaaccgccaccaccctgcccgtgctgaccagcaccgccaccaagagcaccgccaccagcttcacccccatccccagcttcaccctgggcaccaccggcaccctgcccgagcagaccaccacccccatggccaccatgagcaccatccaccccagcagcacccccgagaccacccacaccagcaccgtgctgaccaccaaggccaccaccaccagagccaccagcagcatgagcacccccagcagcacccccggcaccacctggatcctgaccgagctgaccaccgccgccaccaccaccgccgccaccggccccaccgccacccccagcagcacccccggcaccacctggatcctgaccgagcccagcaccaccgccaccgtgaccgtgcccaccggcagcaccgccaccgccagcagcaccagagccaccgccggcaccctgaaggtgctgaccagcaccgccaccacccccaccgtgatcagcagcagagccacccccagcagcagccccggcaccgccaccgccctgcccgccctgagaagcaccgccaccacccccaccgccaccagcgtgaccgccatccccagcagcagcctgggcaccgcctggaccagactgagccagaccaccacccccaccgccaccatgagcaccgccacccccagcagcacccccgagaccgtgcacaccagcaccgtgctgaccaccaccaccaccaccaccagagccaccggcagcgtggccacccccagcagcacccccggcaccgcccacaccaccaaggtgcccaccaccaccaccaccggcttcaccgccacccccagcagcagccccggcaccgccctgaccccccccgtgtggatcagcaccaccaccacccccaccaccagaggcagcaccgtgacccccagcagcatccccggcaccacccacaccgccaccgtgctgaccaccaccaccaccaccgtggccaccggcagcatggccacccccagcagcagcacccagaccagcggcaccccccccagcctgaccaccaccgccaccaccatcaccgccaccggcagcaccaccaaccccagcagcacccccggcaccacccccatcccccccgtgctgaccaccaccgccaccacccccgccgccaccagcagcaccgtgacccccagcagcgccctgggcaccacccacaccccccccgtgcccaacaccaccgccaccacccacggcagaagcctgccccccagcagcccccacaccgtgagaaccgcctggaccagcgccaccagcggcatcctgggcaccacccacatcaccgagcccagcaccgtgaccagccacacccccgccgccaccaccagcaccacccagcacagcacccccgccctgagcagcccccaccccagcagcagaaccaccgagagcccccccagccccggcaccaccacccccggccacaccagaggcaccagcagaaccaccgccaccgccacccccagcaagaccagaaccagcaccctgctgcccagcagccccaccagcgcccccatcaccaccgtggtgaccaccggctgcgagccccagtgcgcctggagcgagtggctggactacagctaccccatgcccggccccagcggcggcgacttcgacacctacagcaacatcagagccgccggcggcgccgtgtgcgagcagcccctgggcctggagtgcagagcccaggcccagcccggcgtgcccctgagagagctgggccaggtggtggagtgcagcctggacttcggcctggtgtgcagaaacagagagcaggtgggcaagttcaagatgtgcttcaactacgagatcagagtgttctgctgcaactacggccactgccccagcacccccgccaccagcagcaccgccacccccagcagcacccccggcaccacctggatcctgaccaagctgaccaccaccgccaccaccaccgagagcaccggcagcaccgccacccccagcagcacccccggcaccacctggatcctgaccgagcccagcaccaccgccaccgtgaccgtgcccaccggcagcaccgccaccgccagcagcacccaggccaccgccggcaccccccacgtgagcaccaccgccaccacccccaccgtgaccagcagcaaggccacccccttcagcagccccggcaccgccaccgccctgcccgccctgagaagcaccgccaccacccccaccgccaccagcttcaccgccatccccagcagcagcctgggcaccacctggaccagactgagccagaccaccacccccaccgccaccatgagcaccgccacccccagcagcacccccgagaccgcccacaccagcaccgtgctgaccaccaccgccaccaccaccagagccaccggcagcgtggccacccccagcagcacccccggcaccgcccacaccaccaaggtgcccaccaccaccaccaccggcttcaccgtgacccccagcagcagccccggcaccgccagaaccccccccgtgtggatcagcaccaccaccacccccaccaccagcggcagcaccgtgacccccagcagcgtgcccggcaccacccacacccccaccgtgctgaccaccaccaccaccaccgtggccaccggcagcatggccacccccagcagcagcacccagaccagcggcaccccccccagcctgatcaccaccgccaccaccatcaccgccaccggcagcaccaccaaccccagcagcacccccggcaccacccccatcccccccgtgctgaccaccaccgccaccacccccgccgccaccagcagcaccgtgacccccagcagcgccctgggcaccacccacaccccccccgtgcccaacaccaccgccaccacccacggcagaagcctgagccccagcagcccccacaccgtgagaaccgcctggaccagcgccaccagcggcaccctgggcaccacccacatcaccgagcccagcaccggcaccagccacacccccgccgccaccaccggcaccacccagcacagcacccccgccctgagcagcccccaccccagcagcagaaccaccgagagcccccccagccccggcaccaccacccccggccacaccaccgccaccagcagaaccaccgccaccgccacccccagcaagaccagaaccagcaccctgctgcccagcagccccaccagcgcccccatcaccaccgtggtgaccaccggctgcgagccccagtgcgcctggagcgagtggctggactacagctaccccatgcccggccccagcggcggcgacttcgacacctacagcaacatcagagccgccggcggcgccgtgtgcgagcagcccctgggcctggagtgcagagcccaggcccagcccggcgtgcccctgggcgagctgggccaggtggtggagtgcagcctggacttcggcctggtgtgcagaaacagagagcaggtgggcaagttcaagatgtgcttcaactacgagatcagagtgttctgctgcaactacggccactgccccagcacccccgccaccagcagcaccgccatgcccagcagcacccccggcaccacctggatcctgaccgagctgaccaccaccgccaccaccaccgccagcaccggcagcaccgccacccccagcagcacccccggcaccgcccccccccccaaggtgctgaccagccccgccaccacccccaccgccaccagcagcaaggccaccagcagcagcagccccagaaccgccaccaccctgcccgtgctgaccagcaccgccaccaagagcaccgccaccagcgtgacccccatccccagcagcaccctgggcaccaccggcaccctgcccgagcagaccaccacccccgtggccaccatgagcaccatccaccccagcagcacccccgagaccacccacaccagcaccgtgctgaccaccaaggccaccaccaccagagccaccagcagcaccagcacccccagcagcacccccggcaccacctggatcctgaccgagctgaccaccgccgccaccaccaccgccgccaccggccccaccgccacccccagcagcacccccggcaccacctggatcctgaccgagctgaccaccaccgccaccaccaccgccagcaccggcagcaccgccacccccagcagcacccccggcaccacctggatcctgaccgagcccagcaccaccgccaccgtgaccgtgcccaccggcagcaccgccaccgccagcagcacccaggccaccgccggcaccccccacgtgagcaccaccgccaccacccccaccgtgaccagcagcaaggccacccccagcagcagccccggcaccgccaccgccctgcccgccctgagaagcaccgccaccacccccaccgccaccagcttcaccgccatccccagcagcagcctgggcaccacctggaccagactgagccagaccaccacccccaccgccaccatgagcaccgccacccccagcagcacccccgagaccgtgcacaccagcaccgtgctgaccgccaccgccaccaccaccggcgccaccggcagcgtggccacccccagcagcacccccggcaccgcccacaccaccaaggtgcccaccaccaccaccaccggcttcaccgccacccccagcagcagccccggcaccgccctgaccccccccgtgtggatcagcaccaccaccacccccaccaccaccacccccaccaccagcggcagcaccgtgacccccagcagcatccccggcaccacccacaccgccagagtgctgaccaccaccaccaccaccgtggccaccggcagcatggccacccccagcagcagcacccagaccagcggcaccccccccagcctgaccaccaccgccaccaccatcaccgccaccggcagcaccaccaaccccagcagcacccccggcaccacccccatcacccccgtgctgaccagcaccgccaccacccccgccgccaccagcagcaaggccaccagcagcagcagccccagaaccgccaccaccctgcccgtgctgaccagcaccgccaccaagagcaccgccaccagcttcacccccatccccagcagcaccctgtggaccacctggaccgtgcccgcccagaccaccacccccatgagcaccatgagcaccatccacaccagcagcacccccgagaccacccacaccagcaccgtgctgaccaccaccgccaccatgaccagagccaccaacagcaccgccacccccagcagcaccctgggcaccaccagaatcctgaccgagctgaccaccaccgccaccaccaccgccgccaccggcagcaccgccaccctgagcagcacccccggcaccacctggatcctgaccgagcccagcaccatcgccaccgtgatggtgcccaccggcagcaccgccaccgccagcagcaccctgggcaccgcccacacccccaaggtggtgaccaccatggccaccatgcccaccgccaccgccagcaccgtgcccagcagcagcaccgtgggcaccaccagaacccccgccgtgctgcccagcagcctgcccaccttcagcgtgagcaccgtgagcagcagcgtgctgaccaccctgagacccaccggcttccccagcagccacttcagcaccccctgcttctgcagagccttcggccagttcttcagccccggcgaggtgatctacaacaagaccgacagagccggctgccacttctacgccgtgtgcaaccagcactgcgacatcgacagattccagggcgcctgccccaccagccccccccccgtgagcagcgcccccctgagcagccccagccccgcccccggctgcgacaacgccatccccctgagacaggtgaacgagacctggaccctggagaactgcaccgtggccagatgcgtgggcgacaacagagtggtgctgctggaccccaagcccgtggccaacgtgacctgcgtgaacaagcacctgcccatcaaggtgagcgaccccagccagccctgcgacttccactacgagtgcgagtgcatctgcagcatgtggggcggcagccactacagcaccttcgacggcaccagctacaccttcagaggcaactgcacctacgtgctgatgagagagatccacgccagattcggcaacctgagcctgtacctggacaaccactactgcaccgccagcgccaccgccgccgccgccagatgccccagagccctgagcatccactacaagagcatggacatcgtgctgaccgtgaccatggtgcacggcaaggaggagggcctgatcctgttcgaccagatccccgtgagcagcggcttcagcaagaacggcgtgctggtgagcgtgctgggcaccaccaccatgagagtggacatccccgccctgggcgtgagcgtgaccttcaacggccaggtgttccaggccagactgccctacagcctgttccacaacaacaccgagggccagtgcggcacctgcaccaacaaccagagagacgactgcctgcagagagacggcaccaccgccgccagctgcaaggacatggccaagacctggctggtgcccgacagcagaaaggacggctgctgggcccccaccggcaccccccccaccgccagccccgccgcccccgtgagcagcacccccacccccaccccctgccccccccagcccctgtgcgacctgatgctgagccaggtgttcgccgagtgccacaacctggtgccccccggccccttcttcaacgcctgcatcagcgaccactgcagaggcagactggaggtgccctgccagagcctggaggcctacgccgagctgtgcagagccagaggcgtgtgcagcgactggagaggcgccaccggcggcctgtgcgacctgacctgcccccccaccaaggtgtacaagccctgcggccccatccagcccgccacctgcaacagcagaaaccagagcccccagctggagggcatggccgagggctgcttctgccccgaggaccagatcctgttcaacgcccacatgggcatctgcgtgcaggcctgcccctgcgtgggccccgacggcttccccaagttccccggcgagagatgggtgagcaactgccagagctgcgtgtgcgacgagggcagcgtgagcgtgcagtgcaagcccctgccctgcgacgcccagggccagccccccccctgcaacagacccggcttcgtgaccgtgaccagacccagagccgagaacccctgctgccccgagaccgtgtgcgtgtgcaacaccaccacctgcccccagagcctgcccgtgtgcccccccggccaggagagcatctgcacccaggaggagggcgactgctgccccaccttcagatgcagaccccagctgtgcagctacaacggcaccttctacggcgtgggcgccaccttccccggcgccctgccctgccacatgtgcacctgcctgagcggcgacacccaggaccccaccgtgcagtgccaggaggacgcctgcaacaacaccacctgcccccagggcttcgagtacaagagagtggccggccagtgctgcggcgagtgcgtgcagaccgcctgcctgacccccgacggccagcccgtgcagctgaacgagacctgggtgaacagccacgtggacaactgcaccgtgtacctgtgcgaggccgagggcggcgtgcacctgctgaccccccagcccgccagctgccccgacgtgagcagctgcagaggcagcctgagaaagaccggctgctgctacagctgcgaggaggacagctgccaggtgagaatcaacaccaccatcctgtggcaccagggctgcgagaccgaggtgaacatcaccttctgcgagggcagctgccccggcgccagcaagtacagcgccgaggcccaggccatgcagcaccagtgcacctgctgccaggagagaagagtgcacgaggagaccgtgcccctgcactgccccaacggcagcgccatcctgcacacctacacccacgtggacgagtgcggctgcacccccttctgcgtgcccgcccccatggcccccccccacaccagaggcttccccgcccaggaggccaccgccgtgtag

SEQ ID NO: 128622 - DNA, 561 bp, Artificial Sequence
  derived and/or modified sequence
agcagcacccccggcaccacctggatcctgaccgagcccagcaccaccgccaccgtgaccgtgcccaccggcagcaccgccaccgccagcagcacccaggccaccgccggcaccccccacgtgagcaccaccgccaccacccccaccgtgaccagcagcaaggccacccccttcagcagccccggcaccgccaccgccctgcccgccctgagaagcaccgccaccacccccaccgccaccagcttcaccgccatccccagcagctgggccccccccggccccgcctaccacagacccccccaccccagacccccctgcccccagccccaccccccccccctgcagagactgagcacccccccccagtgcctgccccccagaccccccagaggccacagactgtgcggccaccccctgctgcaccccagaaacagcagccactaccagagcgccgactaccacaaccacttcaccgccacccccagcagcagccccggcaccgccagaaccctgcccgtgtggatcagcaccaccaccacccccaccaccagaggcagctag

SEQ ID NO: 128623 - DNA, 2007 bp, Artificial Sequence
  derived and/or modified sequence
atgagagagatccacgccagattcggcaacctgagcctgtacctggacaaccactactgcaccgccagcgccaccgccgccgccgccagatgccccagagccctgagcatccactacaagagcatggacatcgtgctgaccgtgaccatggtgcacggcaaggaggagggcctgatcctgttcgaccagatccccgtgagcagcggcttcagcaagaacggcgtgctggtgagcgtgctgggcaccaccaccatgagagtggacatccccgccctgggcgtgagcgtgaccttcaacggccaggtgttccaggccagactgccctacagcctgttccacaacaacaccgagggccagtgcggcacctgcaccaacaaccagagagacgactgcctgcagagagacggcaccaccgccgccagctgcaaggacatggccaagacctggctggtgcccgacagcagaaaggacggctgctgggcccccaccggcaccccccccaccgccagccccgccgcccccgtgagcagcacccccacccccaccccctgccccccccagcccctgtgcgacctgatgctgagccaggtgttcgccgagtgccacaacctggtgccccccggccccttcttcaacgcctgcatcagcgaccactgcagaggcagactggaggtgccctgccagagcctggaggcctacgccgagctgtgcagagccagaggcgtgtgcagcgactggagaggcgccaccggcggcctgtgcgacctgacctgcccccccaccaaggtgtacaagccctgcggccccatccagcccgccacctgcaacagcagaaaccagagcccccagctggagggcatggccgagggctgcttctgccccgaggaccagatcctgttcaacgcccacatgggcatctgcgtgcaggcctgcccctgcgtgggccccgacggcttccccaagttccccggcgagagatgggtgagcaactgccagagctgcgtgtgcgacgagggcagcgtgagcgtgcagtgcaagcccctgccctgcgacgcccagggccagccccccccctgcaacagacccggcttcgtgaccgtgaccagacccagagccgagaacccctgctgccccgagaccgtgtgcgtgtgcaacaccaccacctgcccccagagcctgcccgtgtgcccccccggccaggagagcatctgcacccaggaggagggcgactgctgccccaccttcagatgcagaccccagctgtgcagctacaacggcaccttctacggcgtgggcgccaccttccccggcgccctgccctgccacatgtgcacctgcctgagcggcgacacccaggaccccaccgtgcagtgccaggaggacgcctgcaacaacaccacctgcccccagggcttcgagtacaagagagtggccggccagtgctgcggcgagtgcgtgcagaccgcctgcctgacccccgacggccagcccgtgcagctgaacgagacctgggtgaacagccacgtggacaactgcaccgtgtacctgtgcgaggccgagggcggcgtgcacctgctgaccccccagcccgccagctgccccgacgtgagcagctgcagaggcagcctgagaaagaccggctgctgctacagctgcgaggaggacagctgccaggtgagaatcaacaccaccatcctgtggcaccagggctgcgagaccgaggtgaacatcaccttctgcgagggcagctgccccggcgccagcaagtacagcgccgaggcccaggccatgcagcaccagtgcacctgctgccaggagagaagagtgcacgaggagaccgtgcccctgcactgccccaacggcagcgccatcctgcacacctacacccacgtggacgagtgcggctgcacccccttctgcgtgcccgcccccatgagcccccccgcctgcgtgtggcaccccgccctgagagcccccgccgcccacctgggcctggcccccccctag

SEQ ID NO: 128624 - protein, 128 aa, Artificial Sequence
  derived and/or modified sequence
MMTTMKKKKQQQQLLLLSLMFLVAVTAAAVAADPHPQQVQVQQQQQAQMRINRATRSLLPQPPPKLDCPSTCSVRCGNNWKNQMCNKMCNVCCNKCSCVPPGTGQDTRHLCPCYDTMLNPHTGKLKCP

SEQ ID NO: 128625 - protein, 451 aa, Artificial Sequence
  derived and/or modified sequence
MNLEGGGRGGEFGMSAVSCGNGKLRQWLIDQIDSGKYPGLVWENEEKSIFRIPWKHAGKQDYNREEDAALFKAWALFKGKFREGIDKPDPPTWKTRLRCALNKSNDFEELVERSQLDISDPYKVYRIVPEGAKKGAKQLTLEDPQMSMSHPYTMTTPYPSLPAQQVHNYMMPPLDRSWRDYVPDQPHPEIPYQCPMTFGPRGHHWQGPACENGCQVTGTFYACAPPESQAPGVPTEPSIRSAEALAFSDCRLHICLYYREILVKELTTSSPEGCRISHGHTYDASNLDQVLFPYPEDNGQRKNIEKLLSHLERGVVLWMAPDGLYAKRLCQSRIYWDGPLALCNDRPNKLERDQTCKLFDTQQFLSELQAFAHHGRSLPRFQVTLCFGEEFPDPQRQRKLITAHVEPLLARQLYYFAQQNSGHFLRGYDLPEHISNPEDYHRSIRHSSIQE

SEQ ID NO: 128626 - DNA, 5314 bp, Artificial Sequence
  derived and/or modified sequence
agtttcaccgctcgatcttgggacccaccgctgccctcagctccgagtccagggcgagtgcagagcagagcgggcggaggaccccgggcgcgggcgcggacggcacgcggggcatgaacctggagggcggcggccgaggcggagagttcggcatgagcgcggtgagctgcggcaacgggaagctccgccagtggctgatcgaccagatcgacagcggcaagtaccccgggctggtgtgggagaacgaggagaagagcatcttccgcatcccctggaagcacgcgggcaagcaggactacaaccgcgaggaggacgccgcgctcttcaaggcttgggcactgtttaaaggaaagttccgagaaggcatcgacaagccggaccctcccacctggaagacgcgcctgcggtgcgctttgaacaagagcaatgactttgaggaactggttgagcggagccagctggacatctcagacccgtacaaagtgtacaggattgttcctgagggagccaaaaaaggagccaagcagctcaccctggaggacccgcagatgtccatgagccacccctacaccatgacaacgccttacccttcgctcccagcccagcaggttcacaactacatgatgccacccctcgaccgaagctggagggactacgtcccggatcagccacacccggaaatcccgtaccaatgtcccatgacgtttggaccccgcggccaccactggcaaggcccagcttgtgaaaatggttgccaggtgacaggaaccttttatgcttgtgccccacctgagtcccaggctcccggagtccccacagagccaagcataaggtctgccgaagccttggcgttctcagactgccggctgcacatctgcctgtactaccgggaaatcctcgtgaaggagctgaccacgtccagccccgagggctgccggatctcccatggacatacgtatgacgccagcaacctggaccaggtcctgttcccctacccagaggacaatggccagaggaaaaacattgagaagctgctgagccacctggagaggggcgtggtcctctggatggcccccgacgggctctatgcgaaaagactgtgccagagcaggatctactgggacgggcccctggcgctgtgcaacgaccggcccaacaaactggagagagaccagacctgcaagctctttgacacacagcagttcttgtcagagctgcaagcgtttgctcaccacggccgctccctgccaagattccaggtgactctatgctttggagaggagtttccagaccctcagaggcaaagaaagctcatcacagctcacgtagaacctctgctagccagacaactatattattttgctcaacaaaacagtggacatttcctgaggggctacgatttaccagaacacatcagcaatccagaagattaccacagatctatccgccattcctctattcaagaatgaaaaatgtcaagatgagtggttttctttttcctttttttttttttttttttgatacggggatacggggtcttgctctgtctcccaggctggagtgcagtgacacaatctcagctcactgtgacctccgcctcctgggttcaagagactctcctgcctcagcctccctggtagctgggattacaggtgtgagccactgcacccacccaagacaagtgattttcattgtaaatatttgactttagtgaaagcgtccaattgactgccctcttactgttttgaggaattcagaagtggagatttcagttcagcggttgaggagaattgcggcgagacaagcatggaaaatcagtgacatctgattggcagatgagcttatttcaaaaggaagggtggctttgcatttcttgtgttctgtagactgccatcattgatgatcactgtgaaaattgaccaagtgatgtgtttacatttactgaaatgcgctctttaatttgttgtagattaggtcttgctggaagacagagaaaacttgcctttcagtattgacactgactagagtgatgactgcttgtaggtatgtctgtgccatttctcagggaagtaagatgtaaattgaagaagcctcacacgtaaaagaaatgtattaatgtatgtaggagctgcagttcttgtggaagacacttgctgagtgaaggaaatgaatctttgactgaagccgtgcctgtagccttggggaggcccatcccccacctgccagcggtttcctggtgtgggtccctctgccccgccctccttcccattggctttctctccttggcctttcctggaagccagttagtaaacttcctattttcttgagtcaaaaaacatgagcgctactcttggatgggacatttttgtctgtcctacaatctagtaatgtctaagtaatggttaagttttcttgtttctgcatctttttgaccctcattctttagagatgctaaaattcttcgcataaagaagaagaaattaaggaacataaatcttaatacttgaactgttgcccttctgtccaagtacttaactatctgttcccttcctctgtgccacgctcctctgtttgtttggctgtccagcgatcagccatggcgacactaaaggaggaggagccggggactcccaggctggagagcactgccaggacccaccactggaagcaggatggagctgactacggaactgcacactcagtgggctgtttctgcttatttcatctgttctatgcttcctcgtgccaattatagtttgacagggccttaaaattacttggctttttccaaatgcttctatttatagaatcccaaagacctccacttgcttaagtatacctatcacttacatttttgtggttttgagaaagtacagcagtagactggggcgtcacctccaggccgtttctcatactacaggatatttactattactcccaggatcagcagaagattgcgtagctctcaaatgtgtgttcctgcttttctaatggatattttaaattcattcaacaagcacctagtaagtgcctgctgtatccctacattacacagttcagcctttatcaagcttagtgagcagtgagcactgaaacattattttttaatgtttaaaaagtttctaatattaaagtcagaatattaatacaattaatattaatattaactacagaaaagacaaacagtagagaacagcaaaaaaataaaaaggatctccttttttcccagcccaaattctcctctctaaaagtgtccacaagaaggggtgtttattcttccaacacatttcacttttctgtaaatatacataaacttaaaaagaaaacctcatggagtcatcttgcacacactttcatgcagtgctctttgtagctaacagtgaagatttacctcgttctgctcagaggccttgctgtggagctccactgccatgtacccagtagggtttgacatttcattagccatgcaacatggatatgtattgggcagcagactgtgtttcgtgaactgcagtgatgtatacatcttatagatgcaaagtattttggggtatattatcctaagggaagataaagatgatattaagaactgctgtttcacggggcccttacctgtgaccctctttgctgaagaatatttaaccccacacagcacttcaaagaagctgtcttggaagtctgtctcaggagcaccctgtcttcttaattctccaagcggatgctccatttcaattgctttgtgacttcttcttctttgtttttttaaatattatgctgctttaacagtggagctgaattttctggaaaatgcttcttggctggggccactacctcctttcctatctttacatctatgtgtatgttgactttttaaaattctgagtgatccagggtatgacctagggaatgaactagctatgaaatactcagggttaggaatcctagcacttgtctcaggactctgaaaaggaacggcttcctcattccttgtcttgataaagtggaattggcaaactagaatttagtttgtactcagtggacagtgctgttgaagatttgaggacttgttaaagagcactgggtcatatggaaaaaatgtatgtgtctcccaggtgcatttcttggtttatgtcttgttcttgagattttgtatatttaggaaaacctcaagcagtaattaatatctcctggaacactatagagaaccaagtgaccgactcatttacaactgaaacctaggaagcccctgagtcctgagcgaaaacaggagagttagtcgccctacagaaaacccagctagactattgggtatgaactaaaaagagactgtgccatggtgagaaaaatgtaaaatcctacagtgaaatgagcagcccttacagtattgttaccaccaagggcaggtaggtattagtgtttgaaaaagctggtctttgagcgagggcataaatacagctagccccaggggtggaacaactctgggagtcttgggtactcgcacctcttggctttgttgatgctccgccaggaaggccacttgtgtgtgcgtgtcagttacttttttagtaacaattcagatccagtgtaaacttccgttcattgctctccagtcacatgcccccacttccccacaggtgaaagtttttctgaaagtgttgggattggttaaggtctttatttgtattacgtatctcccgaagtcctctgtggccagctgcatctgtctgaatggtgcgtgaaggctctcagaccttacacaccattttgtaagttatgttttacatgccccgtttttgagactgatctcgatgcaggtggatctccttgagatcctgatagcctgttacaggaatgaagtaaaggtcagtttttttttgtattgattttcacagctttgaggaacatgcataagaaatgtagctgaagtagaggggacgtgagagaagggccaggccggcaggccaaccctcctccaatggaaattcccgtgttgcttcaaactgagacagatgggacttaacaggcaatggggtccacttccccctcttcagcatcccccgtaccccactttctgctgaaagaactgccagcaggtaggaccccagaggcccccaaatgaaagcttgaatttcccctactggctctgcgttttgctgagatctgtaggaaaggatgcttcacaaactgaggtagataatgctatgctgtcgttggtatacatcatgaatttttatgtaaattgctctgcaaagcaaattgatatgtttgataaatttatgtttttaggtaaataaaaacttttaaaaatttgtta

SEQ ID NO: 128627 - DNA, 1356 bp, Artificial Sequence
  derived and/or modified sequence
atgaacctggagggcggcggcagaggcggcgagttcggcatgagcgccgtgagctgcggcaacggcaagctgagacagtggctgatcgaccagatcgacagcggcaagtaccccggcctggtgtgggagaacgaggagaagagcatcttcagaatcccctggaagcacgccggcaagcaggactacaacagagaggaggacgccgccctgttcaaggcctgggccctgttcaagggcaagttcagagagggcatcgacaagcccgacccccccacctggaagaccagactgagatgcgccctgaacaagagcaacgacttcgaggagctggtggagagaagccagctggacatcagcgacccctacaaggtgtacagaatcgtgcccgagggcgccaagaagggcgccaagcagctgaccctggaggacccccagatgagcatgagccacccctacaccatgaccaccccctaccccagcctgcccgcccagcaggtgcacaactacatgatgccccccctggacagaagctggagagactacgtgcccgaccagccccaccccgagatcccctaccagtgccccatgaccttcggccccagaggccaccactggcagggccccgcctgcgagaacggctgccaggtgaccggcaccttctacgcctgcgccccccccgagagccaggcccccggcgtgcccaccgagcccagcatcagaagcgccgaggccctggccttcagcgactgcagactgcacatctgcctgtactacagagagatcctggtgaaggagctgaccaccagcagccccgagggctgcagaatcagccacggccacacctacgacgccagcaacctggaccaggtgctgttcccctaccccgaggacaacggccagagaaagaacatcgagaagctgctgagccacctggagagaggcgtggtgctgtggatggcccccgacggcctgtacgccaagagactgtgccagagcagaatctactgggacggccccctggccctgtgcaacgacagacccaacaagctggagagagaccagacctgcaagctgttcgacacccagcagttcctgagcgagctgcaggccttcgcccaccacggcagaagcctgcccagattccaggtgaccctgtgcttcggcgaggagttccccgacccccagagacagagaaagctgatcaccgcccacgtggagcccctgctggccagacagctgtactacttcgcccagcagaacagcggccacttcctgagaggctacgacctgcccgagcacatcagcaaccccgaggactaccacagaagcatcagacacagcagcatccaggagtag

SEQ ID NO: 128628 - DNA, 1356 bp, Artificial Sequence
  derived and/or modified sequence
atgaatcttgaaggcggcgggcgcggtggagagttcggaatgtctgctgtgtcctgcgggaatggaaaactgaggcagtggcttatcgatcagatcgatagcgggaaataccctgggctggtgtgggaaaacgaagaaaagtcaatttttcgcattccgtggaaacatgccggcaaacaggattacaatcgcgaggaagacgctgcactgtttaaagcatgggctttgttcaaggggaagtttagagaaggtatcgacaagcccgaccctcctacatggaagacccggctgaggtgtgctctgaacaagtccaacgattttgaagaactggttgaacgctcacagctggacatcagtgatccttacaaagtttataggatcgtgccggaaggcgccaaaaaaggagcaaagcagctcactctagaggacccacagatgtccatgtctcacccctacacaatgaccactccttacccctctcttcctgcccagcaagtgcacaattacatgatgcctccactcgaccgcagctggcgcgattatgtgcccgatcagccacatcccgagattccgtatcaatgccctatgaccttcgggccgagaggacaccactggcagggaccagcttgcgaaaatggttgtcaggtgaccgggactttctatgcgtgcgcacctcctgaatcccaggcccccggagtgccgacggagcccagtattcgttctgctgaggctctggcatttagtgactgccgactacacatctgtctatattatcgggagatcctagtcaaagagctaactacaagctccccggaggggtgtcggatcagccacggccacacatatgacgcctctaacctggaccaagtgctttttccctacccagaagacaacggacagaggaagaatatagaaaagctactttctcacctcgagcgaggggtggtattgtggatggcccctgatggtctgtacgctaaacggctttgtcagagcaggatctactgggatggacccttggccctgtgcaacgacagaccaaacaagctcgagcgggaccagacgtgcaaactcttcgacacgcagcaatttctttctgagctccaggcgttcgcccatcacgggagatcattaccacgttttcaggtcaccctgtgctttggagaggaattccctgaccctcagcgccagcgcaaattgattactgcgcatgtagagccactcctggccagacagttgtactattttgctcagcagaactcagggcactttctgagggggtacgaccttcctgagcacattagcaacccagaagattatcaccggtccatccggcactcatctatccaggaatag

SEQ ID NO: 128629 - DNA, 1356 bp, Artificial Sequence
  derived and/or modified sequence
atgaacctggagggcggcggccggggcggggagtttggcatgtctgctgtgtcctgtggaaatggcaagctgcggcagtggctgattgaccagattgacagcggcaagtacccaggcctggtgtgggagaatgaggagaagagcatcttccgcatcccctggaagcatgctgggaagcaggactacaaccgggaggaggatgctgccctcttcaaggcctgggccctcttcaagggcaagttccgggagggcatcgacaagccagacccccccacctggaagacccggctgcgctgtgccctgaacaagagcaatgactttgaggagctggtggagaggagccagctggacatcagtgacccctacaaggtgtacagaattgtgcctgagggcgccaagaagggggccaagcagctgaccctggaggacccccagatgtccatgagccacccctacaccatgaccaccccctaccccagcctgcctgcccagcaggtgcacaactacatgatgccacccctggaccgctcctggagggactatgtgcctgaccagccccaccctgagatcccctaccagtgccccatgaccttcggcccccggggccaccactggcagggccctgcctgtgaaaatggctgccaggtgacaggcaccttctacgcctgtgcccctcctgagagccaggcccctggggtgcccacagagcccagcatccgctctgctgaggccctggccttcagtgactgccgcctgcacatctgcctgtactaccgggagatcctggtgaaggagctgaccaccagcagccctgagggctgccgcatcagccacggccacacctatgatgccagcaacctggaccaggtgctcttcccctacccagaggacaatggccagaggaagaacatcgagaagctgctgagccacctggagcggggcgtggtgctgtggatggccccagatggcctgtatgccaagaggctgtgccagagccgcatctactgggatggccccctggccctgtgcaatgaccggcccaacaagctggagcgggaccagacctgcaagctgtttgacacccagcagttcctgtctgagctgcaggcctttgcccaccacggccgcagcctgccccgcttccaggtgaccctgtgctttggagaggagttcccagacccccagaggcagaggaagctgatcacagcccacgtggagcccctgctggcccggcagctgtactactttgcccagcagaacagcggccacttcctgcggggctatgacctgcctgagcacatcagcaaccctgaggactaccacaggagcatccgccacagcagcatccaggagtag

SEQ ID NO: 128630 - DNA, 5331 bp, Artificial Sequence
  derived and/or modified sequence
acctcgcactctcagtttcaccgctcgatcttgggacccaccgctgccctcagctccgagtccagggcgagtgcagagcagagcgggcggaggaccccgggcgcgggcgcggacggcacgcggggcatgaacctggagggcggcggccgaggcggagagttcggcatgagcgcggtgagctgcggcaacgggaagctccgccagtggctgatcgaccagatcgacagcggcaagtaccccgggctggtgtgggagaacgaggagaagagcatcttccgcatcccctggaagcacgcgggcaagcaggactacaaccgcgaggaggacgccgcgctcttcaaggcttgggcactgtttaaaggaaagttccgagaaggcatcgacaagccggaccctcccacctggaagacgcgcctgcggtgcgctttgaacaagagcaatgactttgaggaactggttgagcggagccagctggacatctcagacccgtacaaagtgtacaggattgttcctgagggagccaaaaaaggagccaagcagctcaccctggaggacccgcagatgtccatgagccacccctacaccatgacaacgccttacccttcgctcccagcccagcaggttcacaactacatgatgccacccctcgaccgaagctggagggactacgtcccggatcagccacacccggaaatcccgtaccaatgtcccatgacgtttggaccccgcggccaccactggcaaggcccagcttgtgaaaatggttgccaggtgacaggaaccttttatgcttgtgccccacctgagtcccaggctcccggagtccccacagagccaagcataaggtctgccgaagccttggcgttctcagactgccggctgcacatctgcctgtactaccgggaaatcctcgtgaaggagctgaccacgtccagccccgagggctgccggatctcccatggacatacgtatgacgccagcaacctggaccaggtcctgttcccctacccagaggacaatggccagaggaaaaacattgagaagctgctgagccacctggagaggggcgtggtcctctggatggcccccgacgggctctatgcgaaaagactgtgccagagcaggatctactgggacgggcccctggcgctgtgcaacgaccggcccaacaaactggagagagaccagacctgcaagctctttgacacacagcagttcttgtcagagctgcaagcgtttgctcaccacggccgctccctgccaagattccaggtgactctatgctttggagaggagtttccagaccctcagaggcaaagaaagctcatcacagctcacgtagaacctctgctagccagacaactatattattttgctcaacaaaacagtggacatttcctgaggggctacgatttaccagaacacatcagcaatccagaagattaccacagatctatccgccattcctctattcaagaatgaaaaatgtcaagatgagtggttttctttttcctttttttttttttttttttgatacggggatacggggtcttgctctgtctcccaggctggagtgcagtgacacaatctcagctcactgtgacctccgcctcctgggttcaagagactctcctgcctcagcctccctggtagctgggattacaggtgtgagccactgcacccacccaagacaagtgattttcattgtaaatatttgactttagtgaaagcgtccaattgactgccctcttactgttttgaggaattcagaagtggagatttcagttcagcggttgaggagaattgcggcgagacaagcatggaaaatcagtgacatctgattggcagatgagcttatttcaaaaggaagggtggctttgcatttcttgtgttctgtagactgccatcattgatgatcactgtgaaaattgaccaagtgatgtgtttacatttactgaaatgcgctctttaatttgttgtagattaggtcttgctggaagacagagaaaacttgcctttcagtattgacactgactagagtgatgactgcttgtaggtatgtctgtgccatttctcagggaagtaagatgtaaattgaagaagcctcacacgtaaaagaaatgtattaatgtatgtaggagctgcagttcttgtggaagacacttgctgagtgaaggaaatgaatctttgactgaagccgtgcctgtagccttggggaggcccatcccccacctgccagcggtttcctggtgtgggtccctctgccccgccctccttcccattggctttctctccttggcctttcctggaagccagttagtaaacttcctattttcttgagtcaaaaaacatgagcgctactcttggatgggacatttttgtctgtcctacaatctagtaatgtctaagtaatggttaagttttcttgtttctgcatctttttgaccctcattctttagagatgctaaaattcttcgcataaagaagaagaaattaaggaacataaatcttaatacttgaactgttgcccttctgtccaagtacttaactatctgttcccttcctctgtgccacgctcctctgtttgtttggctgtccagcgatcagccatggcgacactaaaggaggaggagccggggactcccaggctggagagcactgccaggacccaccactggaagcaggatggagctgactacggaactgcacactcagtgggctgtttctgcttatttcatctgttctatgcttcctcgtgccaattatagtttgacagggccttaaaattacttggctttttccaaatgcttctatttatagaatcccaaagacctccacttgcttaagtatacctatcacttacatttttgtggttttgagaaagtacagcagtagactggggcgtcacctccaggccgtttctcatactacaggatatttactattactcccaggatcagcagaagattgcgtagctctcaaatgtgtgttcctgcttttctaatggatattttaaattcattcaacaagcacctagtaagtgcctgctgtatccctacattacacagttcagcctttatcaagcttagtgagcagtgagcactgaaacattattttttaatgtttaaaaagtttctaatattaaagtcagaatattaatacaattaatattaatattaactacagaaaagacaaacagtagagaacagcaaaaaaataaaaaggatctccttttttcccagcccaaattctcctctctaaaagtgtccacaagaaggggtgtttattcttccaacacatttcacttttctgtaaatatacataaacttaaaaagaaaacctcatggagtcatcttgcacacactttcatgcagtgctctttgtagctaacagtgaagatttacctcgttctgctcagaggccttgctgtggagctccactgccatgtacccagtagggtttgacatttcattagccatgcaacatggatatgtattgggcagcagactgtgtttcgtgaactgcagtgatgtatacatcttatagatgcaaagtattttggggtatattatcctaagggaagataaagatgatattaagaactgctgtttcacggggcccttacctgtgaccctctttgctgaagaatatttaaccccacacagcacttcaaagaagctgtcttggaagtctgtctcaggagcaccctgtcttcttaattctccaagcggatgctccatttcaattgctttgtgacttcttcttctttgtttttttaaatattatgctgctttaacagtggagctgaattttctggaaaatgcttcttggctggggccactacctcctttcctatctttacatctatgtgtatgttgactttttaaaattctgagtgatccagggtatgacctagggaatgaactagctatgaaatactcagggttaggaatcctagcacttgtctcaggactctgaaaaggaacggcttcctcattccttgtcttgataaagtggaattggcaaactagaatttagtttgtactcagtggacagtgctgttgaagatttgaggacttgttaaagagcactgggtcatatggaaaaaatgtatgtgtctcccaggtgcatttcttggtttatgtcttgttcttgagattttgtatatttaggaaaacctcaagcagtaattaatatctcctggaacactatagagaaccaagtgaccgactcatttacaactgaaacctaggaagcccctgagtcctgagcgaaaacaggagagttagtcgccctacagaaaacccagctagactattgggtatgaactaaaaagagactgtgccatggtgagaaaaatgtaaaatcctacagtgaaatgagcagcccttacagtattgttaccaccaagggcaggtaggtattagtgtttgaaaaagctggtctttgagcgagggcataaatacagctagccccaggggtggaacaactctgggagtcttgggtactcgcacctcttggctttgttgatgctccgccaggaaggccacttgtgtgtgcgtgtcagttacttttttagtaacaattcagatccagtgtaaacttccgttcattgctctccagtcacatgcccccacttccccacaggtgaaagtttttctgaaagtgttgggattggttaaggtctttatttgtattacgtatctcccgaagtcctctgtggccagctgcatctgtctgaatggtgcgtgaaggctctcagaccttacacaccattttgtaagttatgttttacatgccccgtttttgagactgatctcgatgcaggtggatctccttgagatcctgatagcctgttacaggaatgaagtaaaggtcagtttttttttgtattgattttcacagctttgaggaacatgcataagaaatgtagctgaagtagaggggacgtgagagaagggccaggccggcaggccaaccctcctccaatggaaattcccgtgttgcttcaaactgagacagatgggacttaacaggcaatggggtccacttccccctcttcagcatcccccgtaccccactttctgctgaaagaactgccagcaggtaggaccccagaggcccccaaatgaaagcttgaatttcccctactggctctgcgttttgctgagatctgtaggaaaggatgcttcacaaactgaggtagataatgctatgctgtcgttggtatacatcatgaatttttatgtaaattgctctgcaaagcaaattgatatgtttgataaatttatgtttttaggtaaataaaaacttttaaaaatttgttatgga

SEQ ID NO: 128631 - DNA, 1356 bp, Artificial Sequence
  derived and/or modified sequence
atgaacctggagggcggcggccggggcggcgagttcggcatgagcgcagtctcttgcgggaacggaaagctccggcagtggctgattgatcagatcgactctggcaagtatcctggactggtgtgggagaatgaggagaagagcatttttcgaatcccatggaaacacgccgggaagcaagactacaacagagaggaagacgccgctctttttaaagcgtgggccctcttcaagggcaagtttcgagaggggatcgataagccggacccacccacctggaagacccgtctgagatgcgctctaaacaagtccaacgattttgaagagctggtggagcgatctcagctggacattagcgatccctacaaggtgtatcgaatagtgcctgagggggccaaaaagggcgccaagcagctgacattagaggacccacaaatgtcaatgagccacccttatacaatgacaacaccctacccctccttgcctgcccagcaagtccacaactatatgatgcccccactggataggagttggcgggattacgtgccagatcaaccacacccagaaatcccataccagtgccctatgacctttggcccacgaggccaccactggcaaggacctgcttgtgagaatgggtgccaagtgacaggaaccttttacgcttgcgcgccaccggagagccaggcccccggggtgccgaccgagcctagcatccgctcagccgaggcgctcgccttctcagattgcaggttacacatttgcctgtattatagagagatcctcgtgaaggagctgacaaccagctccccagagggatgtcgaatttcacacggacacacgtatgatgcttcaaacctggaccaggtgttattcccctatccagaggataacggccaaaggaaaaatatcgagaagctgctatcacacctggaaaggggagttgttctgtggatggccccagacgggctgtacgcaaaacggctctgtcagagtagaatctactgggatggaccattagctctgtgcaatgatcgccctaataaactggagcgcgatcagacatgtaaactgtttgatacacagcagtttctgtcagaactccaggcttttgcccaccatggccggtccctgccacgatttcaagtgaccttgtgcttcggggaggagtttcccgatccccagagacaacggaaactgatcacagcgcacgttgagcctctgttggccaggcagctttattactttgctcaacagaatagtggccattttcttagaggttacgatcttcccgaacatatctccaatcctgaggactaccaccgaagcattcggcacagctcaattcaggagtag

SEQ ID NO: 128632 - DNA, 1356 bp, Artificial Sequence
  derived and/or modified sequence
atgaatttggaggggggagggaggggcggtgagtttggcatgtctgccgtctcatgcggaaacggaaaactcagacagtggctgatcgatcagatagattcaggtaagtatcccggactagtttgggagaacgaggagaaatctatattcagaataccatggaagcacgccggtaaacaggattacaaccgcgaagaggatgcagccctatttaaagcctgggccctgttcaaaggcaaatttcgagaggggattgataaacctgacccgccaacgtggaaaacaaggctgcggtgcgcgctaaataagtccaatgacttcgaagagctggtcgaaaggagccagcttgatattagtgatccttacaaagtttaccggattgtcccagagggcgctaagaagggggcaaaacaattgacccttgaggatccacagatgtccatgtcccacccttatactatgaccaccccgtacccctccttaccagctcaacaggtgcacaactacatgatgccgccactagaccggtcctggagagattatgttcccgaccagccacatcccgagattccttatcagtgcccgatgacattcggacccaggggacaccattggcagggccctgcctgcgaaaatggatgccaagtgacagggactttttacgcttgtgcaccacctgaatcacaggcccctggggtgcccaccgagccgtcaatcaggagcgctgaagcactagctttctccgactgccgcctgcacatttgcctctactaccgcgagattctcgtgaaggagctgaccacatctagccccgaaggttgcaggatatcacacggccacacatatgacgcatccaatctggaccaggtgttatttccttaccccgaagataacggccagcgcaaaaacattgagaaactgctcagccatcttgagcgtggagtcgtgctctggatggcacccgacggtctctacgctaaacggctctgccagagccgtatttactgggatggccctctggcgttgtgtaacgacaggcctaacaagctggaacgcgaccagacctgtaaattgttcgacacacagcagtttctatcggaactccaagcattcgctcaccacggtagatccctgccaagattccaggtgaccctgtgctttggtgaggagtttcctgacccccagaggcaaaggaagttgatcaccgcacacgtggagccactgctggcaaggcaattatactattttgcccagcagaattcgggccactttctgcgcggttacgatctccctgagcatatcagtaacccggaagattatcaccgctctatcaggcattcttctatacaagagtag

SEQ ID NO: 128633 - protein, 400 aa, Artificial Sequence
  derived and/or modified sequence
MASEKPLAAVTCTAPVNIAVIKYWGKRDEELVLPINSSLSVTLHQDQLKTTTTAVISKDFTEDRIWLNGREEDVGQPRLQACLREIRCLARKRRNSRDGDPLPSSLSCKVHVASVNNFPTAAGLASSAAGYACLAYTLARVYGVESDLSEVARRGSGSACRSLYGGFVEWQMGEQADGKDSIARQVAPESHWPELRVLILVVSAEKKLTGSTVGMRASVETSPLLRFRAESVVPARMAEMARCIRERDFPSFAQLTMKDSNQFHATCLDTFPPISYLNAISWRIIHLVHRFNAHHGDTKVAYTFDAGPNAVIFTLDDTVAEFVAAVWHGFPPGSNGDTFLKGLQVRPAPLSAELQAALAMEPTPGGVKYIIVTQVGPGPQILDDPCAHLLGPDGLPKPAA

SEQ ID NO: 128634 - protein, 138 aa, Artificial Sequence
  derived and/or modified sequence
MGEQADGKDSIARQVAPESHWPELRVLILVVSAEKKLTGSTVGMRASVETSPLLRFRAESVVPAHGGDGPLHPGARLPQLRPADHEGQQPVPRHLPRHLPPSLTSMPSPGASSTWCTASTPTTGTPRWRTPLTRAPMP

SEQ ID NO: 128635 - DNA, 1203 bp, Artificial Sequence
  derived and/or modified sequence
atggctagcgagaaacccttggctgcggtcacatgtactgctccggtgaatatcgctgtcatcaaatactgggggaaacgcgatgaggagttagttcttcctatcaacagttccctttcagttactctgcatcaggatcagcttaagaccaccaccaccgcggttattagtaaggactttacggaagatcggatttggcttaacgggagagaggaggatgtggggcagccccgactacaggcatgcctgagggaaattcgctgtctggcgaggaagcgtagaaatagtcgtgacggcgatccacttccctcatctctgtcatgtaaggtccacgtagccagtgttaataactttcctaccgccgccggactagcctcttctgctgcggggtacgcctgcctagcctacactctcgcccgcgtgtacggagtggaatctgacctcagcgaggtcgccagacgggggagtggatcagcctgtagatctctctacggcggcttcgtagaatggcagatgggagagcaagccgatgggaaggactccattgcccgccaggtcgccccagagtcccattggcccgagcttcgggtgctaatcctcgtggtaagcgcggagaagaaactgacaggctctacagtcgggatgcgcgcctctgtggagacttcccctctcctgcgctttagagcagagtctgtggtgcctgcgcgcatggccgagatggcacggtgcatacgtgagagggacttccctagtttcgcacaacttacaatgaaagattccaaccagttccacgcaacctgcctggatacgtttccacctatttcctacttgaacgccatttcatggcgaatcatccacttggttcatagattcaacgcccatcatggtgatactaaggtcgcctatacgtttgacgccggacctaatgctgtcattttcacattggacgacactgttgcagaattcgtcgcagccgtgtggcacggattccctcccggctccaatggggacactttccttaagggattgcaggttcgacctgcaccattatccgcagagctgcaggctgccctggccatggagccaaccccggggggggtgaaatacatcatcgtcacacaggttggccctggccctcagatattagatgatccctgtgctcacctgctggggcctgacggccttccgaaaccggccgcctag

SEQ ID NO: 128636 - DNA, 1203 bp, Artificial Sequence
  derived and/or modified sequence
atggccagcgagaagcccctggccgctgtgacctgcacagcccctgtgaacattgctgtgatcaagtactggggcaagagagatgaggagctggtgctgcccatcaacagcagcctgtctgtgaccctgcaccaggaccagctgaagaccaccaccacagctgtgatcagcaaggacttcacagaggaccgcatctggctgaatggccgggaggaggatgtgggccagccccggctgcaggcctgcctgcgggagatccgctgcctggccaggaagagaagaaacagcagagatggagaccccctgcccagcagcctgagctgcaaggtgcacgtggcctctgtgaacaacttccccacagctgctggcctggccagcagcgctgctggctacgcctgcctggcctacaccctggcccgggtgtatggagtggagagtgacctgtctgaggtggcccggcggggcagcggcagcgcctgccgcagcctgtatggaggctttgtggagtggcagatgggagagcaggctgatggcaaggacagcatcgcccggcaggtggcccctgagagccactggccagagctgcgggtgctgatcctggtggtgtctgctgagaagaagctgaccggcagcacagtgggcatgagggcctctgtggagaccagccccctgctgcgcttccgggcagagagcgtggtgcctgccaggatggccgagatggcccgctgcatccgggagcgggacttccccagctttgcccagctgaccatgaaggacagcaaccagttccacgccacctgcctggacaccttcccccccatctcctacctgaatgccatctcctggaggatcatccacctggtgcaccgcttcaatgcccaccacggggacaccaaggtggcctacacctttgatgctggccccaatgctgtgatcttcaccctggatgacacagtggccgagtttgtggccgctgtgtggcacggcttccccccaggcagcaatggagacaccttcctgaagggcctgcaggtgcggcctgcccccctgtctgctgagctgcaggccgccctggccatggagcccacccctgggggcgtgaagtacatcatcgtgacccaggtgggccctggcccccagatcctggatgacccctgtgcccacctgctgggcccagatggcctgcccaagccagctgcctag

SEQ ID NO: 128637 - DNA, 1814 bp, Artificial Sequence
  derived and/or modified sequence
gtggagctggggtcactgcgcggtgggaccatggcctcggagaagccgctggcggcagtcacttgtacagcgccggtcaacatcgcggtcatcaagtactggggcaagcgcgatgaagagctggttctgcccatcaactcctccctgagcgtcactctgcaccaggaccagttaaaaaccaccacaacagccgtcatcagcaaggacttcaccgaggaccggatttggctgaatggccgggaggaggatgtggggcagccgcggctgcaggcctgcctgcgggagatccgctgcctggcccggaagcggaggaactcacgggatggggacccgctgccctccagcctcagctgcaaggtgcacgtggcatcggtgaacaacttccccacggctgcgggcctggcctcctcagcggcgggctatgcctgcctagcctacaccctggcccgtgtctacggcgtggagagtgacctctcagaagtggctcgccggggctcaggcagcgcctgccggagcctgtatgggggctttgtggagtggcagatgggagagcaggccgacgggaaggacagcatcgctcggcaagtggcccccgagtcacactggcctgaactccgcgtgctcatccttgtggtgagcgctgagaagaagctgacaggcagtaccgtgggcatgcgggccagtgtggagaccagccccctgcttcggttccgggccgagtccgtggtgcccgcgcatggcggagatggcccgctgcatccgggagcgagacttccccagcttcgcccagctgaccatgaaggacagcaaccagttccacgccacctgcctcgacaccttcccccatctcttacctcaatgccatctcctggcgcatcatccacctggtgcaccgcttcaacgcccaccacggggacaccaaggtggcgtacacctttgacgcgggccccaatgccgtgatcttcaccctggacgacactgtggctgagtttgtggctgctgtgtggcacggctttcccccaggctcgaatggagacacgtttctgaaggggctgcaggtgaggccggcccctctctcagctgagcttcaggctgcgctggccatggagccgacccccggtggggtcaaatacatcattgtcactcaggtggggccagggcctcaaatcctggatgacccctgcgcccacctcctgggtcctgacggcctgccgaagccagctgcctgactgcctcagcagggaccgcatgccgcttggagaaggggtggcctcgccggagctagggagcggatgtggtgggctggccggactcctgggacatgtgggtggtggcttgaccccgggcccatgggcagcttgctgtggggcagtgcagggagtcctgcggccgcccaggtgtcaggagaggtccccgccgagtgcttcagctgccctaagctgcaccagcgctttgccaagatgggatggggagggggtatgagaactggcagagcctcggtgcagcagggctgaagggctttctcaccccagctctggctatgcccagttctctgagaaaggagctcagtggggaggtggtccctccagcggaccagggaaggggtcaccgtgctgggagcagcctccttgggcctcaggaaaccaccaagtgcctcggatggtggctgcccacggcgcttctgctgagaccctgcccccggcccaggtgtctcggagggtggctgcccacggcctgggtgtggctggaatggtggcaggagtgggcaccagtgcggccccggtggccatggggaataaaccagcattgctgcc

SEQ ID NO: 128638 - DNA, 1203 bp, Artificial Sequence
  derived and/or modified sequence
atggccagcgagaagcccctggccgccgtgacctgcaccgcccccgtgaacatcgctgttataaagtattggggtaagcgggacgaggagttggttctcccgatcaactcatcccttagcgtgacactccatcaggaccagctgaagacaacaacgaccgccgtcataagcaaagattttaccgaggacagaatctggctcaatgggcgcgaagaggacgtgggacagccccgattacaggcatgcctacgggaaattcgctgtctcgcacgaaagcgtaggaattcccgggacggggatccactcccatcatcgctgagctgtaaagtgcacgtcgcgtctgtcaataacttccccacagcagctggcttagcgagctccgctgcagggtatgcatgtcttgcatatactctcgcgagggtgtatggcgtagagtcagatttgagcgaggtggcaaggaggggttctggaagtgcctgcagaagcctgtacgggggcttcgtggagtggcagatgggagagcaagcggatgggaaggactccattgcgcgccaggtagcacccgagagccactggcctgaactccgcgtcctgatcctcgtggtgagcgccgagaaaaaactcaccggctcgactgtcggcatgagggccagcgtggagacctctcctcttctaaggtttagggcagagagcgttgtacctgctagaatggccgagatggcgcgttgtatccgagagcgtgattttccttcctttgctcagctgacaatgaaagattctaaccaattccatgctacctgtctggacacgtttccacctatctcctacttgaacgctatcagctggaggattatccatctggtgcaccggttcaacgcccatcacggcgatactaaagtggcctatacatttgatgccggcccgaacgccgtgatcttcactcttgatgacactgttgcagagtttgtagctgctgtgtggcacggcttcccaccaggcagtaacggagataccttcctgaaagggctccaggtgaggccggccccgttgtctgcagagctgcaagccgccctggcaatggagcctacaccaggcggagtgaaatacataattgttacacaggtcgggcccgggcctcagatcctagatgacccatgcgcccacctgctgggacctgacgggctgcctaagccagccgcctag

SEQ ID NO: 128639 - DNA, 1203 bp, Artificial Sequence
  derived and/or modified sequence
atggcttccgaaaaacccctagccgcagtcacgtgtacagcacccgtcaatatagccgtgattaaatactggggaaagcgcgatgaggagctggttcttccaataaactcaagtctaagtgtaacgctgcaccaggaccagctgaaaactaccacaaccgcggtgatttctaaggactttacagaggatcggatctggctgaacgggagggaagaggacgtgggccagccccgattacaggcctgcctccgagagattcgatgcctagctcggaagcggagaaactctagggacggggaccctctgccctccagcctgagttgcaaggttcacgtggcatccgtgaataactttccgacagcagccggactggcttcctcagccgcaggatatgcatgtctagcttatacgctggctcgagtgtacggagttgaatccgatctgtccgaggtcgctcggcgagggtccggaagtgcatgcaggagcctctacggtggatttgtggaatggcagatgggagagcaagcggacggtaaggattctattgcccgacaggtggctccagagagtcattggccggaactgcgtgtgctgatactcgtcgtgtctgccgagaaaaaactgactggatccactgtaggaatgcgggcatccgttgagacatctccactgcttagatttcgcgcagagtccgtcgtgccagcaaggatggccgaaatggcccgttgcatccgcgagcgagattttccatcattcgcacagctgacaatgaaggattccaaccagtttcatgccacctgtcttgatacattcccgccaatcagttatttaaatgctatcagttggaggatcatacacctggtccatagattcaacgctcaccacggggataccaaggtggcttacacctttgatgccggtcctaacgccgttatctttactctagacgatacagttgctgagttcgtagctgcagtctggcacggttttcctccgggatccaatggcgatacatttctcaaaggcctgcaggtgcgcccagctccactcagcgccgagcttcaggcagccctggcaatggaacccaccccaggaggagtgaaatatattattgtcacacaagtcggtcctggtccccagattttggacgatccttgtgcccacctacttgggcctgacggactccccaaacctgctgcgtag

SEQ ID NO: 128640 - DNA, 1823 bp, Artificial Sequence
  derived and/or modified sequence
gtggagctggggtcactgcgcggtgggaccatggcctcggagaagccgctggcggcagtcacttgtacagcgccggtcaacatcgcggtcatcaagtactggggcaagcgcgatgaagagctggttctgcccatcaactcctccctgagcgtcactctgcaccaggaccagttaaaaaccaccacaacagccgtcatcagcaaggacttcaccgaggaccggatttggctgaatggccgggaggaggatgtggggcagccgcggctgcaggcctgcctgcgggagatccgctgcctggcccggaagcggaggaactcacgggatggggacccgctgccctccagcctcagctgcaaggtgcacgtggcatcggtgaacaacttccccacggctgcgggcctggcctcctcagcggcgggctatgcctgcctagcctacaccctggcccgtgtctacggcgtggagagtgacctctcagaagtggctcgccggggctcaggcagcgcctgccggagcctgtatgggggctttgtggagtggcagatgggagagcaggccgacgggaaggacagcatcgctcggcaagtggcccccgagtcacactggcctgaactccgcgtgctcatccttgtggtgagcgctgagaagaagctgacaggcagtaccgtgggcatgcgggccagtgtggagaccagccccctgcttcggttccgggccgagtccgtggtgcccgcgcgcatggcggagatggcccgctgcatccgggagcgagacttccccagcttcgcccagctgaccatgaaggacagcaaccagttccacgccacctgcctcgacaccttcccgcccatctcttacctcaatgccatctcctggcgcatcatccacctggtgcaccgcttcaacgcccaccacggggacaccaaggtggcgtacacctttgacgcgggccccaatgccgtgatcttcaccctggacgacactgtggctgagtttgtggctgctgtgtggcacggctttcccccaggctcgaatggagacacgtttctgaaggggctgcaggtgaggccggcccctctctcagctgagcttcaggctgcgctggccatggagccgacccccggtggggtcaaatacatcattgtcactcaggtggggccagggcctcaaatcctggatgacccctgcgcccacctcctgggtcctgacggcctgccgaagccagctgcctgactgcctcagcagggaccgcatgccgcttggagaaggggtggcctcgccggagctagggagcggatgtggtgggctggccggactcctgggacatgtgggtggtggcttgaccccgggcccatgggcagcttgctgtggggcagtgcagggagtcctgcggccgcccaggtgtcaggagaggtccccgccgagtgcttcagctgccctaagctgcaccagcgctttgccaagatgggatggggagggggtatgagaactggcagagcctcggtgcagcagggctgaagggctttctcaccccagctctggctatgcccagttctctgagaaaggagctcagtggggaggtggtccctccagcggaccagggaaggggtcaccgtgctgggagcagcctccttgggcctcaggaaaccaccaagtgcctcggatggtggctgcccacggcgcttctgctgagaccctgcccccggcccaggtgtctcggagggtggctgcccacggcctgggtgtggctggaatggtggcaggagtgggcaccagtgcggccccggtggccatggggaataaaccagcattgctgcctccgg

SEQ ID NO: 128641 - DNA, 1203 bp, Artificial Sequence
  derived and/or modified sequence
atggccagcgagaagcccctggccgccgtgacctgcaccgcccccgtgaacatcgccgtgatcaagtactggggcaagagagacgaggagctggtgctgcccatcaacagcagcctgagcgtgaccctgcaccaggaccagctgaagaccaccaccaccgccgtgatcagcaaggacttcaccgaggacagaatctggctgaacggcagagaggaggacgtgggccagcccagactgcaggcctgcctgagagagatcagatgcctggccagaaagagaagaaacagcagagacggcgaccccctgcccagcagcctgagctgcaaggtgcacgtggccagcgtgaacaacttccccaccgccgccggcctggccagcagcgccgccggctacgcctgcctggcctacaccctggccagagtgtacggcgtggagagcgacctgagcgaggtggccagaagaggcagcggcagcgcctgcagaagcctgtacggcggcttcgtggagtggcagatgggcgagcaggccgacggcaaggacagcatcgccagacaggtggcccccgagagccactggcccgagctgagagtgctgatcctggtggtgagcgccgagaagaagctgaccggcagcaccgtgggcatgagagccagcgtggagaccagccccctgctgagattcagagccgagagcgtggtgcccgccagaatggccgagatggccagatgcatcagagagagagacttccccagcttcgcccagctgaccatgaaggacagcaaccagttccacgccacctgcctggacaccttcccccccatcagctacctgaacgccatcagctggagaatcatccacctggtgcacagattcaacgcccaccacggcgacaccaaggtggcctacaccttcgacgccggccccaacgccgtgatcttcaccctggacgacaccgtggccgagttcgtggccgccgtgtggcacggcttcccccccggcagcaacggcgacaccttcctgaagggcctgcaggtgagacccgcccccctgagcgccgagctgcaggccgccctggccatggagcccacccccggcggcgtgaagtacatcatcgtgacccaggtgggccccggcccccagatcctggacgacccctgcgcccacctgctgggccccgacggcctgcccaagcccgccgcctag

SEQ ID NO: 128642 - protein, 1171 aa, Artificial Sequence
  derived and/or modified sequence
MPEPTKKEENEVPAPAPPPEEPSKEKEAGTTPAKDEEEVSPPSALPPGLGSRALERKDSDWTLVETPPGEEQAKQNANSQLSILFIEKPQGGTVKVGEDITFIAKVKAEDLLRKPTIKWFKGKWMDLASKAGKHLQLKETFERHSRVYTFEMQIIKAKDNFAGNYRCEVTYKDKFDSCSFDLEVHESTGTTPNIDIRSAFKRSGEGQEDAGELDFSGLLKRREVKQQEEEPQVDVWELLKNAKPSEYEKIAFQYGITDLRGMLKRLKRMRREEKKSAAFAKILDPAYQVDKGGRVRFVVELADPKLEVKWYKNGQEIRPSTKYIFEHKGCQRILFINNCQMTDDSEYYVTAGDEKCSTELFVREPPIMVTKQLEDTTAYCGERVELECEVSEDDANVKWFKNGEEIIPGPKSRYRIRVEGKKHILIIEGATKADAAEYSVMTTGGQSSAKLSVDLKPLKILTPLTDQTVNLGKEICLKCEISENIPGKWTKNGLPVQESDRLKVVHKGRIHKLVIANALTEDEGDYVFAPDAYNVTLPAKVHVIDPPKIILDGLDADNTVTVIAGNKLRLEIPISGEPPPKAMWSRGDKAIMEGSGRIRTESYPDSSTLVIDIAERDDSGVYHINLKNEAGEAHASIKVKVVDFPDPPVAPTVTEVGDDWCIMNWEPPAYDGGSPILGYFIERKKKQSSRWMRLNFDLCKETTFEPKKMIEGVAYEVRIFAVNAIGISKPSMPSRPFVPLAVTSPPTLLTVDSVTDTTVTMRWRPPDHIGAAGLDGYVLEYCFEGTEDWIVANKDLIDKTKFTITGLPTDAKIFVRVKAVNAAGASEPKYYSQPILVKEIIEPPKIRIPRHLKQTYIRRVGEAVNLVIPFQGKPRPELTWKKDGAEIDKNQINIRNSETDTIIFIRKAERSHSGKYDLQVKVDKFVETASIDIQIIDRPGPPQIVKIEDVWGENVALTWTPPKDDGNAAITGYTIQKADKKSMEWFTVIEHYHRTSATITELVIGNEYYFRVFSENMCGLSEDATMTKESAVIARDGKIYKNPVYEDFDFSEAPMFTQPLVNTYAIAGYNATLNCSVRGNPKPKITWMKNKVAIVDDPRYRMFSNQGVCTLEIRKPSPYDGGTYCCKAVNDLGTVEIECKLEVKVIYQGVNTPGQPVFLEGQQQSLHNKDF

SEQ ID NO: 128643 - DNA, 3516 bp, Artificial Sequence
  derived and/or modified sequence
atgcccgaacctacaaaaaaggaagagaatgaggttccagcaccggccccacccccagaagagcctagcaaggaaaaggaagccggaacaacacccgcaaaggatgaagaggaagtttcacctccgtctgcccttcctccaggtctgggctctagagctctggaaaggaaagacagcgattggacactcgtggaaacccctcccggcgaggaacaggcaaagcagaatgccaacagccagctgagcatcctgtttatagagaagcctcagggggggacggtgaaggttggcgaagatattacattcatcgccaaggtcaaggccgaggatttgctgcggaagcccaccatcaagtggttcaaagggaagtggatggacctggcctccaaagcaggtaagcatctgcagctgaaggaaacgttcgagagacacagccgcgtatacacctttgagatgcaaataattaaagctaaagataattttgcaggcaattatagatgtgaggtgacttataaggacaaattcgacagctgcagctttgacctcgaagtgcatgaaagcacaggcaccacgcccaatatcgatattcgaagcgctttcaagagatctggagaaggacaggaagacgctggagagctggatttctccggcctgttgaaacgcagagaggtaaaacagcaggaggaagagccacaggtggacgtgtgggagctgttaaaaaacgccaaaccatccgagtacgaaaagattgcctttcagtatgggattacagatttacgcggtatgctgaagagactgaagcggatgaggcgagaggaaaagaaaagcgcggcatttgccaagattctcgaccctgcctatcaggtcgataaggggggcagggtgcggttcgtagtagaactcgcggacccaaagctcgaggttaagtggtataagaacgggcaggagatcagaccgtctactaaatatatatttgagcacaaaggatgtcagcgaatcctgtttatcaataattgccaaatgacggacgactccgagtattatgttacagccggcgacgagaagtgttcaacggaactgtttgtcagagagcctccgatcatggtgacgaaacagcttgaagatactacagcttactgcggggagagagtggagctggaatgcgaggtgagtgaggatgatgccaacgtgaaatggttcaaaaatggagaggaaattatcccagggcctaagtcaagatacaggattagggttgaggggaaaaagcacatcctgataatagaaggcgcaacgaaagcagacgccgccgaatattccgttatgaccactggaggacaatcttctgctaagctgtcggtcgatctcaagccactgaaaatcctaaccccactcaccgatcagacagtgaacctgggaaaagagatttgcctaaagtgcgaaatcagtgagaatatccccggcaaatggaccaaaaacggactcccagtccaggagtctgaccgactcaaggtcgtgcacaaaggaaggattcataagttggtgatcgctaatgccttaacggaggatgagggggattacgtgtttgctcctgatgcctataacgttaccctcccagcaaaagttcacgtgattgatccccccaagataatcctagacgggctggatgcagataataccgtcacggtgattgcagggaataaactgcggctggagatccccatctccggggaacctccacctaaggccatgtggtcacgcggagacaaggcaatcatggaagggtccggaaggatcaggacggaatcctaccccgatagtagtacattagtgattgatatcgccgagcgagatgatagtggcgtgtatcacatcaacctgaagaatgaagcgggcgaggcccatgccagcatcaaggtgaaggtggtcgatttccccgatcctcctgtcgcgccaaccgtaaccgaagtaggcgatgattggtgcatcatgaactgggagccgcccgcttacgacgggggcagtcctatcctgggctactttattgagcgtaagaaaaagcagagcagcaggtggatgcgtttaaatttcgatctctgcaaagaaaccacgttcgagcccaaaaaaatgattgaaggagtggcttacgaagttagaatttttgctgtgaacgccatcgggatcagcaagcccagcatgcccagccggccattcgtgccactggccgtgacatctccaccaacacttctgacagttgactctgttactgacactaccgtgacaatgcggtggaggccacccgatcacatcggtgccgctggattggatgggtacgtcttagaatactgttttgaaggaacagaggattggatagtggcaaataaagacctgattgataaaacgaaattcaccataacagggctgcccactgacgctaaaatatttgtgcgcgtgaaagcagtgaacgccgccggcgcgagcgagcctaagtactacagtcagcccattttagtcaaggagattatagagcctcctaagatcagaattcccagacatctcaagcagacatacattcgccgggtaggagaagctgtcaacctggttattcccttccagggaaagcctcgaccggaactgacatggaagaaggatggcgccgagattgacaaaaaccagatcaacattagaaactctgagacagataccatcatttttattaggaaagcagagcgctcacattcgggaaaatatgatctgcaggtcaaggtggacaagtttgttgaaacagcctccatcgatatccagatcattgatcgcccagggccgcctcagatcgtcaaaattgaggacgtctggggggagaatgttgcactgacctggactcctcctaaggacgatggaaacgccgctatcaccggctacacaatccaaaaggccgacaagaaatcaatggaatggtttacggtaatagagcattaccatcggacgtctgccacgatcaccgagttagttattgggaatgagtactactttagggtgttcagcgaaaacatgtgcggactttctgaagacgccaccatgaccaaagaatctgcggtcatagctagggatgggaagatatacaagaacccagtatatgaggattttgatttctctgaggccccaatgttcacacagcccctggttaacacatacgcaattgccggctacaatgctacattgaactgtagtgtgcgcggcaaccccaaacccaagataacatggatgaaaaataaggttgccatcgtggatgatccccgctacagaatgttctctaatcagggggtgtgcaccctggagattcggaagccctctccctatgacgggggaacatactgttgcaaagccgttaatgacctcgggaccgtggagattgagtgcaagctagaggttaaggtcatatatcagggcgtgaacacaccggggcagccagtttttctcgaaggacagcagcagtctttgcacaacaaagatttctag

SEQ ID NO: 128644 - DNA, 3516 bp, Artificial Sequence
  derived and/or modified sequence
atgcctgagcccaccaagaaggaggagaatgaggtgcctgccccagcccctcctcctgaggagcccagcaaggagaaggaggccggcaccaccccagccaaggatgaggaggaggtgtccccaccttctgccctgcccccaggcctgggcagccgggccctggagaggaaggacagcgactggaccctggtggagaccccacctggagaggagcaggccaagcagaatgccaacagccagctgagcatcctcttcatcgagaagccccagggcggcaccgtgaaggtgggggaggacatcaccttcatcgccaaggtgaaggccgaggacctgctgaggaagcccaccatcaagtggttcaagggcaagtggatggacctggccagcaaggccggcaagcacctgcagctgaaggagacctttgagcggcacagccgggtgtacacctttgagatgcagatcatcaaggccaaggacaactttgctggcaactaccgctgtgaggtgacctacaaggacaagtttgacagctgcagctttgacctggaggtgcatgagagcacaggcaccacccccaacatcgacatccgcagcgccttcaagaggtctggagagggccaggaggatgctggggagctggacttcagcggcctgctgaagagaagagaggtgaagcagcaggaggaggagccccaggtggatgtgtgggagctgctgaagaatgccaagcccagtgaatatgagaagatcgccttccagtatggcatcacagacctgcggggcatgctgaagaggctgaagaggatgaggcgggaggagaagaagtctgctgcctttgccaagatcctggaccctgcctaccaggtggacaagggcggccgggtgcgctttgtggtggagctggccgaccccaagctggaggtgaagtggtacaagaatggccaggagatccggcccagcaccaagtacatctttgagcacaagggctgccagaggatcctcttcatcaacaactgccagatgacagatgattctgagtactacgtgacagctggagatgagaagtgcagcacagagctgtttgtgcgggagccccccatcatggtgaccaagcagctggaggacaccacagcctactgtggggagcgggtggagctggagtgtgaggtgtctgaagatgatgccaacgtgaagtggttcaagaatggagaggagatcatccctggccccaagagccgctaccgcatccgggtggagggcaagaagcacatcctgatcattgaaggagccaccaaggcagatgctgctgagtacagcgtgatgaccactggaggccagagcagcgccaagctgtctgtggacctgaagcccctgaagatcctgacccccctgacagaccagacagtgaacctgggcaaggagatctgcctgaagtgtgagatcagcgagaacatccctgggaagtggaccaagaatggcctgcctgtgcaggagagtgaccggctgaaggtggtgcacaagggccgcatccacaagctggtgattgccaatgccctgacagaagatgaaggagactatgtgtttgccccagatgcctacaacgtgaccctgcctgccaaggtgcacgtgattgacccccccaagatcatcctggatggcctggatgctgacaacacagtgacagtgattgctggcaacaagctgcggctggagatccccatctctggagagcccccacccaaggccatgtggagcagaggagacaaggccatcatggagggcagcggccgcatcagaacagagagctacccagacagcagcaccctggtgattgatattgctgagagagatgattctggagtgtaccacatcaacctgaagaatgaggccggggaggcccacgccagcatcaaggtgaaggtggtggacttcccagacccccctgtggcccccaccgtgacagaggtgggagatgactggtgcatcatgaactgggagcccccagcctatgatggcggcagccccatcctgggctacttcattgaaaggaagaagaagcagagcagccgctggatgaggctgaactttgacctgtgcaaggagaccacctttgagcccaagaagatgattgagggcgtggcctatgaggtgcgcatctttgctgtgaatgccatcggcatcagcaagcccagcatgcccagccggccctttgtgcccctggccgtgaccagcccccccaccctgctgactgtggacagcgtgacagacaccaccgtgaccatgcgctggaggcccccagaccacatcggggccgccggcctggatggctacgtgctggagtactgctttgagggcacagaggactggatcgtggccaacaaggacctgattgacaagaccaagttcaccatcaccggcctgcccacagatgccaagatctttgtgcgggtgaaggctgtgaatgctgctggggccagcgagcccaagtactacagccagcccatcctggtgaaggagatcatcgagccccccaagatccgcatccccaggcacctgaagcagacctacatccggcgggtgggggaggccgtgaacctggtgatccccttccagggcaagcccaggcctgagctgacctggaagaaggatggagctgagattgacaagaaccagatcaacatcagaaattctgaaacagacaccatcatcttcatcaggaaggccgagaggagccacagcggcaagtatgacctgcaggtgaaggtggacaagtttgtggagacagccagcattgacatccagatcatcgacaggcctggccccccccagatcgtgaagattgaagatgtgtggggagaaaatgtggccctgacctggaccccacccaaggatgatggaaatgctgccatcaccggctacaccatccagaaggctgacaagaagtccatggagtggttcaccgtgattgagcactaccacaggaccagcgccaccatcacagagctggtgattggaaatgagtactacttccgggtcttcagcgagaacatgtgtggcctgtctgaagatgccaccatgaccaaggagagcgctgtgattgccagagatggcaagatctacaagaaccctgtgtatgaggactttgacttcagcgaggcccccatgttcacccagcccctggtgaacacctacgccatcgccggctacaatgccaccctgaactgcagcgtgcggggcaaccccaagcccaagatcacctggatgaagaacaaggtggccatcgtggatgacccccgctacaggatgttcagcaaccagggcgtgtgcaccctggagatcaggaagcccagcccctatgatggcggcacctactgctgcaaggctgtgaatgacctgggcaccgtggagattgagtgcaagctggaggtgaaggtgatctaccagggcgtgaacaccccaggccagcccgtcttcctggagggccagcagcagagcctgcacaacaaggacttctag

SEQ ID NO: 128645 - DNA, 3899 bp, Artificial Sequence
  derived and/or modified sequence
gcctgcctgtggggtttctgtcaactagtcgtggagggaaggagactctttaaagaataacatcttattgtggccatgccagaacccactaagaaagaggaaaatgaagtgccagccccagccccacccccggaagaaccaagtaaagagaaggaggccggaactacaccagcaaaagatgaagaggaagtctccccgcctagcgccttgcctccaggtttgggtagtcgggccctggagagaaaagattcagactggacccttgtcgaaactcctcctggggaggaacaagccaagcagaatgccaactcccagctgtccatcttgttcattgaaaaacctcaaggaggaacagtgaaagttggtgaagatatcaccttcatagccaaagtcaaggctgaagatcttctgagaaaacccactatcaaatggttcaaaggaaaatggatggacctggccagcaaagccgggaagcaccttcagctgaaggaaacctttgagaggcacagtcgggtgtacacatttgagatgcagatcatcaaggccaaagataactttgcaggaaattacagatgcgaggtcacctataaggataagtttgacagctgttcatttgatcttgaagtgcacgaatctactgggactactccaaacattgacatcagatctgctttcaagagaagtggagaaggtcaagaggatgcaggagaacttgactttagtggtctcctgaaacgtagggaggtgaagcagcaggaggaagaaccccaggtggacgtatgggagttgctgaagaacgcgaaacccagtgagtacgagaagatcgccttccagtatggaatcaccgacctgcgcggcatgctcaagcgactcaagcgcatgcgcagagaggagaagaagagcgcagcttttgcaaaaattcttgatcctgcatatcaggttgacaaaggaggcagagtgaggtttgttgtggagctggcagatccaaagttggaggtgaaatggtataaaaatggtcaagaaattcgacccagtaccaaatacatctttgaacacaaaggatgccagagaatcctgtttatcaataactgtcagatgacagatgattcagagtattatgtgacagccggtgatgagaaatgttccactgagctcttcgtaagagagcctccaattatggtgaccaaacagctggaagatacaactgcttattgtggggagagagtggaattagaatgtgaggtgtctgaagatgatgccaatgtaaaatggtttaagaatggtgaagagattatccctggtccaaaatcaagataccgaattagagttgagggtaaaaaacacatcttgatcatagagggagcaacaaaggctgatgctgcagaatattcagtaatgacaacaggaggacaatcatctgctaaacttagtgttgacttgaaacctctgaagattttgacacctctgactgatcagactgtaaatcttggaaaagaaatctgcctgaagtgtgaaatctctgaaaacataccaggaaaatggactaaaaatggcctacctgttcaggagagtgaccgtctaaaggtggttcacaagggaaggatccacaagttagtgatagccaatgccctcactgaagatgaaggtgattatgtatttgcacctgatgcctacaatgttactctgcctgccaaagttcatgttattgatcctcctaagatcatcctggatggtcttgatgctgacaacacagtgacagtgattgcaggaaacaagcttcgtcttgagatccccatcagcggagaaccacctcctaaagccatgtggagccggggagataaggctattatggaaggcagtggccggataagaacagaatcttaccctgatagcagcactctggtcattgatatagctgaaagagatgactctggtgtttaccacatcaatctgaaaaacgaagctggagaggcacatgcaagcatcaaggttaaagttgtggacttccctgatcctccagtggcaccgactgtgacagaggtgggagatgactggtgtatcatgaactgggagcctcctgcctacgacggaggctctccaatcctaggatattttattgagaggaagaagaaacaaagctccaggtggatgaggctgaattttgatctctgcaaagaaacaacttttgagcccaagaagatgattgaaggtgtggcctatgaggtccgcatctttgcagtcaatgccattggcatctccaagcccagtatgccctccaggccttttgttcctttggctgtaacaagccctcctactcttctgactgtggactctgtcactgacacgactgtcacgatgaggtggcgccccccagaccacattggtgcagcaggtttagatggctatgtgctagagtattgctttgaaggaactgaggactggatagttgcaaacaaagatctgattgacaagacgaagttcaccatcacaggtctgccaacagatgcaaagatctttgtgcgtgtgaaggctgttaatgcagctggtgccagcgagcccaagtactattctcagcccattctcgtgaaggaaatcatagaacctccaaagattcgcattccaagacacctgaagcaaacctatatccgcagagttggagaagctgtcaatctggttatacctttccagggaaaaccaagaccagaattaacttggaagaaggatggtgcagaaattgataagaatcaaataaacattcgcaactctgagactgatacaatcatatttattagaaaagcagagaggagccactctgggaaatatgatctgcaagtcaaagtggacaaattcgtggagaccgcatcaattgacatccagatcattgaccgtccaggtccaccccaaattgtgaagattgaggatgtctggggagaaaatgtcgctctcacatggactccaccaaaggatgatggaaatgctgctatcacaggctataccattcagaaggctgacaagaagagcatggaatggtttactgtcattgagcattatcatcgaaccagtgccaccattactgaattggtcatagggaatgaatattacttccgggtcttttctgaaaacatgtgtggcctcagtgaggatgccaccatgactaaagagagtgcagtgatcgccagggatggtaaaatctacaaaaatccagtgtatgaagactttgatttctcagaggcacccatgtttactcagcctttggttaacacctatgccatagctggttacaatgccaccctaaactgcagtgtgagaggaaatcctaagcctaaaataacctggatgaaaaacaaagttgctattgtggatgatccaagatacaggatgttcagcaaccagggagtctgtaccctggaaattcgcaagcccagcccctatgatggaggcacttactgctgcaaagcagtcaatgaccttgggacagtggagattgaatgcaaactggaggtgaaagtgatatatcaaggagtaaatacccctggacaaccagtcttcctggaggggcagcaacagtcattgcacaataaggatttttgaatgtataatatcatctaaggtgggctctccttctgcagactcctcttgcaaggcgtacctccaaacataattgattcgtatctgcgagacttacactcaagcaatcctgaggaatactgagggagggcctggctactgtctctctgcactctgctgctttgaaatctggttgaaatgagaaaaagcattttctgttttcccaccaggcccccaagtgtggtctttttctttcctcctaatgttgaagagaaaaaaaaaaaaaaaagtttgcccagattgcttaattaaaaattgcaaacaaaatctca

SEQ ID NO: 128646 - DNA, 3516 bp, Artificial Sequence
  derived and/or modified sequence
atgcccgagcccaccaagaaggaggagaacgaggtgcccgcccccgcacccccacccgaggaaccatcaaaagaaaaggaagcaggcaccactccggccaaagatgaagaagaagtaagtccaccttccgccctgccacccggactggggagccgtgcgctggaaagaaaagattccgattggaccctcgtcgaaacaccccctggagaggagcaggccaagcaaaacgccaatagccagctctccatcctcttcatcgagaaaccccagggtggaacggttaaagtaggcgaagacatcacttttatcgccaaagttaaggccgaagacttacttcgcaagcccaccatcaagtggttcaaaggcaagtggatggatctggcaagtaaagccggaaaacacttgcagctgaaggaaacctttgaacgtcacagtcgcgtgtacacttttgaaatgcagatcatcaaagcaaaggacaacttcgctgggaattaccgctgcgaagtcacctataaggacaagttcgatagttgcagttttgaccttgaagtccacgaaagtacaggaaccacccccaacatcgatattcgctccgcgtttaaaaggagcggagaagggcaggaagatgccggcgagctggattttagcgggctactcaagcggcgcgaggtaaagcaacaggaagaggagccacaggtagatgtctgggaactcttaaagaatgcaaaaccttccgaatacgagaagatcgcctttcagtacggcatcactgacctacggggtatgttaaagcgactgaaaagaatgcggcgagaggaaaagaagagcgccgcgttcgctaagattctagatccagcctatcaggtcgataagggagggagggtgaggttcgtcgttgaactggcagaccctaagctcgaggtaaagtggtataagaacggccaggaaattaggccctccactaaatacatatttgaacataaggggtgtcagcggatcctattcattaataactgccaaatgaccgacgattccgagtactatgtcacagccggcgatgagaaatgtagcactgaactatttgtccgcgagcccccaatcatggttaccaaacagctggaggacactaccgcctattgtggcgagagggtagagctggagtgtgaggtgtccgaagacgacgccaatgtgaagtggtttaagaacggcgaggagattatcccaggtccaaagagtagatatcggattagggtggagggtaaaaagcatattctcataattgagggcgcgaccaaagccgacgcagcagagtattccgtgatgacaaccgggggacagagtagcgccaaactcagcgtagatctgaagcccctcaaaatcctcacaccactgacagatcaaaccgtcaatctgggtaaggagatctgcctgaagtgtgagattagcgagaatattcctggaaaatggactaagaatggcctgcccgtgcaagagagtgacaggctgaaggtggtccacaaaggcaggattcacaaactggtgatagccaacgccctgacagaagatgagggagactacgtattcgctcctgatgcctacaacgtgaccctgcccgcgaaagttcacgtaatagaccctcctaagattatcctcgacggcctcgatgcagacaatacagtcaccgtcatcgctgggaacaaactccgtcttgagattcctatcagcggcgagccaccccccaaggcaatgtggtcgagaggggacaaagcaatcatggaggggtccggacggatcagaacagagagctatcccgattccagcactttggtgatcgacattgcagaaagagatgattccggagtgtaccatatcaacctgaagaatgaagctggtgaggcacacgcaagtatcaaggtgaaagtcgttgattttcctgacccacctgtcgccccgaccgtcactgaagtgggagatgattggtgcatcatgaattgggagccacctgcttatgatggaggcagcccgatactcgggtacttcatcgaacgcaaaaaaaaacaaagtagtagatggatgcggcttaactttgatctatgcaaggaaaccacctttgagccgaagaaaatgattgaaggagttgcttacgaggtgagaatcttcgctgtgaacgctattgggatcagcaagccgtccatgccgtcccggcctttcgtgcctctggcggtgacttccccacctacccttctaaccgtggattctgtaacagatactaccgtcaccatgcgttggcggccaccagatcatattggagcagcagggctggacggctatgtgctggaatattgttttgagggaacggaggactggatcgtggccaacaaagatcttatcgataagacaaagttcaccatcacaggcctgcctacggacgctaaaattttcgtgcgcgtgaaggcagttaacgccgctggggcatcagagcccaagtattattctcagccaatcctcgtaaaggagatcatcgaacccccaaaaatccgcatccccaggcatctgaagcagacctatattcggcgggttggggaagccgtaaacctcgtgataccctttcaggggaaaccccgcccggagctgacctggaagaaagacggtgcagagattgacaagaaccagatcaacataagaaattcagaaacagacaccattatcttcatacgcaaagctgaacggagccactcaggcaagtatgacctacaggtgaaagtggataagttcgttgaaactgcttctatcgatatccagatcatcgaccggcctggccctcctcagatcgtaaagatagaagatgtctggggcgagaatgtggccttgacctggacccctccgaaggatgacggcaatgccgctatcacagggtacacaatccagaaagccgacaaaaagtctatggagtggtttacagtcattgaacactatcaccgcacttctgccactatcaccgaactagtcattggcaacgaatactattttcgcgtattcagcgagaacatgtgcgggctctccgaggacgcgaccatgactaaggagtctgcggtgatcgctcgggatggcaagatctacaagaacccggtgtatgaggacttcgatttctctgaggccccgatgtttactcagcctctggtgaacacttatgctatcgcaggatataacgccaccctgaattgcagcgttcgcgggaatcccaagccaaagatcacctggatgaaaaataaagtcgctatcgtagatgatccacggtacagaatgttttctaaccaaggcgtatgcaccctggagatccgcaaaccttccccatacgatggtgggacgtattgttgcaaggccgtgaacgacttgggcacggttgagattgaatgcaagcttgaggtgaaggtgatttatcagggtgtcaacacacctggtcagcccgtgtttctcgaggggcagcagcagtctctgcacaacaaagatttctag

SEQ ID NO: 128647 - DNA, 3516 bp, Artificial Sequence
  derived and/or modified sequence
atgcccgaacccaccaagaaagaggaaaatgaggtgccagctcctgctccgccaccggaagagccatctaaagagaaggaagccggaacgaccccagccaaagacgaggaggaagtaagtccccctagcgctttgcctccgggtctggggagtcgcgctctggaacggaaggattctgactggacgctggtcgaaaccccgcctggggaggaacaagccaagcagaacgccaactcccagctctcaatcctgttcattgagaagccacagggagggactgtgaaagtgggcgaggacataacatttattgccaaagtcaaggctgaggatctgctccgaaagcctaccattaagtggtttaagggcaagtggatggatctggcaagtaaggcaggaaagcatctgcagctgaaggagacctttgagcggcattcccgcgtctatactttcgagatgcaaattattaaggccaaggacaatttcgccggaaactaccgctgtgaagtgacttataaggacaagtttgactcctgctctttcgatttggaggtgcatgaatcgacaggtaccactcctaacattgatattagatctgcctttaagcggagtggtgagggtcaggaggatgctggagaactggacttttcaggactgctcaagcgcagggaggtgaagcaacaggaggaagagccccaggtggatgtatgggaactgcttaagaacgctaagcccagcgagtacgaaaagatagctttccagtacgggattaccgatttgagaggaatgttaaagcgcctaaagcggatgagaagagaggaaaagaagagtgccgctttcgctaaaattctggatcctgcataccaggtggacaagggcggaagagtccgtttcgtcgtggaacttgctgacccgaagctggaggtaaagtggtataagaacgggcaggaaatccgccctagcacgaagtacatcttcgagcataaaggctgtcagcggatcctgttcattaacaactgccagatgaccgatgactctgaatactacgtgactgcaggagatgagaagtgttcaacagagctgttcgtgcgggagcctcccattatggtgaccaagcagctcgaagataccactgcgtactgtggagaaagagtggaactggagtgcgaagtgtctgaagatgacgctaatgtcaagtggtttaagaacggcgaagagattattcccggacctaagagccggtacaggattcgcgtggagggcaagaaacacatactgataattgaaggcgcaaccaaggccgacgctgccgagtactccgtgatgacaaccgggggacagagttccgccaagctgagcgttgatcttaagcctctgaagatcctgacgcccctgacagatcagaccgttaacctgggtaaggagatctgcctcaagtgcgagattagcgagaacatacctggtaaatggacaaagaacggtctgcccgtccaagagtccgacaggctgaaggttgtccacaaaggaaggatccacaaacttgtgatagctaatgccttaacagaagatgagggcgactatgtgtttgcgcctgatgcatacaacgtcaccctccccgctaaggtgcatgtgatcgacccgccaaaaattatactggacgggctggatgcggataatacagtcaccgtgattgccggaaataagctccggctggagattccaattagcggtgagccccctcccaaggccatgtggagcaggggagataaagcgattatggagggaagcgggcgaatccgtacggaatcctaccccgattcttccactttagtgatcgatatcgcagaacgcgatgactctggcgtgtaccacatcaaccttaaaaatgaggctggagaagctcatgcctccatcaaggtcaaagtggtggatttcccggatccacccgtcgctcccaccgtcactgaggtcggcgatgattggtgcattatgaactgggagccccctgcatatgacgggggatccccaatactgggctactttatagagaggaaaaaaaaacagtcttcacgctggatgcgactgaactttgacctctgtaaagagaccacgttcgagccaaagaagatgattgaaggagtggcctacgaggttaggatttttgcggtaaacgccatcgggatctcaaaaccaagtatgccttctcgcccatttgtgcccctggcggtcacttcacctccgaccctccttaccgtggactccgtgaccgacaccactgtaaccatgaggtggagacccccagaccatattggcgctgcgggactggatgggtatgtgctagaatactgctttgaagggactgaagactggatagtagccaataaagacttgattgataagactaaattcactattacgggcctgccaactgacgccaagatcttcgttcgggttaaggcagttaacgccgctggcgctagtgaaccaaagtattattcccagccgatcctggttaaggaaatcatcgaacccccaaaaatcagaattcctcgacacctgaagcagacctacattagaagagtgggtgaagcagtgaatctggtgatccctttccaaggcaagccgcgtcctgaacttacttggaaaaaggacggggctgagatcgacaaaaatcagatcaatattcgaaactctgaaaccgatacaattatttttataagaaaggctgaacgctctcatagtggtaaatacgaccttcaagtaaaagttgacaaatttgtggaaacagcatcaattgatatccaaataatcgataggcccggtccgccacaaatagtgaaaattgaggatgtgtggggtgaaaatgtggctctgacatggaccccaccaaaagatgatggcaacgccgcaatcaccggttatacaattcagaaagcggataagaaatctatggagtggttcaccgtcatagagcactaccatagaacgagcgcgacaattacagagctggtgattggcaatgaatactattttcgggtattctctgagaacatgtgtggacttagtgaagacgcgacaatgactaaagaaagcgcagttatcgcccgagacggcaagatttacaagaatccagtgtacgaagattttgatttctccgaagcacctatgtttacacagcccctggtgaacacttatgccattgctggatacaatgccacactaaactgctcagtccggggaaatcccaaacctaagattacctggatgaagaataaagtggccatcgtcgacgatcctcgctaccgaatgttttccaaccaaggggtttgtaccctggagattcgaaagccatcaccttatgatggtggtacgtactgttgcaaggccgtcaacgatctgggaacagtggaaatagagtgcaaactagaggtaaaagtgatctatcaaggcgtgaatacgcctgggcaaccagtgttcctggagggacagcagcaatcattacataacaaagatttttag

SEQ ID NO: 128648 - DNA, 3516 bp, Artificial Sequence
  derived and/or modified sequence
atgcccgagcccaccaagaaggaggagaacgaggtgcccgcccccgcccccccccccgaggagcccagcaaggagaaggaggccggcaccacccccgccaaggacgaggaggaggtgagcccccccagcgccctgccccccggcctgggcagcagagccctggagagaaaggacagcgactggaccctggtggagaccccccccggcgaggagcaggccaagcagaacgccaacagccagctgagcatcctgttcatcgagaagccccagggcggcaccgtgaaggtgggcgaggacatcaccttcatcgccaaggtgaaggccgaggacctgctgagaaagcccaccatcaagtggttcaagggcaagtggatggacctggccagcaaggccggcaagcacctgcagctgaaggagaccttcgagagacacagcagagtgtacaccttcgagatgcagatcatcaaggccaaggacaacttcgccggcaactacagatgcgaggtgacctacaaggacaagttcgacagctgcagcttcgacctggaggtgcacgagagcaccggcaccacccccaacatcgacatcagaagcgccttcaagagaagcggcgagggccaggaggacgccggcgagctggacttcagcggcctgctgaagagaagagaggtgaagcagcaggaggaggagccccaggtggacgtgtgggagctgctgaagaacgccaagcccagcgagtacgagaagatcgccttccagtacggcatcaccgacctgagaggcatgctgaagagactgaagagaatgagaagagaggagaagaagagcgccgccttcgccaagatcctggaccccgcctaccaggtggacaagggcggcagagtgagattcgtggtggagctggccgaccccaagctggaggtgaagtggtacaagaacggccaggagatcagacccagcaccaagtacatcttcgagcacaagggctgccagagaatcctgttcatcaacaactgccagatgaccgacgacagcgagtactacgtgaccgccggcgacgagaagtgcagcaccgagctgttcgtgagagagccccccatcatggtgaccaagcagctggaggacaccaccgcctactgcggcgagagagtggagctggagtgcgaggtgagcgaggacgacgccaacgtgaagtggttcaagaacggcgaggagatcatccccggccccaagagcagatacagaatcagagtggagggcaagaagcacatcctgatcatcgagggcgccaccaaggccgacgccgccgagtacagcgtgatgaccaccggcggccagagcagcgccaagctgagcgtggacctgaagcccctgaagatcctgacccccctgaccgaccagaccgtgaacctgggcaaggagatctgcctgaagtgcgagatcagcgagaacatccccggcaagtggaccaagaacggcctgcccgtgcaggagagcgacagactgaaggtggtgcacaagggcagaatccacaagctggtgatcgccaacgccctgaccgaggacgagggcgactacgtgttcgcccccgacgcctacaacgtgaccctgcccgccaaggtgcacgtgatcgacccccccaagatcatcctggacggcctggacgccgacaacaccgtgaccgtgatcgccggcaacaagctgagactggagatccccatcagcggcgagcccccccccaaggccatgtggagcagaggcgacaaggccatcatggagggcagcggcagaatcagaaccgagagctaccccgacagcagcaccctggtgatcgacatcgccgagagagacgacagcggcgtgtaccacatcaacctgaagaacgaggccggcgaggcccacgccagcatcaaggtgaaggtggtggacttccccgacccccccgtggcccccaccgtgaccgaggtgggcgacgactggtgcatcatgaactgggagccccccgcctacgacggcggcagccccatcctgggctacttcatcgagagaaagaagaagcagagcagcagatggatgagactgaacttcgacctgtgcaaggagaccaccttcgagcccaagaagatgatcgagggcgtggcctacgaggtgagaatcttcgccgtgaacgccatcggcatcagcaagcccagcatgcccagcagacccttcgtgcccctggccgtgaccagcccccccaccctgctgaccgtggacagcgtgaccgacaccaccgtgaccatgagatggagaccccccgaccacatcggcgccgccggcctggacggctacgtgctggagtactgcttcgagggcaccgaggactggatcgtggccaacaaggacctgatcgacaagaccaagttcaccatcaccggcctgcccaccgacgccaagatcttcgtgagagtgaaggccgtgaacgccgccggcgccagcgagcccaagtactacagccagcccatcctggtgaaggagatcatcgagccccccaagatcagaatccccagacacctgaagcagacctacatcagaagagtgggcgaggccgtgaacctggtgatccccttccagggcaagcccagacccgagctgacctggaagaaggacggcgccgagatcgacaagaaccagatcaacatcagaaacagcgagaccgacaccatcatcttcatcagaaaggccgagagaagccacagcggcaagtacgacctgcaggtgaaggtggacaagttcgtggagaccgccagcatcgacatccagatcatcgacagacccggccccccccagatcgtgaagatcgaggacgtgtggggcgagaacgtggccctgacctggaccccccccaaggacgacggcaacgccgccatcaccggctacaccatccagaaggccgacaagaagagcatggagtggttcaccgtgatcgagcactaccacagaaccagcgccaccatcaccgagctggtgatcggcaacgagtactacttcagagtgttcagcgagaacatgtgcggcctgagcgaggacgccaccatgaccaaggagagcgccgtgatcgccagagacggcaagatctacaagaaccccgtgtacgaggacttcgacttcagcgaggcccccatgttcacccagcccctggtgaacacctacgccatcgccggctacaacgccaccctgaactgcagcgtgagaggcaaccccaagcccaagatcacctggatgaagaacaaggtggccatcgtggacgaccccagatacagaatgttcagcaaccagggcgtgtgcaccctggagatcagaaagcccagcccctacgacggcggcacctactgctgcaaggccgtgaacgacctgggcaccgtggagatcgagtgcaagctggaggtgaaggtgatctaccagggcgtgaacacccccggccagcccgtgttcctggagggccagcagcagagcctgcacaacaaggacttctag

SEQ ID NO: 128649 - protein, 700 aa, Artificial Sequence
  derived and/or modified sequence
MSRRTRCEDLDELHYQDTDSDVPEQRDSKCKVKWTHEEDEQLRALVRQFGQQDWKFLASHFPNRTDQQCQYRWLRVLNPDLVKGPWTKEEDQKVIELVKKYGTKQWTLIAKHLKGRLGKQCRERWHNHLNPEVKKSCWTEEEDRIICEAHKVLGNRWAEIAKMLPGRTDNAVKNHWNSTIKRKVDTGGFLSESKDCKPPVYLLLELEDKDGLQSAQPTEGQGSLLTNWPSVPPTIKEEENSEEELAAATTSKEQEPIGTDLDAVRTPEPLEEFPKREDQEGSPPETSLPYKWVVEAANLLIPAVGSSLSEALDLIESDPDAWCDLSKFDLPEEPSAEDSINNSLVQLQASHQQQVLPPRQPSALVPSVTEYRLDGHTISDLSRSSRGELIPISPSTEVGGSGIGTPPSVLKRQRKRRVALSPVTENSTSLSFLDSCNSLTPKSTPVKTLPFSPSQFLNFWNKQDTLELESPSLTSTPVCSQKVVVTTPLHRDKTPLHQKHAAFVTPDQKYSMDNTPHTPTPFKNALEKYGPLKPLPQTPHLEEDLKEVLRSEAGIELIIEDDIRPEKQKRKPGLRRSPIKKVRKSLALDIVDEDVKLMMSTLPKSLSLPTTAPSNSSSLTLSGIKEDNSLLNQGFLQAKPEKAAVAQKPRSHFTTPAPMSSAWKTVACGGTRDQLFMQEKARQLLGRLKPSHTSRTLILS

SEQ ID NO: 128650 - DNA, 2731 bp, Artificial Sequence
  derived and/or modified sequence
gcgcttggcgggagatagaaaagtgcttcaacccgcgccggcggcgactgcagttcctgcgagcgaggagcgcgggacctgctgacacgctgacgccttcgagcgcggcccggggcccggagcggccggagcagcccgggtcctgaccccggcccggctcccgctccgggctctgccggcgggcgggcgagcgcggcgcggtccgggccggggggatgtctcggcggacgcgctgcgaggatctggatgagctgcactaccaggacacagattcagatgtgccggagcagagggatagcaagtgcaaggtcaaatggacccatgaggaggacgagcagctgagggccctggtgaggcagtttggacagcaggactggaagttcctggccagccacttccctaaccgcactgaccagcaatgccagtacaggtggctgagagttttgaatccagaccttgtcaaggggccatggaccaaagaggaagaccaaaaagtcatcgagctggttaagaagtatggcacaaagcagtggacactgattgccaagcacctgaagggccggctggggaagcagtgccgtgaacgctggcacaaccacctcaaccctgaggtgaagaagtcttgctggaccgaggaggaggaccgcatcatctgcgaggcccacaaggtgctgggcaaccgctgggccgagatcgccaagatgttgccagggaggacagacaatgctgtgaagaatcactggaactctaccatcaaaaggaaggtggacacaggaggcttcttgagcgagtccaaagactgcaagcccccagtgtacttgctgctggagctcgaggacaaggacggcctccagagtgcccagcccacggaaggccagggaagtcttctgaccaactggccctccgtccctcctaccataaaggaggaggaaaacagtgaggaggaacttgcagcagccaccacatcgaaggaacaggagcccatcggtacagatctggacgcagtgcgaacaccagagcccttggaggaattcccgaagcgtgaggaccaggaaggctccccaccagaaacgagcctgccttacaagtgggtggtggaggcagctaacctcctcatccccgctgtgggttctagcctctctgaagccctggacttgatcgagtcggaccctgatgcttggtgtgacctgagtaaatttgacctccctgaggaaccatctgcagaggacagtatcaacaacagcctagtgcagctgcaagcgtcacatcagcagcaagtcctgccaccccgccagccttccgccctggtgcccagtgtgaccgagtaccgcctggatggccacaccatctcagacctgagccggagcagccggggcgagctgatccccatctcccccagcactgaagtcgggggctctggcattggcacaccgccctctgtgctcaagcggcagaggaagaggcgtgtggctctgtcccctgtcactgagaatagcaccagtctgtccttcctggattcctgtaacagcctcacgcccaagagcacacctgttaagaccctgcccttctcgccctcccagtttctgaacttctggaacaaacaggacacattggagctggagagcccctcgctgacatccaccccagtgtgcagccagaaggtggtggtcaccacaccactgcaccgggacaagacacccctgcaccagaaacatgctgcgtttgtaaccccagatcagaagtactccatggacaacactccccacacgccaaccccgttcaagaacgccctggagaagtacggacccctgaagcccctgccacagaccccgcacctggaggaggacttgaaggaggtgctgcgttctgaggctggcatcgaactcatcatcgaggacgacatcaggcccgagaagcagaagaggaagcctgggctgcggcggagccccatcaagaaagtccggaagtctctggctcttgacattgtggatgaggatgtgaagctgatgatgtccacactgcccaagtctctatccttgccgacaactgccccttcaaactcttccagcctcaccctgtcaggtatcaaagaagacaacagcttgctcaaccagggcttcttgcaggccaagcccgagaaggcagcagtggcccagaagccccgaagccacttcacgacacctgcccctatgtccagtgcctggaagacggtggcctgcggggggaccagggaccagcttttcatgcaggagaaagcccggcagctcctgggccgcctgaagcccagccacacatctcggaccctcatcttgtcctgaggtgttgagggtgtcacgagcccattctcatgtttacaggggttgtgggggcagagggggtctgtgaatctgagagtcattcaggtgacctcctgcagggagccttctgccaccagcccctccccagactctcaggtggaggcaacagggccatgtgctgccctgttgccgagcccagctgtgggcggctcctggtgctaacaacaaagttccacttccaggtctgcctggttccctccccaaggccacagggagctccgtcagcttctcccaagcccacgtcaggcctggcctcatctcagaccctgcttaggatgggggatgtggccaggggtgctcctgtgctcaccctctcttggtgcatttttttggaagaataaaattgcctctctcttaaaaaaaaaaaaaaaaaa

SEQ ID NO: 128651 - DNA, 2103 bp, Artificial Sequence
  derived and/or modified sequence
atgtcccgccgtacacggtgcgaggatctcgacgagctacactatcaggacaccgactctgacgtgcctgaacagagggacagcaagtgtaaagtcaaatggacccatgaagaagatgagcaactgagagcgctggtccgacagttcggccagcaagactggaagtttttggcttctcattttcccaacagaaccgaccaacagtgtcagtatcggtggctgagagtgctgaacccagacctggtgaaaggaccctggacaaaagaggaagatcagaaagtgattgagttggtgaagaagtacggcaccaaacagtggactttgattgctaagcacctgaagggacgacttgggaaacaatgcagggagagatggcataaccacctaaatccagaagtgaagaaatcatgctggacagaagaagaagacaggataatctgcgaggcacataaggtactgggtaatcgctgggctgaaatcgcaaagatgctgcccggacgaaccgacaatgccgtgaagaatcattggaacagcactatcaaaaggaaggtggatacgggcggattccttagcgagtccaaagactgcaagccccctgtctatttgctgctcgaactagaagacaaggacggactgcagtccgcacaacccacagagggccagggatctttactcaccaactggcctagcgtgcctccaacaattaaggaagaagagaactccgaagaggagttggcggcagccactacctctaaagaacaggagcctatcggtaccgatcttgatgctgtgagaacccctgagccccttgaggagttcccgaaacgggaagatcaagagggtagtcctcctgaaacatccttgccgtacaagtgggtagtggaggcagctaatcttctgattccagctgtagggtctagcctgtccgaagcgctggacttgattgagagcgatcctgatgcatggtgcgacttgagcaagtttgacctacccgaggagccttcagctgaagactctattaacaattctctggtacagctgcaggctagccaccagcaacaggtgttacccccacgccagccatctgctctggtaccatctgttaccgaataccggctggatgggcacaccatttccgatctcagtcggagtagtagaggagagctgatacccatcagccccagcaccgaagtgggcggatctggcatcggcaccccgcctagtgtcctaaagcgacagcgcaagcggagggtggccctgtctcccgttacggagaattctacaagtctcagcttcctcgacagttgcaactctttgacacccaagtccacaccagtgaaaacactgccattctcccctagccaatttctgaatttctggaataagcaggacactttggagctagagtcccccagccttacctccacacctgtctgttcacagaaagtggtggtcaccacacctctccatagagacaaaacaccactgcatcagaagcacgccgctttcgtgacacctgatcagaagtacagcatggacaacacaccccatactccaaccccatttaagaacgccttagaaaaatacgggcctttgaagcctttgccacagaccccccatctggaggaagacttaaaagaagtgcttcgtagtgaggctggtatcgaacttattattgaagacgacatacgccctgagaaacaaaagagaaagcctggcctcaggcgctcaccaattaagaaggttagaaagagcctggccctggacatcgtcgacgaggatgtcaagctgatgatgtcaacactgcctaaatctctgtctctgccaacaacagctcctagcaattccagctcgctcacactatcaggcatcaaggaggataattcacttctgaaccaaggtttcctgcaggctaagcccgagaaagcagcggtcgcccaaaagcctcgctcacacttcacaacccctgcccctatgagcagtgcgtggaagacagttgcctgcgggggtacacgcgaccaacttttcatgcaggagaaggcacggcagctcctaggcaggcttaagccatcccacactagtcgtactcttatcctgtcatag

SEQ ID NO: 128652 - DNA, 2103 bp, Artificial Sequence
  derived and/or modified sequence
atgagcagaagaaccagatgcgaggacctggacgagctgcactaccaggacaccgacagcgacgtgcccgagcagagagacagcaagtgcaaggtgaagtggacccacgaggaggacgagcagctgagagccctggtgagacagttcggccagcaggactggaagttcctggccagccacttccccaacagaaccgaccagcagtgccagtacagatggctgagagtgctgaaccccgacctggtgaagggcccctggaccaaggaggaggaccagaaggtgatcgagctggtgaagaagtacggcaccaagcagtggaccctgatcgccaagcacctgaagggcagactgggcaagcagtgcagagagagatggcacaaccacctgaaccccgaggtgaagaagagctgctggaccgaggaggaggacagaatcatctgcgaggcccacaaggtgctgggcaacagatgggccgagatcgccaagatgctgcccggcagaaccgacaacgccgtgaagaaccactggaacagcaccatcaagagaaaggtggacaccggcggcttcctgagcgagagcaaggactgcaagccccccgtgtacctgctgctggagctggaggacaaggacggcctgcagagcgcccagcccaccgagggccagggcagcctgctgaccaactggcccagcgtgccccccaccatcaaggaggaggagaacagcgaggaggagctggccgccgccaccaccagcaaggagcaggagcccatcggcaccgacctggacgccgtgagaacccccgagcccctggaggagttccccaagagagaggaccaggagggcagcccccccgagaccagcctgccctacaagtgggtggtggaggccgccaacctgctgatccccgccgtgggcagcagcctgagcgaggccctggacctgatcgagagcgaccccgacgcctggtgcgacctgagcaagttcgacctgcccgaggagcccagcgccgaggacagcatcaacaacagcctggtgcagctgcaggccagccaccagcagcaggtgctgccccccagacagcccagcgccctggtgcccagcgtgaccgagtacagactggacggccacaccatcagcgacctgagcagaagcagcagaggcgagctgatccccatcagccccagcaccgaggtgggcggcagcggcatcggcaccccccccagcgtgctgaagagacagagaaagagaagagtggccctgagccccgtgaccgagaacagcaccagcctgagcttcctggacagctgcaacagcctgacccccaagagcacccccgtgaagaccctgcccttcagccccagccagttcctgaacttctggaacaagcaggacaccctggagctggagagccccagcctgaccagcacccccgtgtgcagccagaaggtggtggtgaccacccccctgcacagagacaagacccccctgcaccagaagcacgccgccttcgtgacccccgaccagaagtacagcatggacaacaccccccacacccccacccccttcaagaacgccctggagaagtacggccccctgaagcccctgccccagaccccccacctggaggaggacctgaaggaggtgctgagaagcgaggccggcatcgagctgatcatcgaggacgacatcagacccgagaagcagaagagaaagcccggcctgagaagaagccccatcaagaaggtgagaaagagcctggccctggacatcgtggacgaggacgtgaagctgatgatgagcaccctgcccaagagcctgagcctgcccaccaccgcccccagcaacagcagcagcctgaccctgagcggcatcaaggaggacaacagcctgctgaaccagggcttcctgcaggccaagcccgagaaggccgccgtggcccagaagcccagaagccacttcaccacccccgcccccatgagcagcgcctggaagaccgtggcctgcggcggcaccagagaccagctgttcatgcaggagaaggccagacagctgctgggcagactgaagcccagccacaccagcagaaccctgatcctgagctag

SEQ ID NO: 128653 - DNA, 2103 bp, Artificial Sequence
  derived and/or modified sequence
atgagcagaagaacccgatgcgaagatctggatgagctgcattatcaggacactgattctgatgttcctgagcagcgggacagtaagtgcaaggttaagtggactcacgaggaagatgagcagctgagggccctcgtgcgtcaattcggacagcaggactggaaattcctggcatctcactttcccaatcgtacagaccaacagtgccagtatcgctggctgagagtccttaatccagacctggtgaaagggccttggaccaaagaagaggatcagaaggtaattgagcttgttaagaagtacggaacgaaacagtggactctgattgcaaagcacctcaaagggcgcctggggaagcagtgcagggagcgctggcacaatcatctgaacccagaggttaaaaaatcctgttggacggaggaagaagaccggatcatttgtgaggcccataaggtgttgggcaatcgatgggcagagattgccaaaatgctacccggccggactgataacgccgtcaagaatcactggaattctacaatcaaaagaaaagtggataccggtggattcttaagtgagagtaaggattgtaaaccaccagtctacttgttgttggagcttgaagataaggatgggctccagtcagcccagcccacggagggccaagggtccttgctaactaactggccgtctgtccccccaactatcaaagaggaggaaaactctgaagaggagctcgccgctgccacaacctcaaaagaacaggagcccatcggcaccgatttggacgcagtccggacaccagagcctttagaggaatttcctaaacgtgaggaccaggaaggatctccccctgagacctccctgccttacaagtgggtggtggaagctgccaatttattgatccctgcagtggggagcagcctctcagaagccctggacctcatcgagtctgatcctgatgcgtggtgtgacctgtccaagttcgacctacctgaggagccttcagcagaggattctattaataactctttggtgcagctacaggctagccatcagcagcaggtcctcccccctcggcagccttcagccctggtgcctagcgtcacagagtaccgcctggacggccacactatttctgacctgtcccggtcctctcgaggcgaactgatccccatcagcccctccacggaggtcggaggttctggtatcgggaccccaccaagcgtactcaagagacaacggaagcgccgagtggctctgtccccagtcacggagaattctacatccctgtcttttctggattcctgtaactctctgacccctaagagtaccccggtgaaaacactcccttttagcccgtcccagtttcttaatttctggaataaacaggataccctggagttggagtcgccctccctgacatctacacccgtgtgctcacagaaggtcgtcgtgaccacaccgctgcatagagataagaccccactccaccaaaagcacgcagcgtttgtcactcccgaccagaaatactctatggacaatacacctcacaccccaacccccttcaagaacgctctggaaaagtatgggccgctgaaacctctgccccagactccacacctggaggaggacctgaaagaggtgttgagaagcgaagccggtatcgaactaattattgaagacgacatacgacctgaaaagcagaagcgcaagccaggcttgcgacggtcgcctataaagaaggtaagaaaatcactggccctggatattgtggatgaagacgtcaagctcatgatgtccactctgccgaagtcactgagccttccgactaccgccccaagtaactcctcttccctgactttgtctgggatcaaggaggataattctctgctaaatcagggtttccttcaggccaagcctgaaaaggctgccgtggcccaaaagcctcgctctcactttacaacccctgcccctatgtctagcgcttggaagactgtggcttgcggcgggaccagggaccagctttttatgcaagagaaagcccggcaattactcggtagactgaagccgtcccatacttctcggaccctgatcctgagttag

SEQ ID NO: 128654 - DNA, 2103 bp, Artificial Sequence
  derived and/or modified sequence
atgagcaggaggacccgctgtgaggacctggatgagctgcactaccaggacacagacagtgatgtgcctgagcagagggacagcaagtgcaaggtgaagtggacccatgaggaggatgagcagctgcgggccctggtgcggcagtttggccagcaggactggaagttcctggccagccacttccccaacagaacagaccagcagtgccagtaccgctggctgcgggtgctgaacccagacctggtgaagggcccctggaccaaggaggaggaccagaaggtgattgagctggtgaagaagtatggcaccaagcagtggaccctgattgccaagcacctgaagggccgcctgggcaagcagtgccgggagcgctggcacaaccacctgaaccctgaggtgaagaagagctgctggacagaggaggaggaccgcatcatctgtgaggcccacaaggtgctgggcaaccgctgggccgagatcgccaagatgctgcccggccgcacagacaatgctgtgaagaaccactggaacagcaccatcaagaggaaggtggacaccggcggcttcctgtctgagagcaaggactgcaagccccctgtgtacctgctgctggagctggaggacaaggatggcctgcagagcgcccagcccacagagggccagggcagcctgctgaccaactggcccagcgtgccccccaccatcaaggaggaggagaacagcgaggaggagctggccgccgccaccaccagcaaggagcaggagcccatcggcacagacctggatgctgtgaggaccccagagcccctggaggagttccccaagcgggaggaccaggagggcagccccccagagaccagcctgccctacaagtgggtggtggaggccgccaacctgctgatcccagctgtgggcagcagcctgtctgaggccctggacctgattgaaagtgaccctgatgcctggtgtgacctgagcaagtttgacctgcctgaggagcccagcgcagaagattccatcaacaacagcctggtgcagctgcaggccagccaccagcagcaggtgctgcccccccggcagcccagcgccctggtgcccagcgtgacagagtaccgcctggatggccacaccatcagtgacctgagccgcagcagcagaggagagctgatccccatcagccccagcacagaggtgggcggcagcggcatcggcaccccacccagcgtgctgaagaggcagaggaagagaagagtggccctgagccctgtgacagagaacagcaccagcctgtccttcctggacagctgcaacagcctgacccccaagagcacccctgtgaagaccctgcccttcagccccagccagttcctgaacttctggaacaagcaggacaccctggagctggagagccccagcctgaccagcacccctgtgtgcagccagaaggtggtggtgaccacccccctgcaccgggacaagacccccctgcaccagaagcatgctgcctttgtgaccccagaccagaagtacagcatggacaacaccccccacacccccacccccttcaagaatgccctggagaagtatggccccctgaagcccctgccccagaccccccacctggaggaggacctgaaggaggtgctgcggtctgaggccggcatcgagctgatcattgaagatgacatccggcctgagaagcagaagaggaagccaggcctgcggcgcagccccatcaagaaggtgaggaagagcctggccctggacatcgtggatgaagatgtgaagctgatgatgagcaccctgcccaagagcctgagcctgcccaccacagcccccagcaacagcagcagcctgaccctgagcggcatcaaggaggacaacagcctgctgaaccagggcttcctgcaggccaagccagagaaggctgctgtggcccagaagcccaggagccacttcaccaccccagcccccatgagcagcgcctggaagacagtggcctgtggcggcacccgggaccagctgttcatgcaggagaaggcccggcagctgctgggccgcctgaagcccagccacaccagcaggaccctcatcctgtcctag

SEQ ID NO: 128655 - DNA, 2103 bp, Artificial Sequence
  derived and/or modified sequence
atgagccggcggacccggtgcgaggacctggacgagctgcactaccaggacactgacagcgatgttcctgaacaaagggacagcaagtgcaaggtgaagtggacccacgaagaagacgagcagctcagggctctcgtccgccagttcggacaacaggactggaaatttcttgcatcacactttcctaatcgtaccgaccagcaatgccagtataggtggttaagggtgctgaacccagacttggtgaagggcccatggacaaaggaggaggaccagaaggtgatcgagctggtaaagaaatacgggaccaagcagtggacgctgatcgccaagcatctcaaagggcgtcttggaaagcagtgtcgcgaacgatggcacaaccatctcaaccccgaagtaaaaaagagctgttggaccgaggaggaggataggatcatttgtgaagcccacaaggttctggggaacaggtgggctgagatcgccaagatgcttccagggcgaacagataacgcagtcaagaaccactggaactctacaatcaaacggaaagtagatacaggaggattcctgtctgagtctaaggattgtaaaccgccagtttatctgctccttgaactcgaagacaaagacgggctgcagtccgctcaaccgacagagggacagggcagtttactcacaaattggccaagtgtacctcccactataaaggaggaggaaaattccgaagaagaactggcagcggctactacaagtaaagaacaagaacctatagggacagatctggacgccgtgcgcacccctgaacccctcgaggagttccccaaacgcgaagatcaggaagggtccccccccgaaacctccctcccttataagtgggttgttgaagccgcaaacttactgatccctgccgtcgggtcttctctgtctgaggcccttgatctaattgagagcgacccggatgcatggtgtgacctgagtaaatttgacctcccagaagaaccttcagcggaggatagtattaataacagcctggtgcaattgcaggctagtcaccagcagcaggtcttaccacctagacagccttcagccctggtgccctccgtcactgaatacaggctggatggtcataccatctcagatctgtctcgaagctcacggggtgaactcatcccaatttcgccctctactgaggtgggaggttcagggattggaactcccccatcagtcctcaagcgccagcgcaaacgccgggtggccctgtctccggtcaccgagaactccaccagcctgtcctttttagatagttgcaactccctgacgccaaagagcacacctgtgaagacactaccttttagcccttcgcagttcctcaacttttggaataagcaagacacactcgaactggaatccccaagtctcacctccacccccgtgtgctcccagaaggtggtggttacaacgcctctacacagggacaagacccctctgcaccagaagcatgcagcctttgtgactcccgaccagaagtactccatggacaacactccccatacccctaccccattcaaaaatgctctggaaaaatacggaccgctgaagccactgccccagaccccgcacctagaggaggatctcaaggaggtccttagatctgaagccggcattgagctgatcatcgaagacgacatcagacctgaaaaacagaagcgtaagcccggcttacgacgaagcccaattaagaaagttcgaaaatcattggccctcgatatagtagacgaagacgtgaagctcatgatgtcaaccctgcctaagtccctcagcctgcccactactgctccctcaaactcgtcttcactgacattgtccggcatcaaggaagataatagcctactgaatcagggctttctacaggctaagcctgaaaaggcggcagttgcccaaaagccacgttcccattttactactccagcccccatgtcctctgcatggaagacagtggcatgcggcggcacccgcgaccagctgttcatgcaggagaaagccagacagcttctgggcaggctgaaaccatctcacacatcccggaccttgatcctgtcctag

SEQ ID NO: 128656 - DNA, 2639 bp, Artificial Sequence
  derived and/or modified sequence
gctgacgccttcgagcgcggcccggggcccggagcggccggagcagcccgggtcctgaccccggcccggctcccgctccgggctctgccggcgggcgggcgagcgcggcgcggtccgggccggggggatgtctcggcggacgcgctgcgaggatctggatgagctgcactaccaggacacagattcagatgtgccggagcagagggatagcaagtgcaaggtcaaatggacccatgaggaggacgagcagctgagggccctggtgaggcagtttggacagcaggactggaagttcctggccagccacttccctaaccgcactgaccagcaatgccagtacaggtggctgagagttttgaatccagaccttgtcaaggggccatggaccaaagaggaagaccaaaaagtcatcgagctggttaagaagtatggcacaaagcagtggacactgattgccaagcacctgaagggccggctggggaagcagtgccgtgaacgctggcacaaccacctcaaccctgaggtgaagaagtcttgctggaccgaggaggaggaccgcatcatctgcgaggcccacaaggtgctgggcaaccgctgggccgagatcgccaagatgttgccagggaggacagacaatgctgtgaagaatcactggaactctaccatcaaaaggaaggtggacacaggaggcttcttgagcgagtccaaagactgcaagcccccagtgtacttgctgctggagctcgaggacaaggacggcctccagagtgcccagcccacggaaggccagggaagtcttctgaccaactggccctccgtccctcctaccataaaggaggaggaaaacagtgaggaggaacttgcagcagccaccacatcgaaggaacaggagcccatcggtacagatctggacgcagtgcgaacaccagagcccttggaggaattcccgaagcgtgaggaccaggaaggctccccaccagaaacgagcctgccttacaagtgggtggtggaggcagctaacctcctcatccctgctgtgggttctagcctctctgaagccctggacttgatcgagtcggaccctgatgcttggtgtgacctgagtaaatttgacctccctgaggaaccatctgcagaggacagtatcaacaacagcctagtgcagctgcaagcgtcacatcagcagcaagtcctgccaccccgccagccttccgccctggtgcccagtgtgaccgagtaccgcctggatggccacaccatctcagacctgagccggagcagccggggcgagctgatccccatctcccccagcactgaagtcgggggctctggcattggcacaccgccctctgtgctcaagcggcagaggaagaggcgtgtggctctgtcccctgtcactgagaatagcaccagtctgtccttcctggattcctgtaacagcctcacgcccaagagcacacctgttaagaccctgcccttctcgccctcccagtttctgaacttctggaacaaacaggacacattggagctggagagcccctcgctgacatccaccccagtgtgcagccagaaggtggtggtcaccacaccactgcaccgggacaagacacccctgcaccagaaacatgctgcgtttgtaaccccagatcagaagtactccatggacaacactccccacacgccaaccccgttcaagaacgccctggagaagtacggacccctgaagcccctgccacagaccccgcacctggaggaggacttgaaggaggtgctgcgttctgaggctggcatcgaactcatcatcgaggacgacatcaggcccgagaagcagaagaggaagcctgggctgcggcggagccccatcaagaaagtccggaagtctctggctcttgacattgtggatgaggatgtgaagctgatgatgtccacactgcccaagtctctatccttgccgacaactgccccttcaaactcttccagcctcaccctgtcaggtatcaaagaagacaacagcttgctcaaccagggcttcttgcaggccaagcccgagaaggcagcagtggcccagaagccccgaagccacttcacgacacctgcccctatgtccagtgcctggaagacggtggcctgcggggggaccagggaccagcttttcatgcaggagaaagcccggcagctcctgggccgcctgaagcccagccacacatctcggaccctcatcttgtcctgaggtgttgagggtgtcacgagcccattctcatgtttacaggggttgtgggggcagagggggtctgtgaatctgagagtcattcaggtgacctcctgcagggagccttctgccaccagcccctccccagactctcaggtggaggcaacagggccatgtgctgccctgttgccgagcccagctgtgggcggctcctggtgctaacaacaaagttccacttccaggtctgcctggttccctccccaaggccacagggagctccgtcagcttctcccaagcccacgtcaggcctggcctcatctcagaccctgcttaggatgggggatgtggccaggggtgctcctgtgctcaccctctcttggtgcatttttttggaagaataaaattgcctctctctttgtgctggtctgga

SEQ ID NO: 128657 - protein, 439 aa, Artificial Sequence
  derived and/or modified sequence
MPLNVSFTNRNYDLDYDSVQPYFYCDEEENFYQQQQQSELQPPAPSEDIWKKFELLPTPPLSPSRRSGLCSPSYVAVTPFSLRGDNDGGGGSFSTADQLEMVTELLGGDMVNQSFICDPDDETFIKNIIIQDCMWSGFSAAAKLVSEKLASYQAARKDSGSPNPARGHSVCSTSSLYLQDLSAAASECIDPSVVFPYPLNDSSSPKSCASQDSSAFSPSSDSLLSSTESSPQGSPEPLVLHEETPPTTSSDSEEEQEDEEEIDVVSVEKRQAPGKRSESGSPSAGGHSKPPHSPLVLKRCHVSTHQHNYAAPPSTRKDYPAAKRVKLDSVRVLRQISNNRKCTSPRSSDTEENVKRRTHNVLERQRRNELKRSFFALRDQIPELENNEKAPKVVILKKATAYILSVQAETQKLISEIDLLRKQNEQLKHKLEQLRNSCA

SEQ ID NO: 128658 - protein, 257 aa, Artificial Sequence
  derived and/or modified sequence
MPLNVSFTNRNYDLDYDSVQPYFYCDEEENFYQQQQQSELQPPAPSEDIWKKFELLPTPPLSPSRRSGLCSPSYVAVTPFSLRGDNDGGGGSFSTADQLEMVTELLGGDMVNQSFICDPDDETFIKNIIIQDCMWSGFSAAAKLVSEKLASYQAARKDSGSPNPARGHSVCSTSSLYLQDLSAAASECIDPSVVFPYPLNDSSSPKSCASQDSSAFSPSSDSLLSSTESSPQGSPEPLVLHEETPPTTSSDSGGTRR

SEQ ID NO: 128659 - protein, 454 aa, Artificial Sequence
  derived and/or modified sequence
LDFFRVVENQQPPATMPLNVSFTNRNYDLDYDSVQPYFYCDEEENFYQQQQQSELQPPAPSEDIWKKFELLPTPPLSPSRRSGLCSPSYVAVTPFSLRGDNDGGGGSFSTADQLEMVTELLGGDMVNQSFICDPDDETFIKNIIIQDCMWSGFSAAAKLVSEKLASYQAARKDSGSPNPARGHSVCSTSSLYLQDLSAAASECIDPSVVFPYPLNDSSSPKSCASQDSSAFSPSSDSLLSSTESSPQGSPEPLVLHEETPPTTSSDSEEEQEDEEEIDVVSVEKRQAPGKRSESGSPSAGGHSKPPHSPLVLKRCHVSTHQHNYAAPPSTRKDYPAAKRVKLDSVRVLRQISNNRKCTSPRSSDTEENVKRRTHNVLERQRRNELKRSFFALRDQIPELENNEKAPKVVILKKATAYILSVQAEEQKLISEEDLLRKRREQLKHKLEQLRNSCA

SEQ ID NO: 128660 - protein, 420 aa, Artificial Sequence
  derived and/or modified sequence
MPLNVSFTNRNYDLDYDSVQPYFYCDEEDIWKKFELLPTPPLSPSRRSGLCSPSYVAVTPFSLRGDNDGGGGSFSTADQLEMVTELLGGDMVNQSFICDPDDETFIKNIIIQDCMWSGFSAAAKLVSEKLASYQAARKDSGSPNPARGHSVCSTSSLYLQDLSAAASECIDPSVVFPYPLNDSSSPKSCASQDSSAFSPSSDSLLSSTESSPQGSPEPLVLHEETPPTTSSDSEEEQEDEEEIDVVSVEKRQAPGKRSESGSPSAGGHSKPPHSPLVLKRCHVSTHQHNYAAPPSTRKDYPAAKRVKLDSVRVLRQISNNRKCTSPRSSDTEENVKRRTHNVLERQRRNELKRSFFALRDQIPELENNEKAPKVVILKKATAYILSVQAEEQKLISEEDLLRKRREQLKHKLEQLRNSCA

SEQ ID NO: 128661 - protein, 453 aa, Artificial Sequence
  derived and/or modified sequence
LDFFRVVENQPPATMPLNVSFTNRNYDLDYDSVQPYFYCDEEENFYQQQQQSELQPPAPSEDIWKKFELLPTPPLSPSRRSGLCSPSYVAVTPFSLRGDNDGGGGSFSTADQLEMVTELLGGDMVNQSFICDPDDETFIKNIIIQDCMWSGFSAAAKLVSEKLASYQAARKDSGSPNPARGHSVCSTSSLYLQDLSAAASECIDPSVVFPYPLNDSSSPKSCASQDSSAFSPSSDSLLSSTESSPQGSPEPLVLHEETPPTTSSDSEEEQEDEEEIDVVSVEKRQAPGKRSESGSPSAGGHSKPPHSPLVLKRCHVSTHQHNYAAPPSTRKDYPAAKRVKLDSVRVLRQISNNRKCTSPRSSDTEENVKRRTHNVLERQRRNELKRSFFALRDQIPELENNEKAPKVVILKKATAYILSVQAEEQKLISEEDLLRKRREQLKHKLEQLRNSCA

SEQ ID NO: 128662 - protein, 439 aa, Artificial Sequence
  derived and/or modified sequence
MPLNVSFTNRNYDLDYDSVQPYFYCDEEENFYQQQQQSELQPPAPSEDIWKKFELLPTPPLSPSRRSGLCSPSYVAVTPFSLRGDNDGGGGSFSTADQLEMVTELLGGDMVNQSFICDPDDETFIKNIIIQDCMWSGFSAAAKLVSEKLASYQAARKDSGSPNPARGHSVCSTSSLYLQDLSAAASECIDPSVVFPYPLNDSSSPKSCASQDSSAFSPSSDSLLSSTESSPQGSPEPLVLHEETPPTTSSDSEEEQEDEEEIDVVSVEKRQAPGKRSESGSPSAGGHSKPPHSPLVLKRCHVSTHQHNYAAPPSTRKDYPAAKRVKLDSVRVLRQISNNRKCTSPRSSDTEENVKRRTHNVLERQRRNELKRSFFALRDQIPELENNEKAPKVVILKKATAYILSVQAEEQKLISEEDLLRKRREQLKHKLEQLRNSCA

SEQ ID NO: 128663 - protein, 90 aa, Artificial Sequence
  derived and/or modified sequence
MTEENVKRRTHNVLERQRRNELKRSFFALRDQIPELENNEKAPKVVILKKATAYILSVQAETQKLISEIDLLRKQNEQLKHKLEQLRNSC

SEQ ID NO: 128664 - protein, 91 aa, Artificial Sequence
  derived and/or modified sequence
MTEENVKRRTHNVLERQRRNELKRSFFALRDQIPELENNEKAPKVVILKKATAYILSVQAETQKLISEIDLLRKQNEQLKHKLEQLRNSCA

SEQ ID NO: 128665 - protein, 91 aa, Artificial Sequence
  derived and/or modified sequence
MTEENVKRRTHNVLERQRRNELKRSFFALRDQIPELENNEKAPKVVILKKATAYILSVQAENQKLISEIDLLRKQNEQLKHKLEQLRNSCA

SEQ ID NO: 128666 - DNA, 27 bp, Artificial Sequence
  derived and/or modified sequence
cccctcaacgttagcttcaccaacagg

SEQ ID NO: 128667 - DNA, 2379 bp, Artificial Sequence
  derived and/or modified sequence
gacccccgagctgtgctgctcgcggccgccaccgccgggccccggccgtccctggctcccctcctgcctcgagaagggcagggcttctcagaggcttggcgggaaaaagaacggagggagggatcgcgctgagtataaaagccggttttcggggctttatctaactcgctgtagtaattccagcgagaggcagagggagcgagcgggcggccggctagggtggaagagccgggcgagcagagctgcgctgcgggcgtcctgggaagggagatccggagcgaatagggggcttcgcctctggcccagccctcccgctgatcccccagccagcggtccgcaacccttgccgcatccacgaaactttgcccatagcagcgggcgggcactttgcactggaacttacaacacccgagcaaggacgcgactctcccgacgcggggaggctattctgcccatttggggacacttccccgccgctgccaggacccgcttctctgaaaggctctccttgcagctgcttagacgctggatttttttcgggtagtggaaaaccagcagcctcccgcgacgatgcccctcaacgttagcttcaccaacaggaactatgacctcgactacgactcggtgcagccgtatttctactgcgacgaggaggagaacttctaccagcagcagcagcagagcgagctgcagcccccggcgcccagcgaggatatctggaagaaattcgagctgctgcccaccccgcccctgtcccctagccgccgctccgggctctgctcgccctcctacgttgcggtcacacccttctcccttcggggagacaacgacggcggtggcgggagcttctccacggccgaccagctggagatggtgaccgagctgctgggaggagacatggtgaaccagagtttcatctgcgacccggacgacgagaccttcatcaaaaacatcatcatccaggactgtatgtggagcggcttctcggccgccgccaagctcgtctcagagaagctggcctcctaccaggctgcgcgcaaagacagcggcagcccgaaccccgcccgcggccacagcgtctgctccacctccagcttgtacctgcaggatctgagcgccgccgcctcagagtgcatcgacccctcggtggtcttcccctaccctctcaacgacagcagctcgcccaagtcctgcgcctcgcaagactccagcgccttctctccgtcctcggattctctgctctcctcgacggagtcctccccgcagggcagccccgagcccctggtgctccatgaggagacaccgcccaccaccagcagcgactctgaggaggaacaagaagatgaggaagaaatcgatgttgtttctgtggaaaagaggcaggctcctggcaaaaggtcagagtctggatcaccttctgctggaggccacagcaaacctcctcacagcccactggtcctcaagaggtgccacgtctccacacatcagcacaactacgcagcgcctccctccactcggaaggactatcctgctgccaagagggtcaagttggacagtgtcagagtcctgagacagatcagcaacaaccgaaaatgcaccagccccaggtcctcggacaccgaggagaatgtcaagaggcgaacacacaacgtcttggagcgccagaggaggaacgagctaaaacggagcttttttgccctgcgtgaccagatcccggagttggaaaacaatgaaaaggcccccaaggtagttatccttaaaaaagccacagcatacatcctgtccgtccaagcagaggagcaaaagctcatttctgaagaggacttgttgcggaaacgacgagaacagttgaaacacaaacttgaacagctacggaactcttgtgcgtaaggaaaagtaaggaaaacgattccttctaacagaaatgtcctgagcaatcacctatgaacttgtttcaaatgcatgatcaaatgcaacctcacaaccttggctgagtcttgagactgaaagatttagccataatgtaaactgcctcaaattggactttgggcataaaagaacttttttatgcttaccatcttttttttttctttaacagatttgtatttaagaattgtttttaaaaaattttaagatttacacaatgtttctctgtaaatattgccattaaatgtaaataactttaataaaacgtttatagcagttacacagaatttcaatcctagtatatagtacctagtattataggtactataaaccctaattttttttatttaagtacattttgctttttaaagttgatttttttctattgtttttagaaaaaataaaataactggcaaatatatcattgagccaaatcttaaaaaaaaaaaaaaa

SEQ ID NO: 128668 - DNA, 1317 bp, Artificial Sequence
  derived and/or modified sequence
atgcccctgaacgtgagcttcaccaaccgcaactacgacctggactacgacagcgtgcagccctacttctactgcgacgaggaggagaacttctaccagcagcagcagcagagcgagctgcagccccccgcccccagcgaggacatctggaagaagttcgagctgctgcccaccccccccctgagccccagccgccgcagcggcctgtgcagccccagctacgtggccgtgacccccttcagcctgcgcggcgacaacgacggcggcggcggcagcttcagcaccgccgaccagctggagatggtgaccgagctgctgggcggcgacatggtgaaccagagcttcatctgcgaccccgacgacgagaccttcatcaagaacatcatcatccaggactgcatgtggagcggcttcagcgccgccgccaagctggtgagcgagaagctggccagctaccaggccgcccgcaaggacagcggcagccccaaccccgcccgcggccacagcgtgtgcagcaccagcagcctgtacctgcaggacctgagcgccgccgccagcgagtgcatcgaccccagcgtggtgttcccctaccccctgaacgacagcagcagccccaagagctgcgccagccaggacagcagcgccttcagccccagcagcgacagcctgctgagcagcaccgagagcagcccccagggcagccccgagcccctggtgctgcacgaggagaccccccccaccaccagcagcgacagcgaggaggagcaggaggacgaggaggagatcgacgtggtgagcgtggagaagcgccaggcccccggcaagcgcagcgagagcggcagccccagcgccggcggccacagcaagcccccccacagccccctggtgctgaagcgctgccacgtgagcacccaccagcacaactacgccgccccccccagcacccgcaaggactaccccgccgccaagcgcgtgaagctggacagcgtgcgcgtgctgcgccagatcagcaacaaccgcaagtgcaccagcccccgcagcagcgacaccgaggagaacgtgaagcgccgcacccacaacgtgctggagcgccagcgccgcaacgagctgaagcgcagcttcttcgccctgcgcgaccagatccccgagctggagaacaacgagaaggcccccaaggtggtgatcctgaagaaggccaccgcctacatcctgagcgtgcaggccgagacccagaagctgatcagcgagatcgacctgctgcgcaagcagaacgagcagctgaagcacaagctggagcagctgcgcaacagctgcgcc

SEQ ID NO: 128669 - DNA, 270 bp, Artificial Sequence
  derived and/or modified sequence
atgaccgaggagaacgtgaagcgccgcacccacaacgtgctggagcgccagcgccgcaacgagctgaagcgcagcttcttcgccctgcgcgaccagatccccgagctggagaacaacgagaaggcccccaaggtggtgatcctgaagaaggccaccgcctacatcctgagcgtgcaggccgagacccagaagctgatcagcgagatcgacctgctgcgcaagcagaacgagcagctgaagcacaagctggagcagctgcgcaacagctgc

SEQ ID NO: 128670 - DNA, 1317 bp, Artificial Sequence
  derived and/or modified sequence
atgccgctgaacgtgtctttcaccaacaggaactacgaccttgactacgacagcgtgcagccctacttctactgcgacgaggaagagaacttttatcaacagcagcagcaatcggaactccagccgccggcgccgtctgaggacatatggaagaagttcgaactcctcccgacccctccgctgtcgccgtctcgccgctccgggctgtgctccccgtcctatgtggccgtgactcctttcagcctgcgcggagataatgacggaggtgggggatcgttctcaaccgccgatcagctggaaatggtcaccgagctgttgggtggagacatggtaaaccaatcgtttatctgtgacccagatgatgaaaccttcatcaagaatatcatcatacaggactgtatgtggtccggcttcagtgccgcagcaaaactcgtgagcgaaaaacttgcctcctaccaggcagctcggaaggattccggatcgcccaatcctgcccggggccattctgtgtgctcaacttcctcgctgtaccttcaagacctgagcgctgcggcatcagaatgcatcgacccatctgtggtctttccatacccgctgaacgactcgagctcacctaagtcttgcgctagccaggattccagcgcgttctccccgtcatcagatagccttttgtcctcgaccgagagctcgccccagggatcgccggaaccgttggtactgcacgaggaaacgcctcccactacctcgagcgactccgaagaagagcaggaagatgaggaagaaatcgatgtggtttccgtggaaaagagacaagcgcctggcaaaaggtccgagtcgggctcgccgtcagcgggaggacattcgaagcccccacactcgccactggttctgaaaagatgccacgtcagtacgcatcagcacaattacgccgcacctccctcaactcggaaagattaccccgccgcgaagcgggtgaagctcgattcagtcagggtgctgcgccagatcagcaacaacagaaagtgtacttcgccacggtcctccgacactgaggaaaacgtcaagcgacgtacccataatgtgctcgagaggcaacggcggaacgaactgaaacgctcgttctttgctctccgcgaccaaattccggaactggagaacaatgagaaggccccaaaggtggtcatcctgaagaaagccacggcctacatcttgtcagtgcaagcggagactcagaagctcatttccgaaatcgacctgctccggaagcagaacgaacagctcaagcacaaattggagcaactccgcaattcctgcgca

SEQ ID NO: 128671 - DNA, 1317 bp, Artificial Sequence
  derived and/or modified sequence
atgccgctgaacgtctcgttcacgaatcgcaattatgatctcgattacgattcggtgcagccttacttttactgcgatgaggaggagaatttctatcagcaacaacaacagagcgagttgcagccgcctgcgccaagtgaggacatatggaagaagttcgaattgcttccaacgccccccctctcgccctcccgaagaagcggtctgtgctcgccgagttacgtggccgtcactccattttcgctccgcggtgataacgatggcggaggaggctcgttctccactgcggaccaactcgagatggttaccgaactattgggcggagatatggtcaaccaaagctttatctgcgatccggacgatgagaccttcattaagaacataatcatacaggactgcatgtggtccggcttttcggccgccgctaagctcgtgagtgagaagttggcatcttaccaggctgctcgtaaggactcgggctcccctaaccccgctcgaggccacagtgtttgtagtacctcctcactgtatctacaggacttatctgccgcagcctccgagtgtatcgatccctcggtcgtcttcccgtatcccttgaatgatagcagttctccaaaaagctgcgcgtcccaggactcgtcggcgttcagcccctcctcagactccctcctgtcctcaacagagagtagcccgcagggatcccccgagcccttggtcctccacgaggagacaccccccacaactagcagcgattccgaagaggaacaagaagacgaagaagagattgatgttgtctccgtggagaagcgtcaagcaccgggtaagcgtagcgagtctgggagccccagcgcaggaggccatagcaaaccgcctcacagtcccttggtattgaaaagatgccacgtctcgacgcatcagcacaattacgccgccccaccctccacacgcaaagattatccggccgcgaagcgcgttaaattggattcggtgagggttttgcgtcagatttcgaataacagaaagtgcacgtccccccgtagcagcgataccgaggagaacgtcaaaaggcgcacacataacgtcttggagcggcagcgaagaaacgaacttaagaggtccttttttgcgctacgtgatcagataccggagctggagaataacgaaaaggcacccaaggtggtcatactgaagaaggcgaccgcctacattctttcggtccaagccgaaacccagaagctgatctcagagattgacttgctgcgtaagcagaatgagcagctgaagcacaaattggagcagctgcgaaatagctgtgct

SEQ ID NO: 128672 - DNA, 1317 bp, Artificial Sequence
  derived and/or modified sequence
atgcctctgaatgtttcctttactaatagaaattacgacctggactacgattctgtgcagccatatttttattgcgacgaggaagagaacttctatcagcagcagcagcagtcggagctgcagccccctgcaccttcagaagatatctggaagaagttcgagctgctgccaacacccccattatcaccaagtaggcgatcaggcctgtgttcaccctcctatgtggccgtgacccccttttcgctacgcggtgacaatgacggcggaggcggctccttttcaaccgccgaccaactagagatggtgactgaactgctgggaggtgatatggttaatcagtccttcatctgtgacccagacgacgagacatttattaagaatattatcattcaagactgcatgtggagcggcttctccgcagcagcgaagctggtgtccgagaaactggcctcctaccaggccgcccgaaaggactctggaagccccaaccccgcaagaggccattcagtatgttccacaagctcactttacctgcaggatttgagtgctgccgcctcagaatgcatcgatccaagcgtcgtcttcccttatcccctaaacgattcatcttcccccaaaagctgcgcctcccaggatagctcagcttttagcccgagctcggactctttgctgagcagcaccgaatctagcccccaaggctccccggagcccctggtactgcatgaagaaactccacccacgacgtcttccgattctgaagaggaacaggaagatgaagaagagatagatgtggtatccgtggagaagcgacaagcacctggtaaaagaagtgaatccggcagtcctagcgcaggcgggcacagcaagccaccacacagcccgctggtcttgaagcgatgtcacgtgtctactcaccagcacaactacgcagcaccccccagtactagaaaagactatccagcagctaaaagagtgaagctcgattcagtaagggtgcttcgacagatcagtaacaatcggaagtgtaccagccctcgttctagtgatactgaggagaatgtgaagcgacgaacccataacgttctggaacgtcaaaggaggaatgaactgaagcggtcattttttgccttaagagaccagatacctgaactggaaaacaatgaaaaggcgcccaaggtagttatcctgaagaaggctaccgcatacatactttctgtgcaggcagagacgcaaaagctcatttcggaaatcgatctgttgaggaagcagaatgaacaactcaaacacaaactggagcaactgcgtaatagctgcgca

SEQ ID NO: 128673 - DNA, 1317 bp, Artificial Sequence
  derived and/or modified sequence
atgccacttaatgtgtcctttaccaatagaaactacgatctggactacgattcagtgcaaccatatttctactgcgacgaggaggaaaacttttaccagcagcagcaacagtcggagttgcaacctccggccccaagcgaagatatctggaagaagtttgagctgctgccaaccccgcccctttccccaagcaggcgctcgggactgtgttccccgtcgtacgtggccgtgactccattctccctcaggggagacaacgacgggggaggaggatcattcagcactgcggatcagctcgagatggttactgagctgctggggggagatatggtaaaccagtccttcatttgcgacccggacgacgaaaccttcatcaagaatatcatcatacaagactgcatgtggtccggttttagcgccgccgccaagctggtttcggaaaaacttgcttcgtaccaagcagcaagaaaggacagcgggtcgccaaacccggcgcggggacattcggtgtgttcaactagctccttgtacctgcaggacctttcggccgcggcctcggaatgtattgatcctagcgtagtgttcccgtacccactcaacgactcatccagccccaagtcgtgcgcgtcgcaggactcctcagcattctcgccctcatccgattccctgctgagcagcacggagagctcgccgcaaggatcacctgagccgctcgtcctgcacgaggaaaccccgcctactacttcatcggacagcgaggaagaacaggaagatgaggaagagatcgacgtggtgtccgtggaaaagcgccaggcgccgggcaaaagatccgaaagcggctctccttcagcgggcggccattcaaagcctccacatagccctctcgtgcttaaacgctgccacgtgagtacccaccaacataactatgcggctccaccgtccaccagaaaggactacccggcagcgaagcgggtcaaacttgatagcgtccgggtgctcagacagatctcgaacaatcgcaagtgtacttccccccgcagttctgatactgaagaaaacgtgaagcgcaggacccacaatgtcctcgaaaggcagcgacgcaacgaactgaagcgctcattctttgctcttcgcgatcagatcccggaactcgaaaacaacgaaaaggcaccgaaggtggtcatcctgaagaaagccacggcgtacatcctgtcggtgcaagctgaaacccagaagctcatttcagaaatcgacctgctgcgcaaacagaatgagcagcttaagcacaaacttgagcaactgcgcaattcgtgcgca

SEQ ID NO: 128674 - DNA, 1317 bp, Artificial Sequence
  derived and/or modified sequence
atgccgctcaacgtgtcctttactaatcgtaactacgatctcgactacgacagcgtccagccatacttctactgtgacgaggaagagaacttctaccaacagcagcagcagagtgagctccagcccccggccccttcggaagatatttggaagaagttcgaactccttcctactccgccgctgtccccgtcccgaagatccgggctctgctcgccgtcgtacgtggccgtgacccccttctcgttgcgcggcgataacgacggcggaggaggatcgttctcaaccgccgatcagctcgagatggtgaccgaactcctcgggggtgacatggtcaaccaatcgtttatctgtgaccctgacgacgaaaccttcatcaagaacatcattatccaggactgcatgtggtcaggattttcagcggccgccaagctggtgagcgagaagttggcgagctaccaagccgcgcggaaggactctggctcccccaatccagcccggggacattccgtgtgttccactagctcactgtacctgcaggacctttcagctgctgcatccgaatgcatcgacccatcggtggtgttcccatacccactgaacgacagttcgtctcctaaatcctgcgcatcacaggacagcagcgccttttctccgtcatctgatagccttctgtcctcaactgagtctagtcctcaaggatccccagaaccgctggtcctgcatgaggaaaccccgccgactacttcatcagactccgaagaagaacaggaagatgaggaggaaatcgatgtggtgagcgtagagaagcgccaggctccgggcaagcgctccgaatcgggtagtccatcagctggtggacactcgaagcctcctcactccccactggtgctgaaacgttgccatgtctcgacccatcaacacaattacgcggctccgccttcaacccggaaggattaccccgcagcgaagagggtcaaactcgatagcgtgagagtcctgcgccagatcagcaacaatagaaagtgcactagcccgagatctagtgatacggaagaaaatgtgaagagaaggacccacaatgtgcttgaacgccaacggcggaatgagctgaagcggtcgttcttcgccctgagggatcagattccagagctcgaaaacaacgagaaggccccgaaggtggtcatcctgaaaaaagcgaccgcatatatcctttctgttcaggcagaaacgcagaaactcatctcagagatagacttgctgcgcaaacaaaacgagcaactgaagcacaaattggagcaactgcgcaactcgtgcgct

SEQ ID NO: 128675 - DNA, 1317 bp, Artificial Sequence
  derived and/or modified sequence
atgccattgaatgtatcctttactaatcgtaattacgatcttgattatgatagtgtccaaccatacttctattgtgatgaagaagaaaatttttatcaacagcagcagcagtccgaacttcaacctccggcgccatccgaagatatatggaaaaaatttgaattattgccgacgccgccactgagcccgtcgagacgatcagggctgtgttcacccagctatgtggctgttacaccgtttagtttacgcggggataatgacggcggcggaggttctttttctactgcagatcagcttgaaatggtgacagaacttttaggaggcgatatggttaaccaaagtttcatttgcgacccggatgacgaaacatttatcaaaaacattatcattcaggattgcatgtggagtggtttttcagcggcggcaaaattggtgtcagaaaagctggcctcgtatcaggcagcccggaaagattccgggtctccgaacccagcacgtggacactccgtgtgctcaacgagtagtctatatcttcaggatcttagtgctgcagcgagcgaatgtatagatccttctgttgtgtttccatatccactgaatgattcctcaagccctaaatcctgcgcatcgcaggattctagtgcattcagtccttcatctgatagcttgttgtcaagtacagaatcatcgccgcaggggtcgccggagccgctggtgttgcacgaggaaacgccgccgacgacatcatctgattctgaagaagagcaagaagatgaggaagaaatcgacgtggtatcagtcgaaaaacgtcaagcgccaggaaaacgttctgagtctggctcaccatccgcggggggccattcaaaaccgcctcactctcctcttgtactcaaacggtgccacgtgagcacccatcagcataattacgctgccccgccgagtacccgcaaggactatccagcagcaaaacgagtgaagctggatagcgttcgcgtcttgcgtcaaattagcaataatagaaaatgtacttcaccgagatcgtcagacacagaagaaaatgtgaaaagacggacgcacaatgtcttagagagacaacgccgcaatgaattgaaacgttccttctttgcgcttcgggaccaaataccggaactggaaaataacgaaaaagcccccaaggtggtaatcctgaaaaaagccacagcttacattttgagtgtccaagctgaaacacaaaaacttattagcgaaattgaccttcttcgcaagcaaaatgaacaattaaaacataaattggagcaattacgcaattcttgtgcg

SEQ ID NO: 128676 - DNA, 1317 bp, Artificial Sequence
  derived and/or modified sequence
atgcctttgaatgtgagttttacaaaccgaaattacgaccttgattacgactcagtgcagccctatttttactgtgatgaagaggagaacttttaccagcagcagcagcagagcgagttgcagcctccggcaccaagcgaggatatctggaagaaattcgagctccttcctactccccctctgagcccatcccggagatctggactgtgcagtccatcttatgtggcggtgacacctttttccttgcgtggggacaatgacgggggtggaggctccttttccaccgcagaccagttagaaatggtaactgaactcctcggcggagatatggtgaatcagtctttcatttgcgacccagacgacgagacctttattaagaatatcatcattcaggactgtatgtggagcggcttctcagccgctgcaaaactggtgtctgaaaaactggcctcctaccaggccgcgcggaaagactcaggaagtcccaaccccgctaggggccattctgtgtgctcgacaagttccctctatttacaggacctgtcagctgctgccagcgaatgtatcgacccttcagtggtctttccctacccactaaacgactcatcatctccaaagtcctgcgctagtcaggattcctctgcctttagtccatcatcagattctctactgtccagtacagagtcaagtcctcagggcagtcccgaaccattggttctgcacgaggagacccccccaaccacatcctccgatagcgaggaagaacaggaggacgaagaggagatcgatgttgtcagtgttgagaaacgccaggcgcccggaaaacggagcgaaagtgggtccccctccgccggtggccacagcaaaccgccccactctcctctggtgctgaaacgctgccacgtgagcacacaccagcacaactatgcggcccccccgtcaacccgaaaggattatcccgccgcaaagcgagtaaagcttgactctgtgcgagtcctgcgccagatttcaaacaatagaaagtgcaccagcccgagaagttccgacacagaagaaaacgttaagaggaggactcataacgtcctggaacggcagcggcggaatgagcttaagcgcagctttttcgccctgcgtgaccaaataccggaattagaaaacaacgagaaggcccctaaagtcgtcatactgaagaaggccacagcttacattctgtcagttcaagcggaaacccagaagttaatctccgagatcgatttgctgaggaagcagaacgagcagcttaagcacaagttagagcaactgcggaattcttgcgct

SEQ ID NO: 128677 - DNA, 1317 bp, Artificial Sequence
  derived and/or modified sequence
atgccattaaatgttagctttaccaatcgaaattacgatctggactacgatagcgtacagccatacttttactgcgacgaagaagagaatttttatcaacaacaacaacaaagtgagctgcaaccaccggcgccttccgaagatatctggaagaaattcgaactgctaccgactcctccgttgtcaccatcacgacggtcgggactctgctcgccgagttacgtcgctgtgaccccgtttagtttaaggggagataatgatggagggggggggagcttctcgacagctgatcaactagaaatggtgacagagctgctcggtggagatatggttaatcaatccttcatttgtgatccagatgatgagacattcataaaaaacattataattcaagattgcatgtggtcaggattttccgcagcggctaagttggtttcggaaaagttagcatcatatcaggctgccagaaaagattccggatcaccgaatccggctagaggtcactccgtctgtagtacgtcaagcctctaccttcaagatctttctgctgctgcctcagaatgcatcgatccatctgttgtatttccatatccactaaatgacagttcttcgcctaagagttgcgcgtcccaagattcatcagctttttcgccgtcatcagattccttactttcctcaacagaatcgtcgcctcaaggaagccccgaaccccttgttttgcatgaggaaacgccgcccacaacctcgtcggattcagaagaagagcaagaagatgaggaagaaatcgacgttgtgtctgttgaaaagcgacaagcaccggggaaaagatccgaatccggttcaccgtctgcgggagggcacagcaaacctccacactcaccactggtcctaaaaagatgccatgtgtctactcaccagcataactatgctgcccccccttcaacgcgtaaagattatcccgccgcgaaacgagtgaaactggattcggtgagggttctaagacaaatttcgaataatagaaagtgtacttcaccacgatcttccgatactgaagagaatgtaaagcgaagaacgcacaatgtcctggaacgccagaggcggaacgagcttaaacggagtttttttgcactgcgtgatcaaattcccgaactggagaacaacgagaaggctccaaaggtcgttattttgaaaaaagccacggcttatatcttatcagttcaagccgaaactcagaagctaattagtgaaatcgaccttcttcgaaaacaaaacgaacaactcaaacataagcttgaacaattgagaaattcctgcgca

SEQ ID NO: 128678 - DNA, 1317 bp, Artificial Sequence
  derived and/or modified sequence
atgcctctcaacgtttccttcacaaacagaaattatgacctagattacgattccgtgcagccttacttctactgcgatgaagaagagaatttctaccaacaacagcagcaatcagaacttcaaccccccgcaccgagtgaggatatttggaagaaatttgagttgttgcctacccccccgctctccccgtctcggcggtcaggtttgtgttcgccatcctacgttgcagtcacccctttctcgctccggggagacaacgatgggggagggggatctttttccaccgcagaccagcttgaaatggtgaccgaactcctgggcggggatatggtcaatcagtcttttatctgcgatcccgacgacgagacttttattaaaaatattataattcaagactgtatgtggagcggattctcggccgcagcaaagttggtgtctgagaaactagcttcctatcaagctgcgcgcaaggattcaggtagcccgaacccggcgcgcgggcattccgtatgtagcacatcgtcattgtatctgcaagaccttagtgccgctgcgtcggagtgcattgatccctccgttgtctttccttatccgctcaacgattcctcgagcccaaaatcatgtgcaagtcaggattcctcggcattcagcccgtcgtcagacagtctattaagctcgaccgaatccagtccacagggaagcccagaacctctggttctccatgaggaaacacctcccacgacgtcttctgacagcgaggaagagcaagaggatgaggaggagatcgacgtagtttctgttgaaaagcgtcaagctccgggtaagaggtcggagtctggttctccatccgccggtggccactcgaagccgcctcattctccacttgtgttgaaacgttgtcacgtctcgacacaccaacataattacgcagctccccctagcacccgtaaggactatcccgctgcgaagcgtgtgaagctcgactcggtgcgcgtgctccgtcaaataagcaataaccgcaagtgcacatccccccgctcatctgatacagaagaaaacgtcaagagaagaacccataacgtcttggaacgccaacgcaggaacgagcttaaacgttcattcttcgcgctgcgcgaccagatcccggagttggaaaacaatgagaaagcgccaaaagtcgtcattttgaaaaaggccacagcttatatcctgtccgttcaagcagagacccaaaagctcatctcagaaattgatctgctacgaaagcaaaatgagcaacttaagcataaactggaacagttgagaaactcatgcgcg

SEQ ID NO: 128679 - DNA, 1317 bp, Artificial Sequence
  derived and/or modified sequence
atgccccttaatgtcagcttcacaaatagaaattatgaccttgattatgacagcgttcagccttacttttactgtgacgaggaggagaacttttatcagcagcaacagcagtctgagctacagcctccagctcccagcgaagatatttggaaaaagttcgaactactgccaactcctcctttgtctccgtctcggcggtccggtctgtgctctccaagctacgttgcagtgactcctttctcactgcgcggggataacgatggcggcggtgggagcttttcgactgccgatcagctggagatggtgacggaattactgggcggggatatggtgaaccagagcttcatctgcgatcctgacgacgagacatttatcaaaaacattatcattcaagattgtatgtggtccggcttttctgcagccgccaaactcgtctccgaaaagctggcctcctaccaagccgcccgtaaagattccggctcccccaatccagctcgcgggcattccgtctgctctacatcgtcactctatctgcaggacctttccgctgctgcgtcagagtgcattgacccatccgttgttttcccatacccactgaatgattcctctagtcccaaatcttgcgccagtcaggattcatcagctttttccccttctagcgatagccttctctcatcaaccgagagctccccacaagggagtcctgaaccccttgtcttgcatgaggagactccaccaaccacctccagtgactccgaggaggaacaagaggatgaagaagaaatcgatgtggtgagcgttgagaaacgccaggctccagggaagaggtctgaatctggaagcccatctgcaggcgggcattcaaagccaccacactcacctctggtacttaagaggtgccatgtgtccacacaccaacataattacgcggcaccaccctccacaaggaaggactaccctgctgcaaagagggtgaaattggatagtgtgcgcgtgctgaggcaaatctcgaataaccgtaagtgcaccagtccgaggtcaagtgatacagaagagaacgtgaagaggcgaacacataacgtcttggagcgtcaacgacggaatgagctgaagcgtagcttctttgcacttagggatcagatacccgaactcgagaataacgaaaaagctcctaaagttgtgattctgaagaaggctacagcctacatactgtcagtgcaggcggagacacagaaactgatctctgagatcgatctgctgcggaagcagaacgagcagctcaaacacaaacttgaacagttgaggaattcgtgcgct

SEQ ID NO: 128680 - DNA, 1317 bp, Artificial Sequence
  derived and/or modified sequence
atgcccctcaacgtgagctttaccaaccgcaattatgatttggactacgactccgtgcagccatatttttactgtgacgaggaggaaaacttttaccagcagcagcaacagtccgagttgcagccacctgctccttctgaagacatttggaaaaaattcgaactgctccccactccgccactgtcgccttcaagaagatccggtttgtgctctccaagttatgtggccgtgacccctttctctctgaggggggataacgatggcggtggtggctctttttcaactgcagatcaactcgagatggtgacagagctgctgggaggcgacatggtgaaccagagctttatctgcgaccccgatgacgaaacctttatcaaaaatattattatacaggattgcatgtggtcgggcttcagtgcagcagccaaattggttagtgagaaactagcctcttatcaggctgctcggaaagattccggatcacccaatccggcacgaggacacagtgtctgctcaaccagctctctttacctgcaggacttgtccgcagcagcgagcgagtgtatcgacccgtccgtcgtgttcccctaccccctgaatgactctagctctccaaaaagttgcgcttctcaagacagctctgccttttctcccagtagcgatagcctgttatcttcaaccgagtcttccccacaggggtcgccagagccactggttctgcacgaggagactccacccacgacctcatcagactctgaggaggagcaggaagatgaggaggagatcgacgtggtttcagtcgaaaagcggcaggctcccggcaagcggtctgagtcaggcagtccctcagccgggggtcactcaaagcccccgcactctcccctcgtgctcaagcgctgtcacgtgtcgacccatcagcataactacgcggccccaccctctacccgtaaggattacccagcagccaagagagtgaagcttgactctgttagggtgcttcggcagatcagtaacaataggaagtgcacttcccccagaagctccgacacagaggagaatgtcaaacgcaggactcataatgtgttggaaaggcagagacgtaatgaacttaagagatctttttttgcactccgagatcagatccctgagctcgaaaataatgagaaggctcctaaagtggttattctcaaaaaggccacggcttatatcctatccgtgcaggccgaaactcagaagctaatctcagagatagatcttcttagaaagcagaatgagcagctcaagcacaaactggaacagctcagaaattcctgtgct

SEQ ID NO: 128681 - DNA, 1317 bp, Artificial Sequence
  derived and/or modified sequence
atgccactcaacgtttcgttcaccaatcgcaactatgacctggactatgattccgttcagccgtacttctactgcgacgaagaagaaaacttctaccagcagcaacaacagtctgaactgcaacctccagcaccgtcggaggacatctggaagaagttcgagcttctcccaactccgccgctttcaccgtcccgcagatctggactgtgctccccgtcctacgtggcggtgaccccctttagcctgcggggagacaatgacggtggcggaggatcattctccactgctgatcaattggaaatggtcaccgaactgctcggcggggatatggtcaaccagagctttatctgcgacccggacgacgagactttcattaagaatatcatcatccaggactgtatgtggagcggattctcagcggccgcaaaactggtgtcagagaagctcgccagttaccaagccgccaggaaggattctggatcacctaaccctgctcgtggtcactctgtgtgcagcacttcctccctgtaccttcaagatttgtccgcagcggcctctgaatgtattgatccttcagtggtctttccgtaccccttgaacgatagttcatctccgaagtcgtgcgcgtcccaggattcatccgcgttttcgccatcgagcgactccttgctctcgtcaactgaaagctcacctcagggttccccggagcccctggtgcttcacgaagaaactccgccgacgacctccagtgactcggaggaagagcaagaagatgaagaagagatcgacgtggtttccgtagagaagcgccaggcaccaggaaagagatcggagtcgggctccccctcagccggaggccattcgaaaccgccgcactccccgctggtcctgaaacggtgccacgtctcgacccaccagcacaactacgcagccccaccttcgacccgaaaggactaccctgctgctaagcgcgtgaaacttgactccgtccgggtgctgcggcagatctcaaacaataggaaatgcacctcgcctcgcagctcggatacggaagaaaatgtgaagcgtcggacccacaacgtgctggagcgtcagcggcgcaacgagctcaaacggtcctttttcgcgttgagagatcagatccccgagctggaaaacaatgagaaggccccgaaggtggtgatcctgaagaaagctaccgcctacattctctcagtgcaggccgaaactcaaaagctgatcagcgaaatcgatctgctgcggaaacaaaatgagcagctcaaacataaactggagcagctgagaaacagctgtgcc

SEQ ID NO: 128682 - DNA, 1317 bp, Artificial Sequence
  derived and/or modified sequence
atgcctctgaacgtctccttcactaatcggaattacgatctggactacgattccgtgcagccatatttctactgtgatgaagaggaaaatttctaccaacaacagcagcagtctgagctgcagcctcccgcaccgagcgaggatatttggaaaaaatttgaattgctgccgaccccacctcttagcccatccagaaggtcaggcttgtgcagcccgagctacgtggcggtgacccccttttcgctgcgcggtgataacgatggtggaggtggcagcttcagcacggcggaccaactcgagatggttacagaacttctgggcggcgacatggtgaatcagagctttatatgcgatccggatgacgaaacgttcattaagaacattattatccaagattgcatgtggtccgggttcagcgccgccgcgaagctggtgagcgaaaaactggcgtcctatcaggcagcccgaaaggattccggtagccctaacccggcgcgtggacactcagtgtgttccaccagctctctatacctgcaggatctgtctgccgccgcgtctgagtgcattgatccttctgtcgtgtttccctacccgcttaacgactcctcgtcgcccaagagctgtgccagccaggactctagcgccttctcaccgtcgtccgacagccttctctctagcactgaatcaagcccacagggctcccctgagcctctggtgcttcacgaagagacacctcctacaacctcaagcgattcggaagaggagcaagaggacgaggaagagatcgacgtagttagtgtcgaaaagcgccaggcacccggtaagcgctcagaaagcgggagcccttccgctggtggccacagcaagccacctcattctccactggttcttaagcgttgccacgtcagcacccaccagcacaattatgcagcccctcctagcactagaaaggattacccggccgccaaacgcgtcaagctggatagcgttagagttctacgccagatctcaaacaataggaaatgcaccagccctcgcagctctgacacggaggaaaatgtaaagcgccgcacccacaatgtcctagaaagacaacgcaggaacgaactgaagagatcctttttcgcgcttagagaccagatccctgagctggagaataatgagaaagcgccgaaagttgtgattctgaaaaaggcgactgcctatattctgtcagttcaggcagaaacccaaaagctcatttctgagattgatctgctgcgcaaacagaacgagcagctgaaacacaagctggagcaactgcgcaattcatgtgcc

SEQ ID NO: 128683 - DNA, 1317 bp, Artificial Sequence
  derived and/or modified sequence
atgcctctaaatgtctcttttacaaatcggaactatgatttagactacgattccgtgcagccttacttttattgtgacgaagaagaaaatttctatcagcagcagcagcagtcagagctccaaccccctgctccctctgaagacatatggaaaaaatttgaactccttccaacacctccgctaagtccttcaaggaggagtgggctctgttccccatcctatgtggcagtcacacccttttccttgcgcggggataacgacggaggggggggatccttttctacagccgaccagctcgagatggtgactgaactcctcgggggggatatggtgaaccagtctttcatatgcgatcctgatgatgaaactttcatcaaaaatattataatacaggattgcatgtggagtggattctccgcagccgcaaagctcgtgtctgaaaaacttgcaagttaccaagctgcaaggaaagattccggaagtccaaatcctgcccgggggcattctgtgtgttcaacaagtagtctatatctccaagatctctctgcggcagcctccgaatgtatcgatccaagtgtggtctttccatatccccttaatgactcatcttctccaaagagttgtgcctcccaggattcctccgctttctctccctcctcggatagtttgctgagttccacggaatcatcaccccagggatccccagaacccctcgtcctacatgaagaaacaccacctacaactagttctgattccgaagaggaacaggaagatgaagaggaaatagatgtagtctctgtcgaaaaaaggcaggcacccgggaagaggtccgaaagtgggtctccctccgctgggggacattctaaacctcctcactctcctctggtattaaagagatgtcacgtgtcaactcaccagcataattatgctgctcccccctctacgcgaaaagattaccctgctgctaaacgagtgaaactcgattctgtcagggtccttcggcagatttctaataataggaaatgtacaagtccgaggtcctcagatacagaagaaaatgtgaaacggaggactcataatgtgctagaacggcagcgcagaaatgagctgaaacgcagtttttttgctcttcgcgatcagattcctgaactggaaaacaacgaaaaggctccaaaagtggtgatactcaaaaaagctacagcatatatcctttctgtccaggctgagactcaaaaactgatttccgaaatcgatctgctaagaaaacagaatgaacagttgaaacataaactggagcagctcaggaacagttgtgca

SEQ ID NO: 128684 - DNA, 1317 bp, Artificial Sequence
  derived and/or modified sequence
atgccattaaacgtttcatttactaatagaaattacgatttagattatgattctgttcaaccttatttttattgtgacgaagaagaaaatttttatcaacaacaacagcaatcggaattacaacctcctgcaccatcagaagatatttggaaaaaatttgaacttcttccaacaccaccattatcaccttcaagaagatcagggctttgtagtccatcatatgttgcagttactccattttcacttagaggagataatgatggaggaggaggaagtttcagtactgcagatcaacttgaaatggttacagaacttttaggtggagatatggttaatcaatcttttatttgtgatccagatgatgaaacatttataaaaaatattattattcaggattgtatgtggtcaggttttagtgcagctgcaaaattagtttctgaaaaattagcttcataccaagctgcacgaaaagattctggtagtccaaatccagctaggggacattcagtttgttctacctcaagtttatatcttcaagatttatcagctgcagcaagtgaatgcattgacccatctgttgtttttccatatccacttaacgactcatcttcacctaaatcatgtgcatcacaagatagttcagcattcagtccatcatctgattctcttctttcttctactgaatcttcaccacaaggttccccagaaccattagttttacatgaagaaactcctccaactacttcatcagattcagaagaagaacaagaagatgaagaagaaattgatgttgtatctgtagaaaaaagacaagctccaggtaaaagatccgaatctggatcaccatcagcaggagggcattctaaaccaccacattcaccacttgttttaaagagatgtcatgtttcaactcatcaacataattatgcagcaccacctagtactagaaaagattatccagcagcaaagagagttaaacttgattctgtacgtgttttaagacaaatttcaaataatagaaaatgtacttctccaagaagttcagatacagaagaaaatgtaaaaagacgaacacataatgtcttagaacgtcaaagacgaaatgagttaaaaagaagtttttttgcattaagagatcaaattccagaattagaaaataatgaaaaagccccaaaagttgttatcttaaaaaaggctacagcttatattttatcagttcaagcagaaactcaaaaacttatatctgaaattgatttacttagaaaacaaaatgaacaactcaaacataaacttgaacaattaagaaattcatgtgct

SEQ ID NO: 128685 - DNA, 1317 bp, Artificial Sequence
  derived and/or modified sequence
atgccactgaacgtgagcttcaccaatcgtaactatgacctggactacgactccgtgcagccatacttttactgtgatgaagaggagaatttctaccaacaacagcagcaatctgaactgcagccgcctgctccctccgaagatatttggaagaagtttgagctgctgcccactccgcctctgtcccctagccgccggtccgggctctgttctccaagctacgtggcagtgaccccattttcgctcagaggagataatgatggtgggggtggctctttttcaaccgcggatcagctcgaaatggtgactgagctgctcgggggcgacatggttaaccagagcttcatttgtgatccagacgatgaaaccttcattaagaacatcataatccaagactgcatgtggtccggttttagcgctgcagcaaagctcgtgtcggaaaaacttgcctcctatcaggcagcgcgaaaagattccggttcgcccaatcccgcacgcggacattcagtgtgctcaaccagcagcctgtaccttcaagatctgtcggccgcggcgtcggaatgtatagaccctagcgtggtgtttccatacccactgaacgatagctcatcccctaagtcctgcgcctcgcaggattcttccgcattcagccctagctccgatagcttgctgtcctcaaccgagtcgtcaccacaaggttcccctgagcctttggtgcttcatgaggaaaccccacctaccacctcatcggatagcgaagaagaacaggaggacgaagaagaaatcgatgttgtgtcagtggaaaagagacaagcacccggaaaaagatctgaatccggttcccctagcgcaggaggacattcaaagccacctcattcccctctcgtcttgaaaagatgccacgtgtcaacccatcaacataactacgcagcaccaccttcaactaggaaggactaccctgcggcaaagcgcgtcaaacttgactcagtgcgggttcttcgccaaatcagtaacaaccgaaagtgtacgtcccctagatccagcgataccgaagaaaacgtgaagagacgaactcataacgtgctggaacgccagcgtagaaacgagctcaagaggtcattctttgctctgagagatcagatcccagaactggaaaacaatgaaaaggctcctaaggtggtcatcctgaaaaaggctactgcatacattctctcagtgcaggctgaaacgcagaagctcatttctgagatcgaccttcttcgcaagcaaaacgagcaacttaagcacaagctggaacaattgagaaactcgtgtgca

SEQ ID NO: 128686 - DNA, 1317 bp, Artificial Sequence
  derived and/or modified sequence
atgcctctgaacgtgagctttacgaaccgcaattacgacctggactacgattccgtgcagccttacttctactgcgacgaagaagagaatttttaccagcagcagcaacagtccgagctgcaaccccccgcccctagtgaggacatttggaagaaattcgagttgctgcccacgccacctctgtctcctagcagacggtcaggactgtgttccccgtcctacgtcgccgtcacaccctttagtctcagaggtgataacgacggtggtggcggcagctttagtactgctgatcagttggagatggtgacggagcttctgggcggtgacatggttaatcagagcttcatttgtgatccagatgacgagacattcatcaagaatattatcatccaggactgcatgtggtccgggttttctgcagccgccaagctggtgagcgagaaactcgccagttaccaggccgcccggaaggactctggctccccaaacccggcaaggggacactcagtgtgttccacaagctccctgtacctgcaggacctctctgccgctgcgtccgagtgcattgacccttcagttgttttcccataccccctgaacgattcctctagtccgaagagctgcgcatcccaggactcctctgctttctctcccagtagtgactctctgctgagcagtaccgaaagtagccctcaggggtcccctgagcctctggttttgcacgaggagactccccccaccacttccagcgattccgaggaggagcaggaagatgaggaggaaatcgacgtggtgtcagttgagaagaggcaggcacccggcaagcgcagcgaatcagggagccccagtgccggggggcattctaagcctccgcactccccactcgtgctcaaaaggtgtcatgtgtctactcatcagcacaactacgctgccccaccatctactcgcaaagattaccccgcggctaagcgggttaagttggacagtgttcgggtcttgcgacagatctcaaataatcgaaaatgcacttccccccggagctcagataccgaggaaaacgtgaagcggcggacacataatgttcttgagaggcagcgccgaaacgaacttaagaggagcttcttcgcccttcgggatcagatacccgagcttgagaataacgaaaaggcccccaaagtcgtaatactgaaaaaggcaaccgcctatattctgagcgtgcaggcggaaactcagaagctgatctccgaaatcgatttgctccggaaacagaatgagcagcttaagcacaagcttgaacagctgagaaacagttgcgcc

SEQ ID NO: 128687 - DNA, 1317 bp, Artificial Sequence
  derived and/or modified sequence
atgccattaaacgtctctttcaccaatagaaactatgatcttgactacgactccgtacaaccttacttttactgcgatgaagaggaaaacttctatcaacagcagcagcaaagcgaactccagcccccagctccttcggaggacatttggaagaaattcgaactcttgccaactcccccactgtctccctctaggagatccgggctatgttccccttcttacgtggctgtaacaccgtttagcctgcggggtgataacgacggaggaggcgggtcattctcgactgctgaccagctggagatggtcacagagctgctggggggagacatggttaaccagagcttcatctgtgacccggatgatgaaacatttattaagaacatcattattcaagattgcatgtggtccgggttttctgccgccgccaagctggtgtccgagaaacttgcaagctaccaggccgcaagaaaggattctggctcccccaaccccgcccgcggacactccgtgtgttctacatcgtctctgtacctccaagatctttctgccgctgctagcgaatgcatcgacccctcggtggttttcccataccctcttaatgatagcagtagccctaagagctgcgcctcacaagacagttctgctttctctccttctagtgattctttgctcagctctaccgagtcatctcctcagggatcccccgagcctctcgtgcttcacgaagagacgccacctacgaccagcagcgactctgaagaggagcaggaagatgaagaggagattgatgtggtaagcgtggaaaaacggcaagcgccagggaaaaggtctgagtcgggctccccgagcgctggtggccactcaaagcccccacacagtccgcttgtgttgaaacgctgtcacgtttccacgcaccagcataactacgccgcccctccctccactagaaaagattacccggccgctaagagagtgaaactggactcagtacgtgtgctgcgtcaaatatctaataacaggaaatgcacgtcgcctagatcttctgatacagaggaaaacgttaagagaaggacgcacaacgtcctggaaagacagcgccgcaatgaactcaagcgatccttcttcgcgctcagagaccagattccggagctggaaaacaacgagaaggcacccaaggtagtgatccttaaaaaggccacagcctatattctgtcagtgcaggcagaaacacagaaattaattagcgagatcgatttgctgaggaagcagaacgagcagctgaagcacaagcttgagcagctccgcaattcttgtgcc

SEQ ID NO: 128688 - DNA, 1317 bp, Artificial Sequence
  derived and/or modified sequence
atgcccctgaacgtgagctttacgaacaggaactatgacctggactatgattccgttcagccatacttctactgtgatgaggaagaaaatttctatcaacagcaacagcagtccgaactccagcctccagctccttctgaggacatttggaagaagtttgaactgttgcccaccccacctctgagcccctcacggcgcagtggtttgtgctcaccgtcctacgtcgctgtgacccccttcagcctccgcggagataacgatggcggaggaggatccttctccaccgccgaccagctggaaatggtcaccgaactcctcgggggagacatggttaaccagtccttcatatgcgaccccgatgatgaaacctttattaagaatattattattcaggactgtatgtggagcgggttctctgccgctgcaaagcttgtctccgagaagctggccagctatcaggcggctcggaaagatagcggaagccctaatcccgcccggggccattctgtttgttctacttccagtctgtatcttcaggacctgtcagcggcagcttccgagtgtatcgacccttcagtagtgttcccttaccctctcaatgactcttcatcaccaaagtcatgtgcaagccaggatagctccgcgttctctccttcctcagactctctcttgtcttccactgaaagcagtccgcaaggaagccccgagcctttggtacttcacgaggagaccccaccgactacatcatcagacagcgaggaggaacaggaggacgaggaggagattgatgtggtctcagtcgaaaaacggcaggctccgggtaagagatccgaatccggctctccttccgctggggggcactccaagccaccgcactcccctcttgtgctgaagcgatgccacgtctcaacccaccaacacaactatgctgcaccaccgagcacacgaaaagactacccggcggccaagagagtcaaacttgatagtgtgcgcgtgctgaggcagatttccaacaatagaaagtgcacttctccaagaagctctgacaccgaagagaacgtgaaaagaagaacacacaacgttctggaaagacagcgaagaaacgagttgaagcgctcattttttgctcttcgagatcagatccccgaacttgaaaacaatgagaaggcccccaaggtagtcatcctgaaaaaagcgacagcttacatcctgtccgttcaggccgaaacccagaaactgatatctgaaattgacctgctgagaaagcagaacgagcagctgaagcataagcttgagcagttgaggaactcctgcgca

SEQ ID NO: 128689 - DNA, 1317 bp, Artificial Sequence
  derived and/or modified sequence
atgccacttaatgtgtccttcaccaaccgcaactacgaccttgactacgattcggtgcagccctacttctattgtgacgaagaagagaatttctaccagcaacaacaacaaagcgaacttcagcccccggccccatccgaagatatttggaagaagtttgagcttcttcctactcccccactctcgcctagccggaggtccggattgtgttcgccctcgtacgttgcagttacccctttttccctgagaggagacaacgacggtggcggcggttcgttctccaccgcagatcagcttgaaatggtgaccgaactgctcggtggtgatatggtgaatcaatcgttcatttgcgatccagatgacgaaacctttatcaaaaacataatcattcaggactgtatgtggtccggatttagcgcggcggctaaattggtgagcgaaaagctggcctcgtaccaagcagcaagaaaagactcaggaagcccaaacccagctcgtgggcatagcgtgtgtagcactagctccctttaccttcaggacctgtcggccgctgcaagcgaatgtatcgatccctcggtggtgttcccatatccattgaacgattcttctagccctaaatcgtgtgcatcgcaggactcctccgcgttttcaccgtcatctgacagcctgttgtcctcaactgagtcgagcccccagggatcgcctgaaccccttgtgctccatgaagaaactccacctactacctcctcggatagcgaggaggaacaggaggatgaagaagaaattgacgtggtgtcggtagaaaaacggcaggcaccaggtaaaaggtcagaatcgggttcgccaagcgcaggcggtcattcaaagcctcctcactctcctctcgtgttgaagaggtgccatgtctcgacccatcaacataactatgcagcaccaccttccacgcgcaaagattacccagccgcaaagcgcgtcaaactggattcagtgagagtcctgcgccaaatttcaaacaatcgaaagtgcacttcaccccgttccagcgatactgaggaaaacgtgaagcgtcgaacccacaatgtgctcgaacggcaacggcggaacgagctgaagagatcatttttcgctcttagggatcagatcccggaactcgagaataacgaaaaggcgccgaaagtggtcatcctgaagaaggccacggcgtacattctgtcagtccaagcggagactcaaaagctcatctctgaaatcgatcttctccgcaagcaaaatgaacagcttaaacataaacttgaacaattgaggaacagctgcgca

SEQ ID NO: 128690 - DNA, 1317 bp, Artificial Sequence
  derived and/or modified sequence
atgcctttgaacgtgagcttcacaaacaggaattacgatcttgattacgatagtgtgcaaccatatttctattgcgatgaggaggagaatttctaccaacagcaacagcaatccgaattacagccacccgctccaagcgaggatatttggaaaaaatttgagctcctcccaaccccgcccctctccccgtctagacgctccggcctttgctctcccagctatgtcgcggtaactccgttttctctgaggggagataatgatggaggtgggggcagctttagcacagccgaccaactggagatggttaccgagctgcttgggggcgacatggtgaaccagtctttcatatgcgatcctgatgatgaaacatttattaaaaacattattatccaggattgcatgtggtctggattttccgcagcagctaagctggtgagcgaaaagctggcctcttaccaggctgcgcgaaaagacagcggttcacccaacccggcccgggggcacagcgtctgcagcactagcagcctatacctgcaggacctttctgcagccgcctccgagtgtatcgacccatctgtggttttcccttaccccctgaatgattcaagctccccaaagtcatgcgcaagccaggacagctcagccttttcaccttcaagcgattcccttttatccagtactgaatcttccccccaggggagccctgaacctctggttctgcatgaggagacccctccaaccacttcttccgattcagaggaggaacaggaagatgaggaggagattgatgtcgttagcgttgagaagcgacaagcgccgggcaaaaggagtgaaagcggcagcccaagcgctggaggacattctaaacctccacactctcctttggtattgaaacgttgtcacgtctccactcatcaacacaattacgctgccccgcctagcactcgaaaggactatccagccgcaaagcgggtgaaactcgatagcgtgcgcgtgctcaggcaaataagtaataacaggaaatgcacctcaccaagatcgagcgatactgaggaaaacgtcaaacgacgcacccacaacgtgctggaacgtcagcgtagaaacgagcttaagagaagcttcttcgctctgagagatcagataccagagctggaaaacaatgaaaaagcaccaaaggtggtgatcctgaagaaagctactgcgtacatcctttcagtgcaggctgagactcagaaattgatcagtgagattgatctcctgcgcaaacagaatgagcagttgaagcacaaactggaacaactgaggaactcttgtgcc

SEQ ID NO: 128691 - DNA, 1317 bp, Artificial Sequence
  derived and/or modified sequence
atgccactgaacgtgagcttcactaacagaaactacgatttggattacgactcggtgcaaccttacttttactgtgacgaggaggagaacttctaccaacaacagcagcaatcggagctgcagccacctgcgccgagcgaggatatttggaagaagtttgaacttctcccaactccgcccctctccccatcgagacgcagcgggctctgtagcccgtcatacgtcgccgtgactcccttttcgcttcggggcgataatgatggcgggggcggctccttctcgaccgcagatcaactcgaaatggtgactgagttgctgggaggcgatatggtcaaccagtcatttatctgtgaccctgacgatgagacttttatcaagaacatcattatacaggattgtatgtggtcaggattctccgctgcggccaagctcgtctccgagaaactggcttcttaccaggcagcccggaaagatagcggatctcctaaccctgcacgtggtcatagcgtgtgttcgactagctccctttacctgcaagacctctcggcagccgcaagcgaatgtattgatccttccgtggtctttccttaccctcttaatgattcatcgtcgccaaaatcatgtgcgtcacaggattcaagcgccttttcgcctagcagcgattcccttctgagctcaactgaatcgtcgcctcagggttcgcctgagccactcgttctgcacgaagaaaccccgcctaccactagctccgactcagaggaagaacaggaggatgaagaagagatcgacgtggtgtcggtcgaaaagcgccaagcgccaggaaagcgctcggagtcaggctcgccttcagccggtggacattcgaagcctccccattcgcctctcgtccttaagcgttgccacgtgagcacccatcagcataactacgcagcgcctccttctacccgcaaagattaccctgccgcgaagagggtcaagctggattccgtgagggtgcttagacaaatcagcaacaaccgtaagtgtacttccccacggtccagcgacaccgaggaaaatgtgaaacgacggactcataatgtgctggaacgacaacgccgcaacgagcttaaacgttctttcttcgcacttcgagatcaaataccggagcttgagaataacgagaaggcccccaaggtcgtgattttgaaaaaggcaaccgcctacattctgtccgtgcaggcagaaacccaaaaacttatttccgaaatcgaccttctgagaaagcagaacgagcagcttaagcataaacttgaacaacttagaaattcctgtgca

SEQ ID NO: 128692 - DNA, 1317 bp, Artificial Sequence
  derived and/or modified sequence
atgcccctgaatgtgagcttcaccaataggaactacgacctcgattatgatagcgtacagccctatttttattgtgatgaggaggagaatttctaccagcagcagcaacagagtgagctccagccaccggcaccttctgaggatatttggaagaagtttgagttactgccaacgccaccacttagcccaagccggcgatccgggctgtgctccccctcttatgtggcggtcaccccttttagcctgaggggagataatgacggcggtggcgggtcatttagcaccgcagaccaactggaaatggtgaccgagctgcttggaggtgatatggttaatcagagcttcatctgcgatcccgatgacgagacatttatcaaaaacattattatccaagattgcatgtggtccggtttctctgccgcagccaagctggtgtctgagaagcttgcttcctaccaggcggcccgaaaggatagcggatcccccaaccccgcaagaggacactcagtgtgcagcacctcctccctatatctccaggacttgagcgccgctgcaagcgaatgcattgacccgagtgtggtctttccataccctttgaacgattcgagttcgccaaaatcctgcgccagtcaggacagttctgcttttagtccatctagcgatagcctgcttagcagcactgagtctagccctcagggatcaccagagccactagtgctacatgaagagactcctcctaccaccagtagcgatagcgaggaggagcaggaagacgaagaggaaatcgatgtggtgtccgtggaaaagaggcaggcccccggaaaaaggtctgaaagtgggtctccgtcagccgggggacatagcaaacctccgcattctcctttagtgcttaagaggtgtcacgtgagcactcaccaacataactacgctgctcctccctcaacacgcaaggactacccggccgctaaacgtgtgaaactagattccgtaagggtacttaggcagattagtaataacaggaaatgtacgtcgccaaggtctagcgataccgaggagaacgtcaaacgtcggacccacaacgtcctcgaacgacagagacgcaacgaactgaaacggagtttctttgccctccgagatcagatacccgagctggaaaacaacgagaaggcccccaaggtcgttatcttaaagaaagctaccgcttacatcctctccgtccaggcggagacacagaaactgatttcggagatcgacctgctgcgcaagcaaaacgagcagctcaaacataagttagaacagctgaggaactcttgcgcc

SEQ ID NO: 128693 - DNA, 1317 bp, Artificial Sequence
  derived and/or modified sequence
atgccgcttaatgtttctttcaccaacagaaactacgatttggactacgactccgtccagccatacttttactgcgatgaggaggaaaacttctaccagcaacagcagcaatctgagctgcaaccgcccgcgccgtccgaggatatctggaagaagtttgaactcctgcctactccgcccctgtccccgagcaggcgttccggactctgctcgccctcgtacgtggctgtcacccccttcagcttgcgcggcgacaatgatggcggcggtggttctttctccactgcggaccaactggaaatggtgactgagctgctgggcggagatatggtgaaccagagcttcatttgcgatcctgatgatgaaaccttcatcaagaacataatcatccaggattgcatgtggtcgggcttttcggcagctgctaaactggtcagcgaaaaactcgcctcataccaagccgcacgcaaggacagcggaagccctaatccagcgcgcggacattcagtctgcagcacctcctcgctttacctgcaggacctctcggcggccgcgtcagagtgtatcgacccgtcggtggtgttcccataccctctgaacgactcctcctcaccaaagtcttgcgctagccaggattccagtgccttctcaccgtcctcagacagcctgctgtcctccacggagtcgagcccacaagggtccccggaaccgttggtgctgcacgaagagacgccacccactacttcatcagactcggaggaggaacaagaggacgaggaagaaatcgacgtggtatccgtcgagaaacgacaagcgccagggaagagatccgagtcgggatcgccatcagcgggaggccacagcaagccaccacactccccgcttgtgctgaagcgctgccatgtgtccacgcatcaacataactatgccgcaccgccttcaactcgcaaggactatccggcagccaagcgggtcaagctggactccgtgagggtgctgagacaaatctctaacaatcgcaagtgtacctccccacgctcctccgataccgaagaaaatgtaaagcggcgcactcacaacgtgcttgaacggcaacggagaaatgagctgaagcgatcattctttgccctgcgggatcaaatcccggaactggaaaacaacgaaaaagccccgaaagttgtgatcctgaagaaagctactgcatacatcctgagcgtgcaggctgagactcagaaactcatctccgaaattgacttgctgcggaaacaaaatgaacagctcaagcacaaactcgaacagctgcgcaactcgtgtgcg

SEQ ID NO: 128694 - DNA, 1317 bp, Artificial Sequence
  derived and/or modified sequence
atgccgctgaatgtgtccttcaccaacagaaattacgatctcgactacgactcggtgcagccgtacttctactgcgatgaggaagagaatttctaccagcagcaacagcagtctgagcttcagccgcccgcgcctagcgaggacatctggaagaagtttgaactcctgcccactccgccactctcaccctcgcggaggtcgggcctttgctcaccgtcatacgtcgccgttacgcctttctcgctgcggggagacaacgatggcggaggtgggtcattctccacggccgaccagttggagatggttaccgaattgctgggaggcgatatggtgaaccagtcgttcatctgcgatccggatgacgagactttcatcaagaatatcatcatccaggactgcatgtggagcggattctccgcggctgcaaagttggtgtcggagaagctggcttcctaccaagcggcgcgtaaggacagcggaagcccgaacccggcccgcggtcactcagtctgctccacttcgtctctgtatctgcaagacctgtccgccgcggcctcagaatgcattgatccgagcgtggttttcccatacccacttaacgactcctcctcacctaaatcgtgtgcatcccaagactcgtccgccttttcaccatcgtcggactcgcttctctcctcaacggaatcgtcgccgcaagggtcccccgagccgcttgtgcttcacgaggaaaccccacctaccacctcctcggactccgaagaggaacaggaagatgaggaggaaatcgacgtcgtctcggtcgaaaagcgccaggcacccgggaaaagatcagaatccggctcgccgtcggctggaggacacagcaagccccctcattcaccacttgtgctcaagcggtgtcacgtgtccactcatcaacacaactatgccgccccaccgtccacccgcaaggattacccagccgcaaaaagagtgaagctcgattcggtgcgcgtgttgcgccaaatctccaataaccgcaaatgcacttctccacggtcatccgacactgaagaaaatgtgaagagaagaacccataatgtgctcgaacgacaacgcagaaacgagctgaagcggtcgtttttcgctctccgggaccaaatccctgaattggagaacaacgaaaaagcccctaaggtggtcattctcaaaaaggcgaccgcttacatactgagcgtgcaggcagagactcagaaactgatttcggaaatcgatctcttgcgcaaacaaaacgagcagcttaagcacaagctcgagcagcttaggaactcgtgtgcg

SEQ ID NO: 128695 - DNA, 1317 bp, Artificial Sequence
  derived and/or modified sequence
atgcccctcaacgtttccttcacaaaccggaactacgaccttgactacgattctgttcagccgtacttttattgtgacgaggaggagaatttctaccagcaacagcaacagtccgagctgcagccccctgccccttcggaagacatttggaagaaatttgaactgcttcctacgccccctctctctccctccaggcggagtgggttatgctcacccagttacgttgcagtgactccctttagtctgcgcggcgacaacgacggaggtgggggctctttctctacagccgaccagcttgaaatggtcacagagctgcttggcggggacatggtaaatcagtccttcatctgtgatccagatgatgaaacatttatcaagaatatcattattcaggattgcatgtggtcagggttctctgcagccgccaagttggtctccgaaaagctcgctagctaccaagctgcccgcaaggattcgggatcccccaatccagcaagaggacactctgtgtgtagcacaagctctttatatctacaagatctgtcggcggcagcatccgaatgcattgatccgagcgtcgtgtttccttacccgctgaacgactcaagtagtccgaagtcttgcgcttcccaggattcctccgcattcagtcctagtagtgacagtcttctatcttctaccgaaagtagtccgcaaggatctccagagccactcgttctgcacgaagagaccccccctacaacttccagcgacagcgaggaggagcaggaggatgaagaggagatcgacgtggtctccgttgagaagcggcaagccccgggcaagcgcagcgagagcggaagcccctcagcgggaggacattcaaagcctcctcacagtcccctggtgctgaagcggtgccatgtgagcacccaccagcataactatgcagcccctccaagcactcggaaggactatcccgcggcgaagagagtcaaactggacagtgttagggtgcttcgacaaatttcaaacaatcggaaatgtactagcccgcggtcgagcgacaccgaggaaaatgtgaagcgaagaacacacaacgtgcttgaacgacagagacgcaacgagctcaagagatctttttttgctcttcgggaccaaatacccgagctggaaaacaacgaaaaggcccccaaagtcgtgatattaaaaaaagccacggcctacatattaagtgtgcaagctgaaacccagaaactgatcagcgaaatcgatctgttacgtaaacagaacgagcagctcaaacataagctggagcagctcaggaactcatgcgcg

SEQ ID NO: 128696 - DNA, 1317 bp, Artificial Sequence
  derived and/or modified sequence
atgccccttaacgtgtcttttactaatagaaactacgacttggactacgatagcgtccagccttacttctattgtgatgaagaagaaaacttttaccaacaacagcagcaatccgaacttcaacccccagcaccaagcgaagatatctggaagaagttcgagcttcttccaacccctcctctctcgccctcgcgtcgtagcggcctttgttcgcctagctacgtggcagtcactcctttctcgctgcggggagataatgacggtggaggagggagcttcagcaccgccgatcaacttgagatggtgaccgagctcttgggtggagatatggtgaaccaatcgtttatctgtgaccctgatgatgaaactttcataaagaacatcataatacaggattgtatgtggagcggtttttccgcagcagccaagctcgtctcagagaagttggcatcgtaccaggcggcccggaaagattcgggctcgccgaatccagcgcgcggacactcggtctgctccacttcgagcctgtatctccaagatctctcagccgcagcctcagagtgcatcgatccttcggttgtgtttccttaccctctcaacgacagctcatccccaaagtcctgtgcatcccaagattcctcggccttctccccgtcgagcgactcgctcctttcgtccacggaatcctctcctcaagggtcgcctgagcccttggtcctccacgaagaaaccccaccgacgaccagctccgatagcgaagaagaacaagaggatgaagaggaaattgatgtcgtgagcgtcgagaaaagacaagcgccgggaaaaagaagcgaatccgggtcaccttcagcaggcggacattcgaagccaccccattccccactggtgctgaagagatgccacgtgtcgacccatcagcacaattacgcggcacctccatccaccaggaaagactacccagcagcaaagcgcgtcaagctggactccgtgcgagtcttgcgccagatcagcaataaccggaagtgtacgtccccgcggtcgtcagacactgaagagaacgttaaaagacggacccataatgtgctggaacgccagagacgaaacgagctgaagagatccttctttgcactccgtgaccagatcccagagctggaaaacaacgaaaaagcacccaaggtggtgatactcaagaaagctactgcttacatcctttccgtccaggcagaaacccaaaaactcatttccgaaatcgacttgcttcgaaaacagaatgagcagctgaagcataagctggagcaacttagaaattcatgcgca

SEQ ID NO: 128697 - DNA, 1317 bp, Artificial Sequence
  derived and/or modified sequence
atgccccttaatgtgtcgtttacaaaccgcaactatgatttggactacgattctgtgcaaccatacttctactgcgatgaggaagagaacttctaccagcagcagcagcagtccgagctccagccacccgccccatcggaggatatttggaagaagtttgaattactacccacaccgccgctttcaccttctagacgctccggtctctgtagcccaagttacgtcgccgtgaccccgtttagcttgaggggtgataacgacgggggaggaggtagcttttcaaccgcagatcagctggagatggtgactgaactgcttggtggcgacatggtcaatcagtcattcatttgcgatccggacgatgaaaccttcatcaaaaacataatcattcaggattgtatgtggtctggcttcagcgccgctgctaagctggtgtccgagaaactcgccagttaccaagcagcgaggaaagactccggctcgccaaacccggcgagggggcactccgtgtgtagcacaagtagtctgtatctgcaggacctgtctgcagctgcctcggaatgtatcgacccgtctgtggtcttcccttaccccttgaacgattcgagtagcccaaagagctgcgcaagccaggactcttcagctttctctccgtcgtctgactcactgctgtcctcaacggagtccagtcctcagggctctcccgaacccctagtgctgcacgaggagacacctccgaccacttctagtgacagtgaggaagagcaagaagatgaggaagagatagacgttgtgagcgtcgagaaaagacaggcacccggcaagcgctcagagtcagggagtcccagtgctggaggccactccaaacccccgcactccccgcttgtcctcaagcgttgccacgtctcaacccatcagcataattacgccgctcccccttccacccggaaggactaccccgccgctaaaagagtgaagttggacagtgtcagggtccttcgacagatctcaaataatcggaagtgtacctcccctaggagcagcgataccgaggaaaatgtgaaaagacggacccacaatgttctagaacgtcagcgccggaatgagttgaagcgcagcttcttcgctctgagggaccagattcctgagctagaaaataatgaaaaggcgccaaaggtcgtcatcctgaaaaaagccactgcctatatactatctgtgcaggcagaaactcagaaactgatcagtgaaattgatcttttgcgcaagcagaatgaacagcttaagcataagctggagcagctgaggaatagttgcgct

SEQ ID NO: 128698 - DNA, 1317 bp, Artificial Sequence
  derived and/or modified sequence
atgccactgaacgtcagctttaccaacaggaactatgacttagattacgattctgttcagccctatttctactgcgatgaggaagaaaatttctatcagcaacagcaacagtcggagttacagccccccgctccgtctgaggacatttggaaaaaattcgagctgctgcctacacccccattaagcccatctcgtcgcagtggtttatgttcccctagctatgttgcggttacaccttttagtctaaggggggacaatgacggcggcggaggtagttttagtaccgctgaccagctagaaatggtgactgagctgctgggaggggatatggtgaatcagtcattcatatgtgaccccgacgatgaaacgtttattaaaaacatcattatccaggactgtatgtggtcaggtttttccgccgcagccaaattagtgagcgaaaagctggccagctaccaggcagctaggaaagattccgggtcgccaaaccctgcccgggggcacagcgtttgcagcactagctccctgtacttgcaagatctctctgcagctgcaagcgagtgtatagatccctcagttgtcttcccttatcccctgaacgactcatcttccccaaagtcctgtgccagtcaggactcctccgcattttctccttcgtcggattcacttttgagcagcacagagagctctccgcaagggagccccgaaccactggtcttgcacgaagagacccccccaaccaccagcagcgactcagaagaggaacaagaggacgaagaggagattgatgttgtatccgtggagaaacgacaggctccaggcaagagatcagagtcgggctcaccctctgccggaggccactccaagccgcctcatagcccccttgtgcttaagcgttgccacgtctcaactcaccagcacaactatgccgcccccccatcaacccgcaaggattatcctgccgctaaaagggtgaaactggatagcgtgcgcgtgctaagacagattagcaataacagaaagtgcacttctcctagatccagcgatacggaagaaaatgtgaagcgccgtacccacaacgttctggagcggcagcgaagaaacgagctgaaaagatcctttttcgcgctgcgggatcagataccagaactagagaataatgagaaggctcctaaagtggtgattctgaagaaggctaccgcatatatattgtcagttcaagccgagactcagaagcttatctccgagattgacttgctccgaaaacagaatgaacagctgaaacacaaactggagcagcttagaaatagttgtgct

SEQ ID NO: 128699 - DNA, 1317 bp, Artificial Sequence
  derived and/or modified sequence
atgcctcttaatgtcagcttcaccaacaggaattacgatctcgattacgactcggtgcagccatacttttactgcgatgaagaagaaaacttctaccagcaacagcaacagtcggaattgcaacctcctgcgccttccgaggacatctggaagaaattcgaacttcttcctactcctcccctctcgccctcgagacgctcgggtttgtgtagcccatcctacgtggctgttaccccattctcacttcggggagataacgatggagggggaggcagcttttccactgctgatcaattggagatggtcactgagttgttgggtggagatatggtgaaccagtcattcatttgcgatccggatgacgaaaccttcattaagaatatcattatccaggactgcatgtggtcgggtttttcggcagcagccaagctcgtgtcggagaagttggcatcctaccaggcagcacgtaaagattccggttccccaaatccagcgcgtggccactcggtgtgttcgacgtcgtcgctgtacctgcaagacttgtccgcggcagcgtcagagtgtatcgacccatccgtcgtttttccataccccttgaacgactcatcatcacccaagtcctgtgccagccaggatagctcagcgttcagcccctcctcggattcgcttctgtcatccaccgagtcatcaccacagggatcaccagaacctctggtcctgcatgaagaaactccaccgactacttcatcagactcagaggaagaacaagaggatgaggaagaaattgatgtcgtgtccgtcgaaaagcgacaagcacctggaaaacgatcagaatccggatcgccttctgcaggcggccactcgaagcccccacactcgccgctggtgcttaaacggtgccatgtgagcacccatcaacataactatgcggcccctccttcgacccgcaaggactatcccgctgcaaagcgcgtgaagctcgactccgtgcgtgtgctgcggcaaattagcaataacagaaagtgtacctcacctagatcgtcagatacggaggagaacgtcaagcgccgcactcataacgtgttggaacgccagcgtaggaacgagctcaagagatccttttttgcactgcgggatcaaattccggagctggaaaacaatgaaaaagcccctaaggtggtgatactgaagaaagcaacggcatacatcctgtccgtgcaggcagaaacccaaaaacttatcagcgaaatagacctgctgcgtaagcaaaatgagcagctgaaacacaaacttgagcagctgcggaactcgtgtgct

SEQ ID NO: 128700 - DNA, 1317 bp, Artificial Sequence
  derived and/or modified sequence
atgccgcttaatgtgagctttaccaaccggaactacgatttggattacgactctgtacagccttacttttattgcgacgaggaggagaatttctatcagcagcagcagcagtctgagctgcagcctcccgcacctagcgaggacatctggaagaagttcgaactgctgccgaccccaccgctctcaccctcccggagatctggactgtgttccccgtcttacgtagcagtaactcccttcagccttagaggggacaatgacggcggcggtggaagctttagcaccgctgaccagctggaaatggtaacggaattactgggcggggatatggtgaaccagtctttcatctgcgaccctgatgacgaaacctttatcaagaatattataatacaggactgtatgtggagcgggttctccgcggccgccaagcttgtatccgaaaaactcgcctcgtaccaggctgctcggaaagacagtggtagccctaatccagcacgaggccatagtgtgtgttccaccagcagtctctacctacaggacctgtccgcggcagcctctgagtgcattgacccttccgtagtctttccttacccccttaatgacagtagctcgccaaagagttgcgcaagtcaagatagttctgccttctcccccagtagcgactctttgttatccagcaccgaaagttcccctcagggctcccctgagccgcttgtgctgcatgaagagactccgcccaccacctccagcgatagtgaggaagaacaggaggacgaggaggaaattgacgttgtatcggtcgaaaaacgccaggctcctggtaagcgatctgagagcggctctcccagtgctgggggccactctaaacccccacatagccctctggttttaaaaaggtgccacgtgtcgacacatcagcacaactacgccgcacccccaagcacccgtaaagactatcccgccgccaaacgagtgaagcttgattcagtccgcgtgcttcggcaaatctccaataaccgcaagtgtacctctccacggagctcagataccgaggagaatgttaaacgaaggactcacaatgtgctggaacgccagaggcgtaatgagctcaagcgcagtttcttcgccctaagagatcagataccagagctcgaaaacaatgagaaggccccaaaagtagtcatcttgaaaaaagctacagcctatattctgtccgtccaggccgaaacccagaagctgatttcagaaatagacctactgagaaagcaaaatgagcagctgaaacataaactggaacagctgcgcaattcctgcgcg

SEQ ID NO: 128701 - DNA, 1317 bp, Artificial Sequence
  derived and/or modified sequence
atgcccctgaatgtgtcctttacgaatcgcaattacgaccttgactacgattcggtgcaaccttacttttactgcgatgaggaagagaacttctaccagcagcaacagcagtccgagctgcaacctcctgccccaagcgaggacatttggaagaagttcgagctgttgccaacgccccctctctcgccatcaagaagaagcggactttgttctcccagctacgtggccgtgactcctttcagtctgagaggtgacaacgatggaggaggaggatcgttctcgactgcggatcagctggaaatggtcaccgagctgcttgggggcgacatggtgaaccaatcgttcatctgtgatccagatgatgaaactttcattaagaatatcattatacaggactgcatgtggagcggattttcagcagcagcaaagctggtcagcgaaaagctcgcatcataccaagccgctagaaaagacagcggctcacctaaccctgcacggggtcattccgtgtgttcgaccagctcgctttacttgcaagatctctcggctgcagcctcggaatgcattgacccatcagtggtgttcccttaccctctgaatgattcctcatcccctaagagctgcgcctcgcaagattcaagcgcattttcaccatcatcggacagcctcctgtcatccaccgagtcgagccctcaaggctcacctgaaccccttgtcctccatgaggaaacgcccccaacgacttcctcggattcggaagaagaacaggaggacgaagaagaaatcgacgtcgtgtcagtggaaaaaaggcaggcgcccggaaagagaagcgagagcggttcaccctcagccggaggccatagcaaaccccctcactcgcctctggtccttaagagatgtcatgtgagcacccaccaacataactacgccgccccaccttccactaggaaggactaccctgcagctaagcgagtgaagctggactccgttagagtgctcaggcaaatatcgaacaaccgcaagtgtacgtcgcccagatccagcgataccgaagagaacgtcaagaggagaactcacaacgtgcttgaaaggcaacggaggaacgagctgaaacggtccttttttgcactgcgggaccagattccggaactggaaaacaatgaaaaggcacctaaggtcgtgattctcaagaaagcaactgcctatattctgtccgtgcaagcagaaacgcagaagctgatttccgagattgaccttttgagaaagcaaaacgagcaactgaaacataagctcgaacaacttcgcaactcttgtgcg

SEQ ID NO: 128702 - DNA, 1317 bp, Artificial Sequence
  derived and/or modified sequence
atgccgctgaacgtgtcgttcaccaatagaaattacgatcttgattacgattccgtccagccttacttttactgtgatgaggaagaaaacttctaccagcagcaacagcaaagcgaattgcaaccacccgcgccatccgaggatatttggaagaagtttgaactgcttcccactccgcctctgtcgccaagcagaaggtctggtctgtgttccccatcttatgttgccgtgaccccatttagcctccgaggcgataatgacggcggcggaggcagcttcagcactgctgaccaacttgaaatggtcactgagcttctcggaggagatatggtgaaccaatcgtttatctgcgacccagatgatgaaacgtttatcaagaacatcattatccaggattgtatgtggtcgggatttagcgcagctgcaaagctcgtctcagagaagctggcaagctaccaagcagcaagaaaagattctggtagccctaatccagcacgagggcatagcgtttgctcgacctcctccctctatctgcaagacctttcagcagcagcatccgaatgtattgatccaagcgtggtgttcccttaccctcttaacgattccagctcacctaagtcatgtgcatcccaggattcatcggcattctcgcctagctcggattcgcttctgtcatcgaccgaaagctcacctcagggtagccccgagccactggtgctgcatgaagaaactccccctactacttcctcagactccgaggaagaacaagaagatgaagaagaaatcgatgtcgtctcagtcgagaaacggcaggcccctggtaagaggtcggaatcgggatcaccttcggctgggggtcattcgaaacccccacattcccctctcgttcttaagcggtgtcatgtgtcgacccatcaacataactacgccgctcctcctagcacccgcaaagattatccggcagcaaagcgggtgaagctggactctgtgcgtgtgcttcgacaaattagcaacaatagaaagtgtacctccccccgtagctccgatactgaagagaatgtgaaacggcgtactcacaatgtgctggaaagacaaagaagaaacgagctgaagagatcgtttttcgctcttcgcgatcaaatccctgagctggaaaacaacgaaaaggcaccaaaggtggtgatactgaaaaaggcaaccgcgtatattctgtcagtgcaggcagaaactcagaaactcatctcggaaattgatctgctgagaaagcaaaacgaacaactgaaacacaagctcgagcaacttagaaactcctgcgcc

SEQ ID NO: 128703 - DNA, 1317 bp, Artificial Sequence
  derived and/or modified sequence
atgccgttaaatgtttcgtttacgaatcgtaattatgatctagattatgattcggtacaaccgtatttttattgtgatgaagaagaaaatttttatcaacaacaacaacaatcggaactacaaccgccggcgccgtcggaagatatatggaaaaaatttgaactattaccgacgccgccgttatcgccgtcgcgtcgttcgggtctatgttcgccgtcgtatgtagcggttacgccgttttcgctacgaggtgataatgatggtggtggtggttcgttttcgacggcggatcaattagaaatggtaacggaactactaggtggtgatatggtaaatcaatcgtttatatgtgatccggatgatgaaacgtttataaaaaatataataatacaagattgtatgtggtcgggtttttcggcggcggcgaaattagtttcggaaaaattagcgtcgtatcaagcggcgcgaaaagattcgggttcgccgaatccggcgcgtggtcattcggtatgttcgacgtcgtcgttatatctacaagatttatcggcggcggcgtcggaatgtatagatccgtcggtagtttttccgtatccgctaaatgattcgtcgtcgccgaaatcgtgtgcgtcgcaagattcgtcggcgttttcgccgtcgtcggattcgttactatcgtcgacggaatcgtcgccgcaaggttcgccggaaccgttagtattacatgaagaaacgccgccgacgacgtcgtcggattcggaagaagaacaagaagatgaagaagaaatagatgtagtatcggtagaaaaacgacaagcgccgggtaaacgatcggaatcgggttcgccgtcggcgggtggtcattcgaaaccgccgcattcgccgctagttttaaaacgatgtcatgtatcgacgcatcaacataattatgcggcgccgccgtcgacgcgtaaagattatccggcggcgaaacgtgtaaaattagattcggtacgtgttttacgtcaaatatcgaataatcgtaaatgtacgtcgccgcgatcgtcggatacggaagaaaatgtaaaacgacgaacgcataatgtactagaacgacaacgacgtaatgaattaaaacgttcgttttttgcgttacgagatcaaataccggaattagaaaataatgaaaaagcgccgaaagttgttatattaaaaaaagcgacggcgtatatattatcggttcaagcggaaacgcaaaaactaatatcggaaatagatttattacgtaaacaaaatgaacaactaaaacataaactagaacaattacgtaattcgtgtgcg

SEQ ID NO: 128704 - DNA, 1317 bp, Artificial Sequence
  derived and/or modified sequence
atgccgctgaacgtgagcttcaccaaccgcaattacgacctggactacgatagcgtccaaccgtacttctactgcgacgaggaggagaacttctaccaacagcagcagcagtccgaactgcaaccgccagccccctcagaggacatctggaagaaattcgagttgttgccgactccgccactgagcccctcgcgccggagcgggctgtgctcaccaagctacgtcgcggtgaccccgttcagcttgcgcggcgacaacgatggcggagggggatcgttctctactgccgaccaactcgaaatggtcactgaactcctgggcggagacatggtgaaccaatcatttatttgcgaccctgacgacgaaactttcatcaagaacatcattatccaggattgtatgtggtcgggtttctccgccgccgcaaaactggtgtcggaaaagctggcctcctatcaggcggcacggaaggacagcggatcgccgaacccggcccgcggtcattcagtgtgctcgacttcgtcactctacctccaagatctgtcggccgctgcttccgaatgcatcgacccctcagtggtgttcccataccctcttaacgacagcagttcgcctaagagctgtgcctcgcaggactcctcggcgttttctccatcctcagattcccttctgagctcgaccgagtcctctcctcagggatcgccagaacctttggtgctccacgaggaaaccccaccgaccacctcgtcggatagcgaggaagagcaagaggatgaagaggaaatcgatgtggttagcgtggaaaagcgccaggcgccaggcaagagatccgaatcagggtccccaagcgcgggaggacactccaaaccgccccattcccctctggtcctcaaaagatgccacgtctcaactcaccaacataactacgctgccccgccgtcaacgaggaaggattacccggctgctaagcgcgtcaaactggacagcgtgcgggtgctgcggcagatttcaaacaatcgaaagtgcacctcgccccggtcctcagataccgaagaaaatgttaagaggagaacgcataatgtgctggaacggcaacgcagaaatgagctcaagaggtccttttttgcactgcgcgaccagatccctgaacttgagaacaacgagaaggccccgaaagtggtcatcctgaagaaagcgaccgcatacatcctctccgtgcaggcagaaactcagaagctgatctccgaaatcgatctgctgagaaagcagaatgagcagctcaaacacaagctcgagcagttgcgtaattcgtgtgcc

SEQ ID NO: 128705 - DNA, 1317 bp, Artificial Sequence
  derived and/or modified sequence
atgccactgaatgtttcatttacaaataggaactatgacctggattacgatagcgttcagccctacttctattgtgatgaggaggagaacttctatcagcagcaacagcagagtgaacttcagcctcctgcccctagtgaagacatctggaagaagttcgagctgcttcccacaccacctctctccccctctcgtcgtagcgggctgtgcagcccatcatatgttgcagtaactcccttttccttgcgcggcgacaatgacggaggcggtgggtctttttcaacggctgatcagctcgagatggtgacggaattattgggcggcgacatggtgaatcagtctttcatctgcgacccagacgacgaaacatttatcaagaacataatcatccaggattgtatgtggtccgggttcagcgccgccgccaagctggttagcgaaaagctcgcctcctaccaagcagccagaaaagatagcggttccccaaaccctgcgcgaggtcattcagtttgcagcacttcatctctgtacctgcaggatctgtccgcagccgcgtcagagtgcatcgacccatccgtggtgtttccatatcccttaaacgactcgtctagccccaagtcgtgtgcgagccaggacagttctgcgttctcccccagcagtgactctctgttatcatctacagagtcctccccccaaggatcccccgagccactagtactccatgaggaaaccccccccaccaccagcagcgattccgaggaagaacaggaggacgaagaggagatagatgtcgtctctgtggagaaaaggcaagccccaggcaagcgctccgaatctgggtctccctccgccggaggacacagcaagcccccgcactccccgttggtgttaaagaggtgccacgtgtcgacacatcagcacaactacgcagcccccccctccacccggaaagattacccagccgccaagagagtgaagcttgacagtgtccgggtactcaggcagatcagcaacaatcgaaagtgcacaagtcctaggagttcagatacagaggagaatgtcaaacgccgcactcacaacgtgttagagagacagcgccgaaacgagctcaagcgttctttctttgcccttcgggaccaaatacccgagctagaaaataatgagaaggcccccaaggtcgtgatcctgaagaaggcaaccgcttatatcctctccgtacaggccgagactcagaagttaatcagcgaaattgacctactaagaaagcaaaacgagcagctgaagcacaaactcgagcagctgcggaatagctgtgcg

SEQ ID NO: 128706 - DNA, 1317 bp, Artificial Sequence
  derived and/or modified sequence
atgccccttaacgtgagcttcaccaataggaactacgatctggattacgattcagtgcagccatacttttactgtgatgaagaagaaaacttttaccaacagcaacaacagagcgaacttcagcccccggcaccatcagaggatatttggaaaaagtttgaactgctgccgactccgccactctccccatcgagacgatcgggactttgctcgccttcatacgtagccgtgacgcctttttcattgaggggggataacgatggtgggggtggatcattcagcactgccgatcaacttgaaatggtcactgaattgctgggaggagatatggtgaaccagtcgttcatttgcgaccctgacgacgaaaccttcataaagaacattatcatacaagattgtatgtggtccggtttttcggcagctgcaaaacttgtctccgagaagctggcctcatatcaggcagctcggaaggattcgggctcccccaacccggcgagaggtcattccgtgtgttccacttcgtcactctatttgcaagatctgagcgcagcagcatccgagtgcatcgatccgtcggtcgtgtttccttaccctcttaacgactcctcatccccaaaatcctgcgcttcacaagactccagcgccttttccccatcatcagactcactcctttcaagcactgaatcgagccctcagggatcgcctgaacctctggtgctccacgaggaaacccctcccaccacttcatcggattcggaagaagaacaggaggatgaagaggagattgatgtggtgtcggttgaaaagagacaagcaccaggaaagcggtcggaatcaggatcgccatcagcaggaggacacagcaaaccaccacattcgccacttgtgcttaaacgctgtcatgtgtcgactcatcagcataactacgccgcccctccttcaaccagaaaggactacccggccgcgaagagagtcaaactggacagcgtgagagtgctgcggcagatcagcaacaatagaaaatgtacgtctcccagatcgtcagacactgaagagaacgtgaagagaagaactcacaacgtccttgagagacaacgccgcaacgaactgaaaagatcattcttcgcgctgcgggaccagattccagaactcgaaaacaacgaaaaggcaccaaaggtggttattctcaagaaggccactgcatacatcctttcggtccaggcggagacgcaaaagctgattagcgaaatcgacctgctccgcaaacaaaatgagcaactcaagcacaagctcgaacagcttcgcaactcctgtgcc

SEQ ID NO: 128707 - DNA, 1317 bp, Artificial Sequence
  derived and/or modified sequence
atgcctttaaatgtttctttcaccaatagaaactacgacctcgattatgactcagttcagccatatttctattgtgacgaagaagaaaatttctatcagcagcaacaacagagtgagctgcagcccccagccccgtcagaggacatctggaagaagttcgaattactcccgacacctcccctctctccatccagaagatctggcttgtgttccccgagttacgtcgctgtgacacctttcagcttgcgcggggacaacgatggcggaggaggatccttcagtacagcagaccagcttgagatggtcacagaactcctcggaggtgatatggtgaaccaaagttttatctgcgaccccgatgacgaaacctttatcaaaaacatcatcatccaggattgcatgtggagcggatttagcgctgctgccaaactggtgagcgaaaaacttgctagctaccaagccgcccgcaaggattccgggtctcctaaccccgcgcggggtcattctgtgtgctcaacatctagcttgtacctacaagacttaagcgccgcagctagcgagtgcattgaccccagcgtcgtcttcccttacccacttaacgatagctcttctcctaaatcctgcgcctcccaggacagtagcgctttctcccccagttctgacagcctcctgtctagcacagagagtagtccccagggatctccagaaccactggtcctccatgaggagacgcccccaacaacttctagtgatagcgaggaggagcaggaagatgaagaggagatcgacgtggtgagcgtggaaaagaggcaagctcctgggaaaaggtctgaatctggtagcccttctgcaggaggacatagtaagccccctcacagccccctggtcctgaagaggtgccacgtgagcacacatcaacacaactacgcagcgcccccatccacacgcaaagactaccctgccgcaaaaagagtcaaattggacagcgttcgtgtgctgcggcagatcagcaataatcggaaatgcacaagccccaggtccagtgacacagaggagaacgtaaagagaagaacccataacgtcctcgaacggcagcgtcgcaatgagctcaaaaggtcttttttcgctctaagagatcaaatccccgaattggagaacaacgagaaggctcctaaggtggtcattctgaaaaaagcaactgcctatatattatcagtccaggccgagacccagaagctgatctccgagatcgacctgttgaggaaacaaaatgagcaactcaagcataagttggagcagcttagaaattcttgtgca

SEQ ID NO: 128708 - DNA, 1317 bp, Artificial Sequence
  derived and/or modified sequence
atgcccctgaacgtttcgtttactaacaggaattacgacctggattacgactcagtgcagccctacttctattgtgacgaggaagaaaatttctatcagcaacagcagcagtctgaactacagcctcctgctccgtccgaggacatttggaagaaattcgagctgctgccgactccgcctttaagtccttccaggcgaagcggattgtgcagccctagctacgtggcggtcacccctttcagtctgcggggcgataatgatgggggcggcggaagtttcagcaccgctgatcagctggaaatggtcacagagctcttagggggcgacatggtaaatcagagttttatttgtgaccccgatgacgagaccttcatcaaaaacattatcattcaggattgcatgtggtcaggattttccgccgccgcaaagctggtgtctgagaagctagcgtcctaccaggctgccagaaaagactcaggctcccctaaccctgcgcggggtcactccgtctgtagcacatcgagcctctatctgcaagacctgagtgcagcagcctcagaatgtatcgacccctcggtagttttcccatatcctcttaacgattctagcagtcccaaatcctgcgcttcccaggactcaagcgccttcagcccttctagcgactccctgttatcctccaccgagtcatctccgcaagggagccctgagcccctcgttctacacgaggagactcctcccacaactagctctgactccgaagaagaacaagaggacgaggaggaaattgacgtcgtgtctgtggaaaagcggcaagctcctggaaagcgatccgagagcggctcgccgtccgcaggcgggcactctaaacctccgcattctccattggtgctgaaaagatgtcatgtgtcaacgcatcagcacaattatgcagcacctccttctactaggaaggactacccagccgcaaagcgagtgaaactggactcggtgcgagtgctcaggcaaatcagtaacaaccggaaatgcacgtctcctagaagttctgacaccgaagagaatgttaaacgacgcacacataacgtgctggaacgacagcgacgtaatgagcttaagcggtctttcttcgctctgcgcgatcagatccccgagcttgaaaataatgagaaggcacccaaagtggttattctgaaaaaagctaccgcgtatattctgtcagtacaggccgagacacagaagttgatcagcgagattgatctgttgcggaaacagaacgagcagcttaagcacaaattggaacagctgcgaaacagctgtgcc

SEQ ID NO: 128709 - DNA, 1317 bp, Artificial Sequence
  derived and/or modified sequence
atgccgcttaatgtctcgtttaccaaccgtaactacgatttggactacgactcagtgcagccttacttctactgcgatgaagaagagaatttctaccaacaacaacaacagtcggaactccagcctcccgccccttcggaagatatctggaagaagtttgaactgctcccaaccccgccactttccccatcccgaaggtcgggactctgttccccctcgtacgtcgccgtgactccattctcacttcggggagataacgatggaggaggcggatcattttcaaccgctgatcaacttgaaatggtgactgagctgcttggtggtgatatggtgaatcagtcctttatctgcgatccagacgatgagacttttatcaagaacatcatcatccaggactgcatgtggtcgggtttttcggcagcggcaaagctggtgtccgagaagctcgcatcataccaggcagcacgcaaggattcgggttcccccaatccggcacgtggacattccgtgtgtagcacttcatcgttgtacctgcaagatcttagcgccgcggcttcagaatgcatagacccatccgtggtgttcccttacccactgaacgactcctcctcgcccaagtcctgtgcatcgcaggatagcagcgcattttcgccctcctcagactccctcctttcgtcaactgaaagctcgcctcaaggaagccccgagcctctcgtgctgcatgaggaaacgcccccgactacttcttcagatagcgaagaggagcaagaggatgaagaagaaattgatgtcgtgtccgtcgaaaaaagacaagctcccggcaagaggtcagaatcggggagcccgagcgccggaggccacagcaaaccacctcattcaccacttgtgctgaagagatgccatgtgtccacccatcagcataactacgccgcacccccttcaacccggaaagactacccggcagcaaagagggtgaagctcgactccgtgcgcgttctgcgccagatatccaataaccgcaagtgcaccagccccagatcatccgacactgaggaaaacgttaaaagacgtacccataacgtgcttgagcggcaacggagaaatgaactgaaacgttcgttttttgccctccgcgaccagattcctgaacttgaaaacaacgaaaaggcaccgaaggtcgtcatcctcaaaaaagcaaccgcctacattctttccgtccaggccgaaactcagaagctgatctcggaaattgatctcctgcgaaagcaaaacgagcagctcaagcataagctcgaacaactccgcaattcgtgtgca

SEQ ID NO: 128710 - DNA, 1317 bp, Artificial Sequence
  derived and/or modified sequence
atgcctctgaacgtgagcttcaccaaccgcaattacgatttagattacgattccgtgcagccttacttttattgcgacgaggaggagaacttctatcaacagcaacaacaatccgagctccagcctccagccccttcagaggatatttggaaaaaattcgagctgctcccaacacctccactgtctccatcccgccgctccggtctctgttccccgtcctacgtggcggtgactccattctcactgcgcggtgataacgatgggggaggaggctcgttctcaacagccgaccaactcgagatggtcaccgagctactaggaggcgacatggtgaaccagtctttcatctgcgatcccgatgacgagacattcattaagaatatcattatccaggattgcatgtggtccggatttagtgcggcagccaagctggttagcgagaagcttgccagctatcaagcagcaagaaaggactcaggaagtcccaatccagctcgcggccattccgtgtgctctacctcctccctgtatcttcaagacctcagtgccgctgccagcgagtgcatcgacccctccgtggtctttccctatcccctcaatgatagctccagccctaagtcttgcgcgtctcaggactcctcagcatttagtcctagctctgatagcctgctttcgtctactgaaagctctccgcagggtagcccggaaccactagttctccatgaggagactccccccaccacatcttccgatagcgaagaagagcaggaggacgaagaggagatcgacgtggtgagtgttgagaaacgtcaggcacccgggaagagatcggagagcggtagcccctcagccgggggacattctaaacctccacattctccactggtgctcaaaagatgccacgtgtcaacccaccagcacaattacgcagctccaccaagcaccagaaaggattaccccgccgccaagcgtgttaaactggatagcgtgcgcgtactgaggcaaatttctaataataggaagtgtactagtcctaggagtagtgacaccgaggaaaacgtaaaacgcaggacacacaacgtgctggagcggcagaggcgtaacgagctgaaaagaagctttttcgccttaagggaccagatccccgaattagagaataacgagaaggctcccaaagtggttattcttaagaaggctacggcctacatactgagcgtccaggcagaaacccagaaattgatttctgagattgatttgctgagaaagcagaacgaacagctgaagcataaactagagcagctcagaaattcctgcgcc

SEQ ID NO: 128711 - DNA, 1317 bp, Artificial Sequence
  derived and/or modified sequence
atgcctctcaacgtgtcgtttactaatagaaactacgacctcgactacgactcagtccagccgtacttttactgcgatgaggaggaaaacttctaccagcagcaacagcaatcggaattgcaacccccggccccctcagaggacatatggaaaaagttcgaattgctgccgactccgccactgtcaccgtcacgccgcagcggactctgctcgcctagctacgtggcagtgacccctttttcactgcgcggagacaatgacggtggagggggatccttctccacggcagaccagctcgaaatggtgaccgagcttctgggcggagacatggtcaatcaatcgttcatctgtgatccggatgatgaaacctttatcaagaacatcattatccaggactgcatgtggagcggattcagtgcagcggcaaagctcgtctcagagaagctggcgagctatcaggcggctaggaaggatagcggatcgccgaacccggcacgcggtcactcggtgtgcagcacgtccagcctgtacctgcaggatctctcagccgcagcctcggagtgcatcgacccgtcggtggttttcccgtacccgctgaacgattcctcgtcgccgaagtcctgcgccagccaagattcgagcgctttctcgccaagcagcgactcattgctctcctccaccgaaagctcaccgcagggtagccccgaaccgctggtgctgcacgaggaaactccaccgacgacctcatccgactccgaagaggagcaagaggatgaggaagaaattgatgtggtcagtgtggaaaaaaggcaggctcctggtaaacggtctgagtctggatcgccctccgcgggcggacatagcaagccgccacactcacctctggtgcttaagcgctgtcacgtgagcactcatcaacacaattacgccgctccgccgtcgacgcgtaaggactaccccgccgctaaacgcgtcaagctcgactcagtgcgggtgttgcgccaaatctccaacaacagaaagtgtacgagccctcggagttcagataccgaagagaacgtgaagagaaggactcacaatgttctcgaaaggcagcgcaggaacgagctcaaacgctctttcttcgcgctgcgggaccagatcccggaactggagaataacgagaaagcacctaaagtcgtcattctgaaaaaggccactgcctacatcttgagcgtgcaagccgaaactcagaagctgatctcggagatcgacctgctccgcaagcaaaatgaacaactgaagcataagctcgaacaacttcgcaatagctgtgcc

SEQ ID NO: 128712 - DNA, 1317 bp, Artificial Sequence
  derived and/or modified sequence
atgccattgaacgtgtcctttacgaatcgtaactacgacctggactacgattccgtgcagccctacttttactgcgacgaggaagaaaacttttaccaacagcagcaacagtcagagcttcagcctcctgccccatcggaagatatttggaagaaatttgaacttctgccgaccccgcccctgtccccttccagaagaagcggattgtgtagcccgtcgtacgtggcggttaccccgttttcactcagaggagataatgacggcggagggggttcattctccaccgcagatcaactggaaatggtcactgaattgttgggtggcgatatggtgaaccagagcttcatctgcgatcccgacgacgaaacttttatcaagaatatcattattcaggattgtatgtggagtgggttcagcgccgccgctaagctggtgtccgaaaaacttgcctcctaccaagccgcaagaaaggactcaggatcgcctaacccggcacggggacactcggtgtgttcaacttcgtcgctttacctgcaagatctcagcgctgctgcgtcagagtgtattgatccgtcggtggtctttccgtaccctctgaatgactcctcgtctccaaaatcctgcgcatcacaagattcttcggccttttcaccttcctctgacagcttgctgagttccaccgagtcatctccccaagggagccctgagccactggtgctgcatgaggagactccacctactaccagtagcgactcggaagaggagcaggaagatgaggaagagatagacgtggtgagcgtcgaaaaacgccaagcacctggaaagaggagcgaatcaggtagccccagcgcaggaggacactcaaaaccaccacactcacccttggtgctcaagcgctgtcatgtctcgacccatcagcacaactacgcagcaccaccttccaccagaaaggactatcccgcggccaagcgtgtgaaattggattccgttcgcgtgcttcgccagatatcgaacaacaggaagtgcaccagcccccggtcgtcagacactgaagaaaacgtgaagaggagaacccataacgtgcttgaaagacaacgaaggaacgaactcaaacgctccttcttcgcactgagagatcaaatccccgaactggagaacaatgagaaggcacctaaggtcgtgattctgaagaaggcgactgcatacatccttagcgtgcaggcggaaacccaaaagctcatctcggaaattgatttgcttcgcaagcaaaacgaacagttgaagcataagctggagcaactccgcaactcatgtgca

SEQ ID NO: 128713 - DNA, 1317 bp, Artificial Sequence
  derived and/or modified sequence
atgcctctgaacgtttcgtttaccaaccggaactacgacttagattacgacagcgttcaaccctatttttattgcgatgaagaagagaatttttatcagcagcagcaacagtcagaactgcaacctcctgccccctctgaagacatctggaaaaaattcgagctgctccctactcctcctttgtcccctagtagacgttccggtctttgcagcccctcctacgtcgccgtgacaccctttagcctgcggggggacaacgacggaggtgggggatctttctccacggccgaccagctggaaatggtgacagagctgctcggaggtgatatggtgaaccaaagtttcatttgtgatccggacgacgaaaccttcattaagaatatcatcatccaggattgtatgtggagcggcttcagtgctgccgccaagctagtgtcggagaagctggcttcctaccaggctgctagaaaagacagcggatccccaaatcctgctcgaggccactccgtatgttcgacatcgtctctgtacctccaggacctctctgctgcggctagcgagtgtattgaccccagcgtggtgttcccttatccactgaatgactcatcatccccaaaaagttgcgcttcgcaggatagtagcgccttctcgccatcgtctgattctctcttaagctctaccgaaagttctcctcaaggatctccagagcccctagtgctccatgaggagacaccccccacaacctcatccgattcagaggaggagcaggaagacgaggaggagatcgatgtggtgtccgtcgaaaagcgacaggccccgggcaagaggtccgagtcaggcagcccaagcgccggtgggcatagcaagcccccacactctccactggtgttaaagagatgtcacgtttccacccaccaacacaactacgctgccccaccctccacccggaaggattaccccgccgctaagcgcgtgaaacttgattccgtccgcgtcctgcgccagatctccaacaacagaaagtgcacgtccccacgatcttccgatactgaggaaaacgtgaaaagacgcactcacaatgtgcttgagcggcagaggcggaatgagctgaagcggtccttcttcgctctgagggaccagattcctgaactcgaaaacaatgagaaagccccaaaagtggtgatcctcaaaaaggcgacggcgtacatcttgtccgtccaggctgagacccagaagctcataagtgagatagatctgttgcgaaaacaaaacgaacagcttaaacataagcttgagcagcttcggaattcctgtgcc

SEQ ID NO: 128714 - DNA, 1317 bp, Artificial Sequence
  derived and/or modified sequence
atgcccctcaatgtctccttcaccaaccgcaactatgacctggactacgattccgtccagccgtatttctactgcgatgaggaagagaacttctaccaacagcaacagcagtcagagcttcaaccacccgccccgtccgaagatatatggaagaaattcgaattgctgcccacgccaccgctttcgccgtccaggcggtccggactgtgctctccatcctacgtggccgtcactcccttttcccttcggggtgataacgacggtggaggcggctcgttttcgactgctgaccagctggagatggtcacggagctgctcggaggagacatggtcaaccagtcatttatctgcgacccagatgatgaaaccttcatcaagaacatcattatccaggactgcatgtggagcgggttctccgcagccgcgaaacttgtgtcagaaaagttggcatcataccaggcggcgcgcaaggactcaggttccccgaacccggcccgcgggcactcggtgtgtagcacctcgtcactgtaccttcaagacctttcagccgcggcttcggaatgtatcgaccctagtgtggtctttccctacccgctcaatgacagctcgtcaccaaaatcttgcgcctcccaggacagctcagccttctccccatcctcggatagtttgctgtcctccaccgaaagcagcccgcagggatcgccagaacctctggtcctccatgaagaaaccccgccaactacttcgagcgatagcgaagaggaacaggaggacgaagaggagatcgatgtcgtgtccgtggagaagcggcaagcgccgggaaagcgatcggagtccggatcgccctcagcaggcggtcactccaagccgccacatagcccgctcgtgctcaaacggtgccatgtctcaacgcaccagcataactacgcggctccacctagcaccagaaaggattacccagcagcaaaacgcgtgaaactcgactcagtgcgcgtgctgcgccaaatctcaaacaatcgtaagtgcacctccccgcggtccagcgacactgaggagaatgttaaaagaagaacccacaacgtgttggaaaggcagcgcagaaacgagcttaaacgcagcttctttgctctgcgggatcagatcccggagctggaaaacaatgagaaggccccgaaggttgttatactgaagaaagccaccgcatacattttgagcgtgcaagctgagactcaaaagctgatttcggaaatagacctcttgcgaaagcagaatgaacaactcaagcacaagttggaacagctcaggaattcatgtgcc

SEQ ID NO: 128715 - DNA, 1317 bp, Artificial Sequence
  derived and/or modified sequence
atgcctctgaatgtttccttcacaaatcgaaattatgaccttgattatgactccgtgcagccatatttctactgtgatgaagaagaaaatttctaccagcagcagcaacagtctgagctacagcccccagctccctcagaagacatctggaagaaatttgaattgctgcccaccccacctctctcccccagccgcagaagtgggctgtgtagcccctcttacgtcgcagttactccgttttcactgaggggagacaatgacggcggcggcgggtcattcagcacggccgaccaattggagatggtaaccgagctgcttggcggtgatatggtgaatcaatccttcatttgcgaccccgacgatgagacctttattaagaatattattattcaggactgcatgtggtccgggttttcagcagccgcgaagctcgtgtcagaaaaactagcttcttatcaggcagcaagaaaagattctggatctcctaatcccgcccgtgggcactcagtgtgtagtactagctcactgtaccttcaggacttgtctgctgcagcctctgagtgcatcgacccctctgtcgtgttcccttatcctcttaatgacagttcctcacctaaatcctgtgcatcccaggattcaagcgccttctctcccagtagtgactctcttctgtcctcaactgaatccagccctcagggcagcccagagcccctggtgctgcacgaggaaactccccctactaccagcagcgacagtgaggaagaacaggaggacgaagaggagattgacgtggtatccgtggagaaaaggcaagccccgggcaagcgctccgagagcggctccccatccgcgggtggacatagtaaaccaccacactcgccactggtgcttaagagatgtcatgtttcaacccaccagcacaattacgccgcaccaccgtccactaggaaggactacccagccgctaaaagggtgaaactggactcagtgagggtacttaggcagatctccaacaaccgaaagtgcacctctccacggtcaagtgacactgaagaaaatgtgaagcggcgaacacataatgtactcgagcggcaaagacgcaatgagctcaaaaggtccttctttgctctgcgtgatcagatcccggaactcgagaacaacgagaaagcacccaaagtcgtgatccttaagaaggccaccgcttacatattgagcgtccaggccgaaacacaaaagctgattagcgaaatagacctgctgcgcaagcagaatgagcaactgaaacacaaactcgaacagctcagaaacagttgcgct

SEQ ID NO: 128716 - DNA, 1317 bp, Artificial Sequence
  derived and/or modified sequence
atgcctcttaacgtgtcgttcaccaaccggaattacgacttagattacgactcagtgcagccatatttctactgcgatgaagaggagaatttctatcagcagcagcaacagagcgagctccagcctccggccccctctgaagacatctggaagaaatttgagctgttaccaactcctcctttgagtccttcccggaggtctggcctatgcagccctagttacgtcgctgttaccccattcagcctgagaggcgacaatgacggaggtggaggctcgtttagtaccgccgatcagctggagatggttacagagctgctcgggggtgatatggtgaatcagtcattcatctgtgacccagacgacgaaacattcattaagaatattatcattcaggattgtatgtggtcaggcttctccgctgccgccaagctagtgtccgaaaagctggcctcgtaccaggccgctcgcaaagattctggaagccccaatccagcacggggccactctgtgtgctcgacatcctccctatacctacaggacctctcagctgccgcatccgaatgtatcgaccccagtgttgtgttcccctaccccctaaatgattcatcgtcccccaagagctgtgccagtcaggactccagcgccttttccccttcctctgacagtctgttgtcgagtaccgagtccagccctcaggggtcccccgaacccctagtgctgcacgaggaaacacccccaactacttcttcagattctgaagaggagcaggaggatgaagaagaaattgatgttgtgagcgtggaaaagcgacaggccccggggaagagaagcgagtcaggcagcccctccgccggtgggcacagcaaaccaccacactccccgcttgtcctaaaacggtgccacgtgtcaactcatcagcacaattatgctgccccgccaagcacaagaaaggactatcctgcagcgaagcgggtcaagcttgactccgtgagggtgctccgacagatctccaataaccgtaaatgtactagcccgcggtcatctgataccgaggaaaacgtgaaaaggcggacacacaacgttttggagcgacagcggagaaatgaacttaagcgcagcttctttgctctccgcgatcagatcccggaattggagaataacgaaaaggcccccaaagtggtgattctgaagaaagctacggcttacatcctatctgtgcaggctgaaacgcaaaaattgatcagcgagatcgatctcctgcgcaaacagaacgagcagctaaaacataagctcgagcaactccggaactcctgtgcc

SEQ ID NO: 128717 - DNA, 1317 bp, Artificial Sequence
  derived and/or modified sequence
atgcctctgaacgtctcgtttaccaacaggaactacgatctcgactacgattccgtccagccctacttttactgcgatgaagaagaaaacttttaccagcagcaacaacaatcggagctgcagcctcctgcaccttcagaagatatctggaagaagtttgaactgctcccgacccctccactctccccatccagaaggtccgggctctgctcgccttcatacgtggcagtcaccccattttccctgcggggtgataatgacggtggcggtggtagcttttcgaccgccgatcagttggaaatggtcaccgagcttctgggaggcgatatggttaaccagtcgttcatttgtgatccagatgatgagactttcattaagaacataatcatccaagattgtatgtggagcggattctcggcagcagccaaacttgtgtcagaaaaacttgcgtcgtaccaggccgccagaaaggattccggatcgcccaacccggcccgagggcattcggtgtgtagtactagctccctttaccttcaggacctctccgccgccgcctccgagtgcatagatcccagcgtggtattcccctacccattgaacgactcctcctcacctaagtcatgcgcaagccaagattcgagcgcattctcaccaagctccgacagtctcttgtcgagcaccgagtcctcacctcagggctcgccagagcctctggtcctgcatgaggaaactcctccgacgacttcatcggactcagaggaggaacaggaggatgaagaggaaattgatgttgtctcggtggaaaagcggcaagccccaggaaaacggtcggaatccgggtccccatcggcgggaggtcactcgaagcctccacactctccattggtgctcaagagatgccatgtgagcactcaccaacacaattacgcagctccaccatcaactaggaaggattaccctgccgcaaagagggttaagttggattcggtgcgagtgctgcggcagatcagcaacaatcgaaagtgtacttcgcccagatcctcggataccgaagaaaacgtgaagcgcagaactcataacgtgcttgaaaggcagagaaggaacgagctcaagcggtccttttttgcacttcgggaccaaatccccgaacttgagaacaatgaaaaggctcctaaagtggtcattctgaagaaggcaaccgcatatatcctttccgtccaagctgagacgcagaagctgatttcagaaatcgatcttcttcggaagcaaaatgagcagcttaagcacaagctggagcaacttcggaattcatgcgca

SEQ ID NO: 128718 - DNA, 1317 bp, Artificial Sequence
  derived and/or modified sequence
atgcctctgaacgtgtccttcactaacaggaactacgatttggactatgactccgtccagccctatttctattgcgacgaggaggagaatttctatcaacaacaacagcaaagcgaacttcaaccccctgcaccttcagaggatatctggaagaaatttgaattgctgcccaccccaccactgtccccctcccgtcgcagcggcctgtgttcacctagttacgtggccgtgacccctttctctctccgtggtgacaacgacggaggtggtggctccttttccactgccgaccagttggagatggtaaccgaactcctcggcggtgacatggtgaaccaatcattcatttgtgatcctgacgacgagacattcattaagaacattatcattcaagactgtatgtggagcggcttcagtgccgctgctaagttggtgtccgagaagctggcttcttaccaagctgctagaaaagattccggatcacccaaccccgccaggggtcattccgtctgcagcacatcttcactgtacctccaggatctgtcagctgctgcctccgaatgcatcgacccatcagtggtgttcccataccctttgaatgattcaagctcccccaagtcctgcgcttctcaggacagctcagctttcagtccttcttctgattccttgctcagctccactgagtcatcacctcagggcagccctgagccattggttctgcacgaggagaccccccccaccacctccagtgattccgaggaagaacaggaagatgaagaggaaattgatgtcgtatctgtggagaagagacaagcaccaggtaagaggagtgaatctggtagcccctccgctggaggtcattctaagcccccccactcaccccttgttctgaaacgttgtcatgtgtccacccaccagcacaactatgctgcaccaccatccacaagaaaggattatccagcagcaaagagggtgaagttggattctgtaagagttttgagacagatctcaaacaatagaaaatgcacatcaccacgttcaagcgacaccgaggaaaatgtcaagagaagaactcacaacgttttggagcgccagcgtcgcaatgagctgaagaggagtttcttcgcactcagggatcaaatcccagagttggaaaacaacgaaaaggctcctaaagtagtgatcctgaagaaagcaaccgcatacatcctctccgttcaggccgagacccaaaaattgatctctgaaatcgatttgctgagaaagcagaacgaacaactcaagcacaaattggagcagttgcgtaacagctgcgct

SEQ ID NO: 128719 - DNA, 1317 bp, Artificial Sequence
  derived and/or modified sequence
atgccactaaacgtgtcattcacaaacagaaattacgatctggactacgactctgttcagccatacttttactgcgatgaggaagagaacttctaccagcagcagcagcagtcagaactgcagccccccgcaccttccgaggacatctggaaaaagttcgaactgctgccaacgcctcccctgtctccttcacgacggtccggactgtgtagcccgtcctatgtggccgttactcccttctctcttaggggcgacaatgatggcgggggaggctcattttccacagctgatcaattagagatggtgacggagctgcttggcggggacatggtcaatcagtcctttatttgtgatccggacgacgagactttcattaaaaacatcattattcaggattgcatgtggtccggatttagtgccgcggcaaaacttgtgtccgagaagttagcctcttaccaggctgcccggaaagactctgggtccccaaaccctgcccgcgggcatagcgtttgctcaacttcatccttgtatctccaggacctcagcgccgcagcctctgaatgtattgatcctagtgtagtgttcccctaccccctcaacgactccagcagcccaaaatcatgcgcctctcaagacagttcagcgttctccccctcatctgacagcctgctcagctcaactgaatcaagtccccagggcagccctgagcctctggtcttacatgaagagacacctccaaccacatcttctgactctgaagaagagcaagaagacgaggaggaaatcgacgtcgtttcagtggagaaaagacaggcccctggcaaacggtcagagagcggaagcccctcagccggaggtcactcgaagccaccccacagccccctggtgctcaagcgatgtcatgtcagcactcaccagcacaattacgccgctcctccatctactcgcaaagattaccctgctgctaaacgcgttaagctggatagcgtgcgagtgcttagacaaatctcaaacaaccgtaaatgcacatctccgcgcagcagtgacaccgaggaaaacgtgaaacgacgaacacataacgtactagagcgccagagaaggaacgagctcaagcggagctttttcgctctcagagaccagatccctgaactcgaaaataatgagaaggctcccaaagtcgtgatcctgaagaaggctactgcttacatcctcagtgtgcaggcagagacgcagaaattgatctccgagatcgacctgctgagaaagcaaaatgaacagcttaaacataagctggagcaactgcggaactcatgcgcg

SEQ ID NO: 128720 - DNA, 1317 bp, Artificial Sequence
  derived and/or modified sequence
atgccacttaacgtgtcgttcactaatagaaattacgaccttgattacgactccgtgcagccttacttttactgtgatgaggaagagaacttctaccaacaacaacagcaatcagagcttcagcccccggcccctagcgaggacatctggaagaagttcgagctgctgcctacgccgccactgtctccatctaggcgctccggcttgtgctcgccatcctacgtggccgtcactcctttctccctgagaggagataatgatggcggaggtgggagtttttcgaccgcagaccagctggaaatggtgaccgagttgctcggaggcgatatggtgaatcagtcatttatctgcgacccggatgacgagactttcattaagaacatcataattcaggactgtatgtggtccggtttttcagccgcagcaaaacttgtctcggagaagctggcctcctaccaagcagcacgtaaggattccggaagcccgaaccctgcaagaggccactcggtgtgcagcacttcaagcctctaccttcaggacctgtccgctgcagcatccgagtgcatagacccctctgtcgtctttccttatcccttgaatgacagcagctcgcctaaatcgtgtgcaagccaagatagcagcgctttctcaccttcgagcgattcacttctgagctccactgagtcctcgcctcagggatcgccagagccgttggtgctgcacgaagaaacccctcctaccacttcatccgactcggaagaggagcaggaggacgaggaagaaattgacgtggtgtccgtggagaagagacaagcacccggaaagagaagcgaatccggatcaccatcggcgggcgggcattccaaacctcctcattcaccgctggtgctcaagcggtgtcatgtgtccacccatcagcacaactacgcagctccgccctccactagaaaggattacccagcagcgaagagagtgaagctcgactcggtgcgagtcctgcggcagatcagcaacaaccggaagtgtacctcccctagatcgagcgacacggaagaaaatgtcaagcgtcgcacccataacgtgctggaaagacaaaggcggaacgaacttaagagatccttctttgcccttcgcgatcagatccccgaactggaaaacaacgaaaaggcacctaaggtggttattctcaagaaagcgaccgcctacatactttcggtgcaagccgaaacccaaaagttgattagcgaaattgacctgttgaggaagcaaaacgaacagttgaagcataaacttgaacagttgagaaattcgtgtgca

SEQ ID NO: 128721 - DNA, 1317 bp, Artificial Sequence
  derived and/or modified sequence
atgccattgaacgttagtttcactaatagaaactatgaccttgactacgactcagttcagccatatttctactgcgacgaagaggagaatttctatcagcaacaacagcagtcagaactgcagccgccagctccgagcgaagacatctggaagaaatttgaactcctgcccactcccccgctgagccctagccgcaggtcgggtctctgtagcccttcctacgtggcagttacacctttctctttaaggggagacaatgatgggggtggcgggagcttctccaccgctgaccagctcgagatggttacagaacttttagggggtgacatggtgaatcagtccttcatctgtgatcccgacgacgaaacctttattaagaatatcatcattcaggattgcatgtggagcggattcagcgctgcggccaaactagtcagcgaaaagctggcttcgtatcaagcagcccgaaaggacagtgggtcccctaaccccgctagagggcactccgtctgttccacatccagcctctatttgcaagatttgtctgccgcggcgagcgaatgtatcgatcccagcgtagtgttcccatacccgttgaacgattcctcctcgccaaaaagttgtgcctctcaggacagctcagctttttctccatcaagcgattcactgctaagttctactgaaagctccccccaaggctcgcctgaacccctggtattgcacgaggagacccctcctaccacaagctccgattctgaagaagaacaggaggacgaagaggagatcgatgtcgtgtctgtggaaaagaggcaggccccgggaaaacgatctgaaagcggtagtcctagtgccggagggcactcaaaaccgccacattcacctctcgtgctgaagagatgccacgtgtcaacgcatcagcataactacgcagcgcctcccagcacacggaaggattatcccgctgccaagagagttaaactggactccgtgagagttcttagacagatctccaataaccggaaatgcacctcccctagatcatctgacacagaagagaatgtgaaacgccgcacacacaacgtgctggagcggcagcgccggaacgagctcaagcggtcattctttgcactgcgggaccagatcccggagctcgaaaataacgagaaggctccaaaggttgtgatactaaaaaaggccactgcttacatcctgagcgtacaggccgaaacacaaaagctgatctctgaaattgacctccttagaaagcaaaacgaacagctcaaacacaagcttgaacagcttcgcaactcttgcgca

SEQ ID NO: 128722 - DNA, 1317 bp, Artificial Sequence
  derived and/or modified sequence
atgccactgaacgtgtccttcactaaccgtaactacgatctggattacgacagcgtgcagccatacttttactgtgatgaagaggagaacttttaccaacagcagcagcaatcggagctgcaaccgcctgcgccgtcggaagatatttggaaaaagtttgaactcctgcccactcctcctctgtcgccctccaggagatcgggactttgcagcccttcatacgtcgcagtcacgcctttctcactgagaggcgacaacgatgggggcggaggatcgttctcgactgcagaccaactggaaatggtgactgaactgctcggaggtgatatggtgaatcagagctttatctgtgacccagacgatgaaaccttcattaagaatatcatcattcaggattgtatgtggtcgggattcagcgccgccgcaaaactcgtgtccgaaaaactggcatcctaccaagcagcacgaaaggattccgggagcccaaatcctgcaagaggccacagcgtctgttcgactagctccctgtacctccaagacctgtcggcagctgccagcgagtgtatcgatccatcggtcgtgtttccatacccccttaacgactcctcatcccctaaatcatgcgcatcacaagattcgagcgcattttcgccatcgtcagattcacttctgtcatcaacggaatcgtcgccgcaggggagcccagaaccactcgtactccacgaagagactccgcctacgacctcgtccgattcagaagaagagcaagaggacgaggaagaaattgacgtcgtctcagttgagaagagacaggcaccaggaaagagatcagagagcggatcgccctccgccggaggtcatagcaagcccccacattcgccattggttttgaagaggtgtcatgtcagcactcatcagcataactacgccgctcccccaagcacccgtaaggattaccctgctgccaagcgtgtgaagctcgactcggtgcgggtgctgagacagatttctaacaataggaagtgtacctcgcctaggtctagcgacactgaggaaaacgtgaaacggcgcacccataacgtccttgagaggcagcggagaaacgaactgaagcgctccttcttcgcacttcgcgaccaaattcctgaactggagaataacgagaaggccccaaaggtagtgatactcaagaaagcaactgcatacattcttagtgtgcaagctgaaacccagaagctcatttccgaaatagacctcctgcggaaacaaaatgagcaactcaagcacaagctggagcagcttcgcaactcgtgtgcc

SEQ ID NO: 128723 - DNA, 1317 bp, Artificial Sequence
  derived and/or modified sequence
atgcccttgaacgtatcctttactaaccgaaactatgatctagactatgatagcgtgcagccctacttctactgcgatgaggaggaaaacttctaccagcaacagcagcagtccgaactgcagccccctgccccaagcgaagatatctggaagaagttcgaactgctgcctactcctcccctgagtcctagtcggcggtctggcctttgtagcccctcatacgtcgctgtgaccccgttttccctgcgtggagataatgacgggggcggagggtcattctccacagcagatcagttagagatggtgacagaactcctgggtggggatatggtcaatcagtcattcatttgtgaccccgacgacgagacctttatcaagaacattattattcaggattgcatgtggtccgggttcagcgccgccgccaagctggtcagcgaaaagcttgcgtcttaccaggccgccagaaaagatagcggctcacctaatccagctaggggccattctgtgtgttccacctcatcattatacctccaggacctgagtgccgcagcatccgagtgcatcgacccatcggtagtgttcccttatccactgaacgatagctcatctcctaaaagctgcgcttcacaagacagttcagctttctctccttctagcgattcacttctgagctctaccgaatcctcaccacaggggtcccccgagccactggtcctgcacgaggagacgcctccaacgacttcctcagactctgaggaagagcaggaggacgaggaggaaatcgatgtcgtcagtgttgagaaacgccaagcgcccggcaagaggagcgaaagcggcagcccctccgccggaggtcactcaaaaccaccgcacagcccactagtgctaaagaggtgccatgtgagcacacaccagcacaattacgcagcccctccaagtacccgtaaggactatcccgccgcgaagcgagtgaaactcgattccgtgagagtgcttaggcaaatttcaaataaccggaagtgcacgtcgccaaggagtagcgatactgaggaaaatgtgaagagacgtactcacaacgttcttgagcggcagcggaggaacgaactcaagaggagtttctttgctctaagggatcagatccctgaactggagaataatgaaaaagctcccaaggttgtcatattgaaaaaagctacagcttatattctgtccgtgcaggccgagactcagaaactgatctccgagatcgatctcctgcgcaagcaaaatgaacaattaaagcataaactagagcagctacgaaattcttgtgca

SEQ ID NO: 128724 - DNA, 1317 bp, Artificial Sequence
  derived and/or modified sequence
atgccactcaacgtctctttcaccaaccgcaattatgatcttgactacgacagtgtgcagccgtatttctactgtgatgaagaggaaaatttctatcagcagcaacagcagagcgagctgcagccccccgccccctccgaggacatctggaagaaatttgagttactgcccaccccacctctttccccaagcaggaggtccggcctgtgttccccatcatatgtcgcggtgacacctttctcgctgagaggagataacgatggaggcgggggctcgttttccaccgctgaccaactagagatggtcaccgaactactgggcggtgatatggtcaaccaaagctttatttgcgaccccgatgatgaaacctttattaaaaacattattatccaggactgcatgtggtctggattctcggcggccgcgaagctcgtctcagagaagctcgcatcataccaggcagcccgaaaggacagcggctcacccaacccagcgagaggtcactcagtgtgctctaccagtagcctctatctccaggacctttccgccgcggccagcgagtgcatcgacccctcagtggtgtttccataccccctcaatgatagctccagtccaaaatcctgcgccagccaagactcatcagcttttagtccgagcagtgattctttgctaagcagtactgagtcttccccacaaggctctcctgagccactcgttcttcatgaggagactcctcccaccacttcatctgatagcgaggaggagcaggaggacgaggaagagatcgatgtcgtgtccgtggagaaaagacaagctcccggcaagaggagcgaatcaggttccccctctgccggaggacatagcaagcctccacacagtcccctcgttctgaagcgatgtcatgtctcaacccaccagcacaactatgcggcgcccccatcaacccgaaaggattatcctgctgctaagcgggtaaagttagacagcgtgcgtgtgttgagacagatttctaataataggaaatgcacaagcccaaggagtagcgacaccgaagaaaatgtcaagcggcggacacacaatgtgcttgagcgtcagcgccgcaacgaactgaagcgatccttcttcgccctccgagaccagatccctgaactggagaataacgagaaggcccccaaggtcgtgatcctgaagaaggctaccgcttatatcctgtcagttcaggcagagacacaaaagctcatcagtgaaattgatctcctgaggaaacagaacgagcagctgaagcataaactggagcaactgcggaacagctgcgct

SEQ ID NO: 128725 - DNA, 1317 bp, Artificial Sequence
  derived and/or modified sequence
atgccactgaatgtcagcttcaccaatcggaactacgacttggattacgactccgtccagccctatttctactgtgacgaggaggagaacttctaccagcagcagcagcaaagcgaattgcagcccccggccccgagcgaggacatctggaagaaatttgaactgcttccaactccgcctctgtcgcctagcagaagaagcggtctgtgctccccatcgtacgtcgccgtcaccccgttttcactgaggggagacaacgacggaggaggcggatccttttcaaccgctgaccaactggaaatggtgactgaactgttggggggagacatggtgaaccaatccttcatctgcgatccggacgatgaaaccttcatcaaaaacatcattattcaagattgcatgtggtcgggtttttctgctgccgccaagctcgtgtcagaaaaactggcctcataccaagccgcccgcaaggacagcggatccccaaacccggcccggggacattcggtgtgtagcacctcctccctctacctccaagacttgtctgctgctgcgagcgaatgcatcgacccgtccgtggtgttcccgtacccgctgaacgactcgagcagccctaagtcctgcgcgtcccaagattcatcagcctttagcccatcctcggactcgcttctttcctccactgaaagctccccgcaggggtcgcctgagcccttggtgctgcacgaagaaactccaccgaccacctcaagcgatagcgaggaagagcaggaggacgaggaagagatcgacgtcgtttccgtggaaaaacgccaagcaccaggtaagaggtccgaatcgggatcaccctcggccggaggacactcaaagccgcctcattcgcctctcgtgctcaagaggtgccacgtgtccactcaccagcacaactacgcagcgccgccttcaacgagaaaggattacccagccgcaaagcgggtgaaactcgatagcgtgcgcgttttgcggcagatctcgaataaccggaagtgcacgagcccgagatcgagcgacaccgaagaaaacgtgaaaaggagaacccacaacgtcctcgagagacaacgcaggaacgaacttaagagatccttctttgccctccgcgatcaaatcccggagttggaaaacaatgaaaaggcaccaaaggtggtgatcctcaagaaggcaactgcttacattctctcggtccaggctgagacgcagaagctgatcagcgagatcgacttgctgcgcaagcagaacgaacaattgaagcacaaactcgagcagcttcgcaactcgtgcgcc

SEQ ID NO: 128726 - DNA, 1317 bp, Artificial Sequence
  derived and/or modified sequence
atgccactcaacgtctcatttaccaaccgcaactatgacctagactacgacagtgtgcaaccatatttctactgcgatgaggaagagaacttttaccagcagcagcagcagtctgagcttcaaccccctgctccctccgaggatatctggaagaaattcgagctcctacccacacctccactgtctcctagccgcaggtcagggttgtgcagtccgagctatgtggccgtcacccccttttcactgcgtggggacaacgatggcggtggaggaagtttttcaacagctgaccaactggaaatggtgaccgagctccttggcggggacatggtgaatcagagctttatatgtgaccctgatgacgaaaccttcatcaagaacataatcatacaggactgtatgtggtcgggtttcagcgccgccgccaagctggtttcagagaagctcgccagctaccaagctgcccgaaaggattcggggtccccaaatcccgcgagaggacattcagtctgctcgactagcagcctgtacctgcaggacctgagcgccgctgccagcgaatgtatcgatccgtcagtggtattcccctatcctctgaatgatagctcgtcgcccaagagctgtgctagccaggactctagcgccttcagtccgtcctctgatagcctactgagctctactgagtcaagtccacaaggctctcctgaaccgctggtgctgcatgaggagactccacccaccacctctagcgatagtgaggaagagcaagaagacgaagaggagatagacgtagtgtctgtcgaaaaacggcaagctccaggaaagcgatcagaaagtggtagtcctagtgccggtgggcacagtaagcctccgcacagtcctctagtcctgaaacggtgtcacgtctctacacatcagcataactacgctgctccaccgtccactcggaaagactaccccgcagcaaagagggtgaagctggattctgtacgtgtcctccggcagatttctaataatcgaaaatgcaccagccctcgctccagtgatactgaggaaaatgtgaaaaggcggacccataacgtgcttgagcggcagcgtaggaatgaactgaaaaggtcattcttcgcactgcgggatcaaattcccgagctcgagaataacgaaaaggccccaaaagtggtgattttgaaaaaggcaactgcctacattctgtcagttcaggcggaaactcagaaactgattagtgagatcgacctgctccgcaagcaaaatgagcagctgaagcataagctggagcagttgcgcaatagctgtgcc

SEQ ID NO: 128727 - DNA, 1317 bp, Artificial Sequence
  derived and/or modified sequence
atgccgcttaacgtgagctttaccaatagaaactacgatctggactacgactcagttcagccttacttttactgtgatgaagaggagaacttctaccaacaacagcaacaatcggaactgcagcctccagcaccctcggaggatatttggaaaaagttcgagctgttgccaacgccacctctttcgccttccagacggtcgggcttgtgctccccttcgtacgtggcagtcaccccgttttcactccgcggtgacaacgacggaggaggtggttcctttagcaccgcggatcagctggaaatggtgactgagcttcttggtggggatatggttaaccagtccttcatctgcgaccctgatgatgaaacctttatcaaaaacatcattattcaagattgtatgtggagtggcttttctgcagcggcaaagctcgtcagcgagaagctggccagttaccaagcggctaggaaagatagcggatcgcccaatcctgcgcgcggtcatagtgtctgttcgacctcaagcctttaccttcaggatctgtcggcagcagcatccgaatgtattgatccctcggtggtgttcccctatcctctcaacgacagctcgtcgcctaagtcatgtgcaagccaagatagcagcgcattcagcccatcctccgattcattgcttagctccactgaatcctctccccaaggctcaccagagcctctggtcctgcacgaagaaactccaccaaccacgtcatccgactcagaggaggaacaggaagatgaagaagaaatagacgtcgtgagcgtggaaaagcggcaagcaccgggaaagcgatcagaatccggcagtccctcggcaggagggcattctaaacccccgcacagcccacttgtgctgaagcggtgccatgtctccactcatcagcataactacgcagctcctccatccacccggaaagattaccctgcagctaagcgcgtgaaactcgattcagtaagggtgctccgccaaattagtaataacagaaagtgtacctctccgagaagctctgataccgaggaaaatgtaaagcgtagaactcataatgttcttgaaagacaacgtagaaacgaactgaagcgatccttttttgcccttagggaccagatcccagagctggaaaacaatgagaaggccccaaaagtggtgattctcaagaaggccactgcctacatactgtctgtgcaagccgaaactcaaaagctcatttcggagatcgacctcttgcgaaaacaaaatgaacagctgaagcacaagctcgaacagctccggaactcctgcgca

SEQ ID NO: 128728 - DNA, 1317 bp, Artificial Sequence
  derived and/or modified sequence
atgccattaaacgtaagtttcaccaatcggaactacgaccttgattatgacagtgttcagccctacttttactgtgacgaagaagagaacttctatcagcaacagcagcagtccgagctgcagcctccagctccatcggaggacatttggaagaaattcgaacttctgccaaccccgccactgagcccctcccgacgcagcggcttatgttctcccagctacgtggccgtgacccctttctctttgcggggcgacaatgatggcgggggaggcagctttagcacagcagaccagttagagatggtcacagagcttttgggaggtgatatggtaaaccagagctttatatgcgaccccgacgacgaaacctttatcaaaaacatcattatccaggattgcatgtggtctggcttctccgcggcagccaagctggtgtcggagaaactagcctcttatcaggctgcgcgcaaagattccgggagccccaaccccgcgagaggacactccgtttgcagcacctcctccttgtacttacaggatttgagtgccgcggcctcagagtgcatcgatccctccgtggttttcccctatcctctcaacgactccagctcccccaagtcttgtgctagccaggatagtagtgctttctccccttccagcgactcactgctgagctctactgaatccagcccgcaaggcagccccgagccattggttctacacgaggagaccccaccaactacaagcagtgactccgaggaggagcaggaagatgaagaagaaattgacgtcgtgagtgtcgagaaacgacaagcacccggcaagcggagcgaatccggtagtccctccgcaggcggacactccaaaccaccgcacagtccattggtcctgaagagatgtcatgttagcacacaccaacataactatgctgcgcctcccagcacaagaaaagactatccggcggccaagagggttaagctggactctgtcagagtattacgccaaattagcaacaataggaagtgtacctctccccgcagttccgacaccgaggaaaatgtgaagcggagaacacataacgtcctggaacggcagaggcgaaacgaactgaagcgctccttctttgctttaagggaccagatacccgaattagagaacaacgagaaggcacccaaagtggtgatactgaaaaaagccacagcttacatcctaagcgtccaggctgaaacacagaagctgatcagtgagatcgatctgctgagaaagcagaacgagcagctcaaacataagctggagcagctccgtaatagttgcgct

SEQ ID NO: 128729 - DNA, 1317 bp, Artificial Sequence
  derived and/or modified sequence
atgccgctgaatgtgtccttcactaatcgtaactacgatctggactacgactccgtacaaccctacttctactgtgatgaggaggagaacttctaccaacagcagcagcaatcggagctgcagccaccagctccgagcgaagatatctggaaaaagtttgagcttctgccaactccgcctctctcaccgagtaggagatccggactgtgctccccgagctacgtcgcggtgacgcctttttctctgcggggcgataatgatggaggaggaggtagcttctccaccgcggaccagctcgaaatggtgaccgagctcctgggaggagacatggtcaaccagtcgttcatttgcgacccggatgacgagactttcattaagaacatcatcatccaggattgtatgtggagtggtttttccgcggccgccaaattggtgagcgaaaaactggcgtcatatcaagccgcgcgaaaagattccggatccccgaaccctgcccgcggccatagcgtgtgctccacttcttctctgtatctgcaggaccttagcgcggcagcctcggagtgcatagacccgtcagtggtatttccatacccgctcaacgactcttcgtctccgaagtcttgcgcatcgcaggattcaagcgcattcagcccgagctcggattcacttctctcctcgaccgagagctcaccacagggatccccggaacctttggtgctccatgaggaaacccctccaactacctcctcggactccgaagaagagcaggaggacgaggaagagatcgacgtggtcagcgtggagaaacggcaagcacccggcaagaggagcgaatcggggtcgccaagcgccggcgggcattccaagccgccccacagtcccctggtcctgaagcgctgtcacgtcagcacccatcagcacaattacgccgctcccccttcaacccggaaggactacccagcagcaaagagagtcaagctcgatagcgtgagggtgctgaggcaaatctcgaacaatagaaagtgcacttcgccccggagctctgacacggaagaaaatgtgaagcgtcggacccacaatgtgctggagcgccaaagacgcaacgaactgaagcgctcattcttcgccctgagggaccaaatcccagaattggaaaacaacgaaaaggctcccaaagtcgtgatcctgaagaaagccaccgcttacattctgtcggttcaggcggagacgcagaagctgatctccgaaatcgatcttttgagaaaacaaaacgagcagttgaaacacaagctggagcagcttcggaactcctgcgca

SEQ ID NO: 128730 - DNA, 1317 bp, Artificial Sequence
  derived and/or modified sequence
atgccgcttaatgtatcctttaccaacaggaattacgatctcgactatgattcggttcagccctacttttactgcgatgaggaagaaaatttttatcagcagcagcagcagagcgagttacagccgcctgctccatccgaggacatctggaaaaaatttgagcttcttccaacaccaccgctctccccttcgaggcggagtgggctctgctctccatcctacgttgcagtcacaccatttagtctccgtggtgataatgatggcgggggaggcagttttagcaccgctgaccagctggaaatggttactgagttgttgggaggagatatggtgaaccagtcctttatctgtgatcccgatgacgagaccttcattaagaatattatcatccaggattgtatgtggagcggatttagcgccgcagccaagctggtgagcgaaaaactggcgagctaccaagcggcaaggaaagattcgggcagcccaaaccccgcgcgcgggcatagtgtgtgctccacatcgtctctttacttacaggacctgtctgccgctgctagcgaatgtatagatccgtcagtggtgttcccttacccactcaatgattcctcctccccgaaaagctgtgcgagccaggactccagcgccttctctccaagttccgactcccttctgtcaagtacggaatccagcccacagggctcccccgagccattggtgctgcacgaggaaacacctcccactaccagcagtgactctgaggaggaacaggaggacgaggaggagatcgatgtggtttccgtcgagaaaaggcaggctccagggaagcgttccgagtccggcagcccttcggctggtggacattccaagccccctcactcaccattggtccttaaacgatgtcacgtttcgacccaccagcataattacgccgcccctcctagtaccaggaaagactaccctgccgccaagcgggtgaaactggacagtgtgcgagtacttagacagatctcaaataacaggaagtgcacgtctcccagaagctctgatacagaagaaaacgtgaaacggcgcacccacaatgtgttagagcgccagcgacgaaacgagcttaagcgcagtttttttgcactgagagatcaaatccccgagttagaaaacaacgagaaggccccaaaggtggttattcttaaaaaggcaacggcatacatcctgtcagtccaggcagaaactcagaagttaattagtgaaatagaccttctccggaaacagaacgagcagctgaagcacaaactggaacagctgaggaacagttgtgct

SEQ ID NO: 128731 - DNA, 1317 bp, Artificial Sequence
  derived and/or modified sequence
atgcccctcaacgtcagttttaccaacagaaactatgacctcgattatgactcggtgcaaccgtacttctactgtgatgaggaagaaaacttttaccagcaacagcaacaatccgagttgcagccccccgcccctagcgaggatatctggaaaaagttcgagctcctgcccacacccccactcagcccttcccggaggtcaggcctctgttccccaagttatgtggccgtgacgcccttcagcctccgtggggacaacgatggaggcggaggatctttcagtaccgctgaccagcttgagatggtcaccgagctgctcggaggagacatggtgaatcagtcctttatctgtgacccagatgatgaaacattcataaaaaacatcatcatacaggactgcatgtggagtgggttctccgctgcggccaagcttgtgagcgagaaactggcttcctaccaagccgcgcggaaagactccgggtctccaaaccctgcgcggggccacagcgtctgttccacttcttcgctttatctgcaggatctctccgccgccgcttcagaatgtattgacccaagtgttgtgtttccgtaccctctcaatgactcttcctcccctaagtcatgcgcttctcaggacagttctgcgttcagcccttctagtgactccttacttagtagtacagagagtagccctcagggctccccagaaccactcgtcctccacgaggagaccccccctacaacaagctctgactcagaagaggagcaggaagatgaggaggagatcgatgtggttagcgttgagaagcgccaggccccaggcaaaagatcggagtctggctcaccaagtgctggagggcactcgaagccgccacattcccccctggtactgaagagatgtcacgtgtctacacatcagcacaactatgccgcccctccttctacaaggaaggactaccctgctgccaaaagggttaaacttgactctgtcagggtgctcaggcaaataagcaataataggaagtgtacttctcccaggtcttctgacactgaggagaacgtgaagaggcgcactcacaacgttctggagcggcagcgtagaaacgagctgaagaggtctttctttgccttgcgcgaccagattccagaactggaaaacaacgagaaagccccaaaagtggtcattctgaaaaaggccactgcttatatcctgtctgtgcaggcggagacacagaaattgatctctgaaatagaccttctccgaaagcaaaacgaacagttaaaacacaaattagagcagctgcgtaactcatgtgcg

SEQ ID NO: 128732 - DNA, 1317 bp, Artificial Sequence
  derived and/or modified sequence
atgccgttgaatgtgagtttcacaaaccgaaattatgacctggactatgatagtgtccagccatatttctactgcgatgaggaggagaatttctatcagcagcagcagcagtctgaactgcagccacccgcaccatccgaagatatatggaagaagttcgaactcctgcccaccccaccgctgtctcccagccgcagatctggactctgttctccttcttacgtggcagttacgcccttttcgctgcggggggacaacgatggtggtgggggcagtttctcaaccgccgatcagctggaaatggttacagagctgttgggaggcgatatggtgaaccaatcatttatctgcgacccagatgacgaaacttttatcaagaatatcatcatccaggactgcatgtggtccggcttctcagctgccgcaaagctggtgagcgaaaagttagcttcatatcaggccgcccgcaaggacagcgggtcccctaatcccgctcggggccactccgtgtgtagtacaagctcactgtacctgcaggatttgagcgcagctgcctctgaatgcattgatccaagcgtggtgttcccttacccactgaatgacagctcatcacctaaatcatgtgcttcccaggactccagcgcgttcagcccctcctctgacagcttgctgtcttccactgagagtagtccacagggatctcccgagccgctggtgctgcacgaggagacgccccccacaacctccagtgacagcgaggaggaacaagaggatgaggaggagatcgacgttgtgtctgtggagaagagacaggcccctggcaaaagatctgaaagtggctccccctcagcaggggggcactcaaagcctccacactctccattagtgctgaagaggtgtcacgtgtctacccaccagcataactatgcagcaccaccctcgactagaaaagattatccagccgctaaacgggttaagcttgacagtgtcagagttttaaggcaaatctctaataataggaagtgcactagcccgcgtagctctgacacagaagagaacgtgaagcgccggacccataacgtcctcgagcggcagcggaggaatgagctgaaaaggtcctttttcgcgctgagagatcagatcccagagcttgagaataacgaaaaagcccctaaagtggtaattctgaagaaagcgaccgcttacatactaagtgtgcaggcagagacccagaagttaatttccgaaatcgatctcttacgcaagcaaaacgaacagttaaaacacaaactggagcagctccgcaatagctgtgca

SEQ ID NO: 128733 - DNA, 1317 bp, Artificial Sequence
  derived and/or modified sequence
atgccacttaacgtgagcttcaccaacagaaattacgacctggattacgacagcgtgcagccttacttctactgtgacgaagaagaaaacttttaccagcaacagcaacagtccgagcttcagcctccagctccctcagaggacatatggaagaagtttgagcttcttccaaccccgcctctctcgccatcgagaaggtcgggactgtgctccccatcgtatgttgcagtaacgccttttagcctgcggggagacaatgacggtggaggtggatccttttcaaccgcagaccaacttgagatggtcactgagctgcttggcggcgatatggtaaatcaatcattcatctgcgatccagatgatgaaaccttcataaagaacattatcattcaggattgtatgtggtccggttttagcgcagcagcaaagctggtgtccgaaaaacttgccagctaccaggcggcaagaaaggattccggtagcccgaatccagcgcggggacattcagtgtgctcaacctcatccctgtacttgcaggacctctcggcggcagcctcggaatgcattgatccatcagtggtttttccatatcctcttaatgattcatcgtctcctaagtcatgtgcctcacaagattcgtccgctttttccccctcctcagactccctgctgtcgagtaccgagagttcacctcaagggtcgcccgaacccctcgtcctccacgaggaaactcccccgaccacttcatcggacagcgaggaagagcaagaggatgaagaagagattgatgtggtgtcagtcgaaaaaaggcaggcacctggcaagcgtagcgaatcgggctcgccctcggcagggggacactcgaagcctcctcactcgccgcttgtgcttaaaaggtgtcatgtgagcactcatcaacataactacgccgcccctccgagcaccagaaaagattaccccgcagccaagcgtgtgaagttggattcagtccgggtgttgagacaaatttccaacaaccgcaaatgtaccagcccccgatcaagcgatactgaagaaaacgtgaagaggcgcactcataatgtactggaacgacaacgccggaacgaactcaagagaagtttctttgcactgcgcgatcagatcccagaactggaaaacaacgaaaaggcacctaaggttgtgattctgaagaaagcaactgcatacattctgtcagtccaagccgaaacgcagaagctcatctccgagatcgatctgctgcggaaacaaaacgaacaactcaagcataagctcgagcaacttagaaattcctgtgca

SEQ ID NO: 128734 - DNA, 1317 bp, Artificial Sequence
  derived and/or modified sequence
atgcctctgaacgtatcttttaccaaccggaattacgaccttgactatgattccgtgcaaccctacttctattgcgatgaggaggagaatttttaccagcaacagcagcaaagcgaactccagccaccggcgccatccgaagacatttggaagaagttcgagcttctgcccactcccccactgtcgccttccaggcgttccggcctttgttcccctagttacgtagctgtcactcccttttcccttagaggcgacaacgatggtggaggaggcagtttctcgacagcggaccagctcgaaatggtcactgaactgttggggggtgacatggtcaatcagagcttcatatgcgaccctgatgacgagaccttcataaagaacataattatccaggactgtatgtggagcgggttctctgccgccgctaaacttgtttccgagaaactcgcaagttatcaggctgccagaaaagattccgggtcccccaatccagcaagaggacatagcgtttgctcgacgagcagcctctacctccaggacttaagcgcagcagcctcagagtgcatcgatccttcggtcgtattcccttatccgttaaacgacagcagttcccctaagagttgcgcatctcaagactccagtgccttctctccctcttcagacagtctgctttcctcgacagagtctagcccgcaggggtctccagagccgttggtcttgcatgaagaaacgcctcccactactagttcagactccgaggaagagcaggaagacgaggaagagatcgacgtggtcagcgttgaaaagcggcaagcccctggaaaacgctctgagtctgggtccccctccgccggtggccactccaagccgccacactcccctcttgtcctgaagcgctgtcacgtgagcacccaccagcataattacgcagcaccacctagcacaagaaaggactatcccgccgccaaaagggttaaattagactcggtcagggtgcttcgtcagatttctaacaatcgaaagtgtacctccccaaggtcttccgacactgaggagaatgtgaaacggcgtacccacaacgtattggagagacagagacggaacgagctgaagagatcttttttcgccctccgcgatcaaatccctgagctggagaataatgagaaggcgcctaaggtagtcatcttaaagaaggccactgcctatatcttgagtgtgcaggctgaaacccagaaacttataagtgaaatcgatctgctgagaaaacagaatgagcagcttaaacataaactggagcagctgaggaatagctgtgct

SEQ ID NO: 128735 - DNA, 1317 bp, Artificial Sequence
  derived and/or modified sequence
atgccattgaatgtgtcattcactaaccgcaattacgacctggattacgatagtgtgcagccttacttttactgcgacgaagaggaaaacttctaccagcaacagcagcaatccgagttgcagccgccggcaccatcagaagatatctggaagaaattcgagttgttgcccactccacccctgtccccatcccggaggtcgggcctgtgctccccgtcctacgtggccgtgactccattctcgctgaggggtgataacgacgggggcggaggttcgttctccaccgctgaccagcttgaaatggttaccgagctcctgggtggcgatatggtgaaccaatcgtttatctgcgaccctgatgacgaaaccttcatcaagaacattatcatccaggactgtatgtggagtggattctcggcggccgccaaactggtgagcgagaaactggcctcgtaccaggccgccagaaaggactccggcagccctaaccctgcaagggggcactcagtatgctcgactagctcactgtacctccaggacctgtcggccgctgcctccgaatgcatcgacccgagcgtggtctttccgtacccgctgaatgattcgtcctcaccgaagagctgtgctagccaagacagctcagctttttcgcctagcagcgacagccttctctcatcgaccgaatcgtcaccacagggtagccctgaaccgctcgtgctccatgaagaaaccccgccgacgaccagcagtgactcagaggaagaacaggaagatgaagaagagatcgatgtcgtgtcggtcgaaaagagacaggcgccgggcaagcgctcggagagcgggtcgccgtccgcaggcggacattccaaaccaccgcacagcccgctggtgctcaagaggtgccatgtctcaacccatcaacacaattatgcggcgccgcccagcactcgcaaagactacccggcagccaaaagagtgaaacttgattcagtgcgggtgctgcgccagatcagcaacaatcgcaagtgcacttcccctagatccagcgacactgaagaaaatgtgaagcgccgaacccacaatgtgttggagcggcagcgccggaacgagctgaagcgctcgttcttcgcacttagagatcaaatccctgaattggagaacaatgaaaaagccccgaaggtggtgatcctgaaaaaggctactgcttacattctgagcgtgcaggctgagacgcaaaaattgatttctgagattgacctcctgcggaaacagaacgaacaactgaagcacaagctggaacaattgcggaatagctgtgcc

SEQ ID NO: 128736 - DNA, 1317 bp, Artificial Sequence
  derived and/or modified sequence
atgcctctgaatgtgtcatttacaaacaggaattacgacctggattacgactctgtacagccatacttttattgtgatgaggaggaaaatttttatcagcagcagcagcagtcagagctgcaacctccagcaccttctgaggatatttggaagaagtttgaactgttgccaactcccccactgtccccctctaggcgttcaggactctgttctccttcgtacgtggcagttacccctttttcactgcgaggggataatgatggtggcggcggtagtttcagtacagctgaccagttggagatggtgaccgagctgttgggcggcgatatggtgaaccagagctttatttgcgatcccgacgatgaaaccttcattaagaatatcatcatacaagattgcatgtggagcgggttttctgccgccgccaagctagtgtccgaaaagcttgcgagctatcaggctgcaaggaaggatagtggcagtcctaatcccgcccgaggccatagtgtttgttctacatcatcgctgtacttacaagatctcagcgccgcagccagcgagtgcatagatccctccgtggtgtttccctatccacttaacgacagctcatcgccgaagtcttgcgcttcccaggactcaagcgcattcagtcctagctcagacagccttctcagtagtaccgagtcaagtccacaggggtcgccagagcctttggtgttgcacgaggagaccccccctaccacatccagcgattccgaagaagaacaggaagatgaagaggagatcgacgtcgtgtcagtagagaagaggcaggctcctggcaaacggtccgagtccggatccccatccgcaggcgggcattctaagcctcctcactcgcccctggtcctgaaaaggtgccatgttagtactcatcagcataactatgccgctcctcctagcacccgtaaggactaccctgccgccaagagagtaaaattagactctgtgcgtgttttgagacagattagtaacaacagaaagtgtacgagcccacgctcatctgacaccgaggaaaacgtgaaacggaggacccacaacgtgctggagagacaaagacgaaatgagctcaagcggtcattcttcgccctgagagatcaaatccccgaactggaaaataacgaaaaagcccccaaggtggtcatccttaaaaaggccaccgcatatatcctatcggtgcaggctgagactcagaagctcatcagtgagatcgacctcctgcggaagcaaaacgaacagctgaagcataaactcgaacagctgcgcaactcgtgtgcc

SEQ ID NO: 128737 - DNA, 1317 bp, Artificial Sequence
  derived and/or modified sequence
atgccgctgaatgtgagcttcactaaccgcaactacgatctggactacgattcagttcaaccgtacttttactgtgatgaggaagagaacttctaccaacaacagcaacagtcagaattgcagccaccagctccctcggaggatatttggaagaaattcgagctcctgccgactccgccacttagcccttcgcgccgctcaggactgtgttccccgagctacgtcgccgtgactcccttctctctgcgcggggacaacgacggtggcgggggctccttttctaccgccgaccaactggagatggtgaccgagttgctcggaggggacatggttaatcagtccttcatctgcgaccctgatgacgaaacgttcatcaagaacatcatcattcaggactgcatgtggtcgggattcagcgcagccgccaagctcgtaagtgaaaagctggcctcctaccaggcggctcgtaaagactcgggatctcctaacccagcgcgcggacatagcgtctgcagcacttcatccctctatttgcaggacttgtccgcagccgcttcggagtgcatcgacccatccgtcgtgtttccatacccgcttaacgatagctcttcgccaaaatcgtgcgcgagccaggattctagcgccttttccccgagctccgattcgctgctctccagcaccgagtcatccccgcaggggagcccggaaccgcttgttctgcacgaagaaaccccgcctaccacctctagcgactccgaagaagagcaggaggacgaagaggaaatcgatgtggtgtcggtggaaaaacggcaggcgccaggaaagcgcagcgaaagtggcagcccctcagccggaggccacagcaagcccccgcattccccgctggtgttgaagcggtgccatgtgtccactcaccaacacaattacgctgccccaccaagcaccagaaaggactaccccgcagccaagcgcgtcaaactcgattcggtgagagtgctgcggcagatctctaacaatcgaaaatgcacttcacctcgttcttccgatactgaagaaaacgtgaagcggagaacccacaacgtccttgaaagacaaagacggaacgaactcaaacgatccttcttcgctctgcgcgatcagatccctgaactggagaataatgagaaggcgccgaaagtggtgattttgaagaaagccaccgcctatatcctgtcagtccaggcagaaacgcaaaagctgatctccgagatcgacctgctcagaaagcagaacgagcagttgaagcacaagctggagcaactgagaaactcctgtgcc

SEQ ID NO: 128738 - DNA, 1317 bp, Artificial Sequence
  derived and/or modified sequence
atgcccttaaacgtgagctttaccaatcgaaactacgatctcgactacgacagcgtgcaaccctatttttactgtgatgaggaagagaacttctaccagcagcagcaacagtccgaattacagccaccagcccctagtgaggatatctggaagaaatttgagctgctgccaacccctcctctaagcccatctcgccggagcggcctgtgctcaccatcttatgttgcagttacccccttctcactgcgcggagacaatgatggagggggtgggtctttttccacagctgaccagctcgagatggtcactgagctgctagggggagatatggtgaatcagtcatttatctgcgaccctgatgacgaaacttttatcaagaacatcattattcaagactgtatgtggtctggcttttctgctgccgctaagctcgtgagtgaaaagctagcttcttatcaggctgcccggaaagattctggatccccaaatcccgcccgcggccatagcgtttgctctacaagcagtttgtatctccaggacctgagtgcagcagccagcgaatgtattgatcccagcgtggtgtttccttaccctctgaacgatagttcctctcctaagtcctgtgcttcccaggactccagcgcattcagcccatctagtgatagtctgctcagtagtactgaatcttctcctcagggcagcccagaaccactagtgctgcacgaggaaactcctcccacaacctccagcgatagcgaggaagaacaggaggatgaagaagaaattgatgtggtgtcagtggagaagcggcaggctccaggcaaaagaagcgagtctggctctccatctgccggcggccacagcaagccaccccactccccacttgtgctgaagagatgtcatgtctctacccaccaacacaactacgctgctccaccatctactcgcaaagattaccctgctgcaaaaagggtgaaactagattctgtgcgggtgctgaggcagatcagcaataatcggaaatgtaccagcccaagaagttctgacactgaggaaaacgttaaacggcgcacacacaacgtgttggagcgacaacggcgcaacgaactgaagcgcagctttttcgccctgagagaccagatcccagagctggaaaataacgagaaagcccccaaggtggttatactgaagaaggcaaccgcttatattctgagcgtgcaagctgagacccagaagcttattagcgaaatcgatctgctccgtaagcagaatgaacagctgaaacacaaattagagcagctgaggaattcctgcgcc

SEQ ID NO: 128739 - DNA, 1317 bp, Artificial Sequence
  derived and/or modified sequence
atgccgctgaatgtctccttcaccaaccgcaactacgatttggactacgattcggtgcaaccgtacttttactgcgacgaggaagaaaacttctaccagcagcaacagcagtcggagctgcaacccccagcgccatccgaggatatatggaagaaattcgaactgttgccaaccccgccgctgtccccttcacgaagaagcggactttgctcgccgtcctacgtggccgtgactccgttctccttgcggggagacaatgacggaggagggggatccttctccacggcagatcagttggaaatggtgaccgagctgctgggcggagacatggtcaatcagtcatttatctgcgaccctgacgatgagacgttcatcaaaaacatcatcatccaggattgcatgtggtcgggattctccgcagccgccaaattggtgtcggagaagctcgctagctaccaggcagcgcgcaaggactctggaagcccaaacccggctcgcggacactccgtctgctcgacttcatcgctgtacctccaggacctgtccgctgccgcgtcagaatgcatcgatcctagcgtcgtgttcccgtacccgctgaatgattcctcatcccctaagtcgtgtgccagccaggactcctcggcgttctccccatcgagcgactcgcttttgagctccactgaatcgtccccgcagggatcgcccgaacccctggttcttcacgaggagacgcccccaaccacctcgagcgattcagaagaggaacaggaggatgaagaagaaatcgacgtcgtgtccgtcgaaaagcggcaggcacccggcaaacggagcgaatcaggttccccgtcggccggagggcattccaaaccacctcattcccccctggtgttgaaacgctgtcacgtgtccactcaccagcacaactacgctgcaccacctagcacccgcaaagactacccagctgcgaaaagggtgaaactggacagcgtgagggtactgcggcaaatctctaacaaccgcaagtgcacctcgccgcggtcctccgacactgaggaaaatgtgaaacggcgcactcacaacgtcctcgagcgccagaggagaaacgagctgaaacggtccttttttgctctgcgtgaccaaattccagaactggagaataatgagaaggcccccaaggtcgtgattctgaagaaagccactgcctacatcctgtcagtgcaagccgaaacccagaagctcattagcgaaattgacctcctgagaaagcaaaacgagcagctgaagcacaaactggaacagctgcggaattcctgtgct

SEQ ID NO: 128740 - DNA, 1317 bp, Artificial Sequence
  derived and/or modified sequence
atgccgctgaacgtcagctttaccaatcggaattacgacctcgactatgattcagtgcaaccctacttctactgcgacgaagaagaaaacttttaccagcaacagcagcagtcagagctgcaaccgccagcaccgtccgaggacatctggaagaagttcgaactcctccccacccctccactgagcccatcaagacgaagcggactctgttcgccttcctacgtcgccgtgactcctttctcgcttcggggcgataatgacgggggaggaggatcattctcaaccgctgaccagctcgaaatggtgaccgagctcctgggcggagacatggtgaatcagtcatttatctgcgacccagacgatgagacttttatcaagaacatcatcatccaagattgtatgtggtcgggcttctcggcggcagcgaaattggtgtcggaaaaacttgcaagctaccaagctgcacggaaggacagcggctcaccgaacccggcccgcgggcattccgtctgctcaacgtccagcctctaccttcaagatctctcagcagccgcgagcgagtgtatcgacccttcagttgtgttcccgtaccctctgaatgacagctcgtcgccaaagtcatgcgcctcacaagatagctcggctttcagcccctcctccgattctctcctctcgagcaccgaatcctcgcctcagggatcgccggaacccctcgttctgcatgaggaaactccgccgacgacttcttcagactccgaagaggaacaagaagatgaggaggagattgatgtggtgtccgtggagaagcggcaggcgccgggcaaacgctccgaatccggatcgccgtcggccggtggccattcgaaaccaccgcattccccgctggtgcttaaacggtgtcacgtgtcaacccaccaacacaattacgctgccccaccgtcgactcgcaaggattaccctgccgcaaagcgcgtgaagctggactcggtgcgggtcctccggcagatttcgaacaacagaaagtgcaccagcccgagatcatcagataccgaagagaacgtgaagcggagaacccacaatgtcttggagcgccaaaggcgcaacgagctgaagcgctccttcttcgctcttcgcgaccaaatcccggaactggaaaacaatgagaaagcccccaaagtggtcatactgaagaaggcgactgcgtacatcctgtccgtgcaggcagaaactcaaaagctcatctcggagattgacttgctccggaagcagaacgaacaactgaagcataaactcgagcagcttcggaactcgtgtgct

SEQ ID NO: 128741 - DNA, 1317 bp, Artificial Sequence
  derived and/or modified sequence
atgcccttgaatgtaagctttacaaacagaaattacgaccttgattacgactctgtccagccgtacttttattgtgacgaggaggaaaatttctatcagcagcagcagcaaagtgagcttcagcctccagctccttcagaggacatttggaagaaattcgagctgttgcccactcctccattgtctccttccagaaggtccggactttgttctcccagttatgtggcagttaccccttttagcttgagaggcgataatgatgggggaggcggcagtttctccaccgcggatcagctggagatggtgaccgagcttctcggaggagacatggtcaatcagagtttcatatgtgaccccgatgatgagacattcatcaagaatattatcatacaagattgcatgtggagtggattctctgcagccgccaagctcgtttccgaaaagctggcatcttaccaagctgcacggaaggactcaggatctcccaacccagccagaggccatagcgtctgcagcaccagcagcttgtatctgcaggacctctctgcagcagcctctgaatgtattgatccctctgtggtctttccttaccccctgaatgactcttccagccctaagtcctgtgcttctcaggacagcagtgccttcagcccttcctccgactctcttctctcctccactgagagctcacctcagggctccccagaacctcttgtgctccatgaggagacccctcccacaacttctagtgatagcgaggaagagcaggaagacgaggaggagatcgacgttgtcagtgtggagaagcgacaggcgcccggaaagagatccgagtccgggagtccgtctgctggaggccacagtaaaccaccgcatagccctctcgttctgaaacgctgccatgtgtctacccaccagcataactacgccgcacccccttccaccagaaaggactatcctgcggccaaaagagtgaaactggatagtgtccgggtccttaggcagataagcaacaatcgcaagtgcacctctccacgctcctccgataccgaagagaacgttaagcgccggacccacaacgtgctggagcggcaacggcgcaacgagttgaagcggagttttttcgccctgcgggatcagatccccgagctggagaacaatgagaaggcacccaaggtcgtgatcctcaaaaaggctacggcctacatccttagtgtgcaagccgaaacacaaaaactcatcagcgagattgacctccttagaaagcagaatgagcagcttaaacataagctggagcaacttagaaacagttgcgcc

SEQ ID NO: 128742 - DNA, 1317 bp, Artificial Sequence
  derived and/or modified sequence
atgccccttaacgtgtccttcactaatcgcaactacgatctggactacgacagcgtacagccatacttctactgcgacgaagaggaaaacttttaccagcagcagcaacagagcgaactccagccacctgctccgagcgaagatatctggaagaaattcgaactgctgccgaccccgccgctcagcccgtcgaggagaagcggactttgttccccatcgtacgtggccgttacgccgttttccttgcgtggagataatgacggaggaggtggttccttctctaccgccgatcagctggagatggtgaccgaacttctcggaggcgacatggtgaaccagtccttcatttgcgaccccgacgatgaaaccttcatcaagaacatcatcatccaagattgcatgtggagtgggttctccgccgcagccaagctggtgtcagaaaagctggcctcataccaagcggcgcgcaaagatagcgggtcccctaacccggcgcggggccactccgtgtgctccacttcatccctttacttgcaagatctcagcgcggcggcatctgagtgcatcgacccttctgtggtgttcccttatccactcaacgactcaagctctccgaagtcatgtgcttcgcaagactcctccgcattctcgccaagctccgatagcctgctcagcagcactgagtcgtcccctcaaggatccccggagcctctggtgctccacgaagaaactccgccaaccactagctccgactcggaagaagagcaggaggacgaggaggaaatcgatgtggtcagcgtggaaaaacgccaagcaccggggaaacggagcgaatccggatcgccgtcagcggggggccattccaagccgccgcactcgccacttgttctcaagcgctgtcatgtgtctacccaccagcataactatgccgcgccgcccagcacccggaaggactacccggctgctaagagggtgaagctcgattccgtccgcgtcttgcgccaaatttcgaataacaggaaatgcacgtctccgcgcagctccgataccgaagagaatgtgaagcggaggactcacaatgtgttggaacgccaacggcgaaacgaattgaaaagatccttctttgccctgagggaccagatcccagagctggagaacaatgagaaggcgccaaaggtcgtcatcctgaaaaaggcaaccgcgtacatcctgagtgtccaagcggagactcaaaaactgatctccgaaatcgacttgctgcggaagcagaatgagcaactgaagcataagttggagcagctccgcaatagctgcgct
